United States Patent Application Publication US 2024/0093182 A1 - sequence listing, part 19

SEQ ID NO: 40389 - DNA, 1896 bp, Artificial sequence
  DNA replication origin
ggggggtcagcctgccaaggagcagctagagctcaagaagcaaattcaggagagcaacacagccactgagccctggaaggtggcgctccacaagctctgatcggggctcccaaaacaatgacagatggccattcaaccaaggaactcaaggggcctggagcctgtgagatgcgagtgtccccagctgcaagggagctgactgggacacgggcatgtccacaggtagtctgttcagtccccaagggcaagaccagggttcagggagaagggctttgtgtgcatgctaggggtggaggcggggatgctagggacacccagcagtgtcagggcagttctgactggggacaccatgcttgcttggtgttatccaagctggccagccttggggtgtctggggagctgcagccctggcttctgcagtcctgcttttagagatggacttcatctcttgcaggtagaatggccccattccctgcagggcctgtaaggagacagaacgaggtgctcaagccagctgggggtggggatgtgagatgctttggacccactgtagggcctacttggggaatctaaggcttctttccactgtgccttttgccatgggccaggataaagaaggggagggcaggcatcttcccaggcagcaggggcggggtctccccagtccaacctcctcttgccctaccctaggatggcacagattgctgtgagggagtccgagcccacagcatgaaaaccccaggaggaagcaggggaccctcacccatgggcaggttcacagtagcctagaggccagggctggaccccaggggtccaaggccaccatccgtggagcagtcccctctgctggggagcaccctggtgcagagactgaggatcgctgagctgtgctcctctcaaagacagctgtaccctaaataccccctcgctgggaaggaagaagaagggacagctccttgttgggtgtgggagtggagccaaggtggacttgagactctgggcggcttctgtggtatttgaagttgctagtttctcagtatcagcgcgaggctcgaaggtgaagggactgtggaggggctcctggaatcgctcctgcgaccttcttattctacaggtccagataccaagacccagcccagggcctgggaagcctgcaacgccaggactgcacagacacgaaccccatcccctctcccgctgggggaggacgagccaggtcaagttaggtcaatgtccacattgagaagagggtggccagcatgtcccagggtgcggagagacgctccactgcgtaggattctgggtcccgtgttgatacggggtggttcccctcctgcggtggagttagtgtctctcggggggtagggagctgaggaaactgctctatgccccagcccacccccaagggactcgccactcccactgccgtggaacaccaagcaccgggggcccgtccccagcgccacggcagcacgagctgcaggaggcaagggctgtggagacgggtggaggcggccggtgtactctcccagctccttttcgggtagacctgtcttctctcagcgccaactccaaagatcccaaaaagggtggccgagcccaggggcagctcctagagtcatcagcagctccccttcggggacttcttgacgccgggcaggagcctcgcggaagccgacgcgcgcttctggtgtcgccatttggcccggcggttcttgaaccagacctggggatggggggaatgctcagccctagccccaggtcctgcgtcccaccggctcccgagggtcccacagggaccgagaggggagcttcgcaacagggatgtgggcggacggcgctgtagagccgacacccgggccgcggctgcgcgccacctgcccttattcgctgcgg

SEQ ID NO: 40390 - DNA, 1967 bp, Artificial sequence
  DNA replication origin
cctggacgacagagcgagactccgtctcaaaaaaaaaaaaaaaaaaaaaaaagggaggggggcaggccaggcaggcacggtggctcatgcctgtaatcccaacactttgggaggctaaggcaggcggattgcttgagctcggcagtttgagaccagcctaggcaacgtggcaaaacccccccaaaacagaaacattagctgagcatggtggtgcacctgtagtcccagctacttgggaggctgaggcaggaggatcacttgagctcaggatgccaaggctgcagtgagccatgatcacaccactgcactccagcctgggtgacagagcaagaccctgtctcaaaaaataatgcaaaatagaaaataaactttttgaaaaagtgccacagtgggccatttaccaaggtggactggtaaagaggcagggcacacgcagaggcaaataggtagaagagaatgagcactagagatggacaggtgggcagtggcccatttgtaaaagtggagaacatagggtaagaaagggattttgagaagaccttgagttcctttctggcatggtgactgggagaactttattggtagtggagatggagatgtggagcaggctccagaaacaagagcgtggagcagagagagaggccaggctggaggtgcacttgtgagtcactgtcacaaagatggtgtctggagctccaaggctggaataggtattgagggtgagaatgggaaaggatgaaggaatggccagggctaggaggaagagggctcagcaaatgttgggctggctctcctgaccaatgaccctgcctcccccatcatagcagcactctgattttggaggatggtccagatgcagttctgtgagggaggtctgctgagggaggagggatccatggccatccaaagggccatgggaggagatgaaaagtgtggggctgtggcagccattctaccaccaagaggtgggtggaggaggggttgacagagccactcatggaggtggcagctcatcactgagcctccagactacccctgggaaacctatgtgggagctcttgtgacagaaattaaatcagcaggttcggtcacagtgatgtccacagcactttcactgatagcagagtggggatggcagagtcttgcagaggggctggcggcgggaggagcgcaggaatacgcattgccctggggaggcggccaggttctaaccgtctcacacctagtcactacactttacagattgggaaagccaagcccagaggctgaagacgcctatggaggtcacacggccagaaattgacaacggagtatgagccaggccgtctgtttctctgtgctatgagtcccatactgtattttcaaaggtcaagaggaaagggtcttaagctgaagtgacggtcccgctgccaggagccgcttcactgagggtgaaacaatgtagccaagtgcgggtcacctgcgctgtggcagaagggaccgaggacggtgtggccagaggactggcctgggcggagagcgaggagggggagcccacagcttctggggggcagtgacagtgcggggaagggcgaggtgcagtgttggatgttttcgcggggattctgggaccagtgggaaagctggaggacaggcggctctgaagcaccgaggaggggcctcggaaggggcggggaggtctccttgacacaggtgaggagacggagaactgggggcacccggcagcccaggcttcctgccgcgctctcacgccctccagggccatgagaccctggctccgaggtggcgggcaggttcgggacccgagcgcggcgggatcgtgcggttgccggtggtgctgggccccatggaggctgcggtccaggagtttcgggtgggcggctaggccgagcttctgcaggcgtgctgagccgccgcagtagggccccagaggggacgaggaattaggcccagccgaacgaggggga

SEQ ID NO: 40391 - DNA, 1012 bp, Artificial sequence
  DNA replication origin
ccgactcggcggccctccctgcctggatggccggtccccgaggctgaggaagtccattcctctttcggaaatggtccccaggaagcttctccgtgtccccctatggccgggtactgagcggggcccgggtggtctgcggccgtggcccccgcccctcagcgcaggcgaccctcctggccctggcgggcacagcgcctctcccgtgacctgggccggcccgcaggatgagcccccggatcacgatcgctggcattttatttaccttcttccattacaaccccaggcgagtctcccgggccccgagaggagggggtgactggtcagggtcatcggtagcggcggcaggggcctgcatagggctgcctcggggcgactagcagaatggccgccagcctcggctgccccagcccccagcgcatggaatgtgccccgggccccaggagctccaggaaccgcgcttgtgagacggagcttcggctgcttggagctagtgagccaccggccacggcagggatttgagcagaacttgggggcagagggatgagatggtgcatcccttgaggtcacttcaggagatgacactcctgtggctaagtgtagcttcccaggtcatggctcccaggtcaggcctggtcaatggagaattaagtgggcgttgggtggtggatggatgtgatttggcagaggggacaaatgtgacaacagtgtaataagggccatgttggggagggtcaggggtcagggtccggcccaacctgagcagaagggaggctgctctcagggatatttgtcaggtaggaatgggtggagtggaactacagggccaccatgtttcccatgggtcacccatggtggccttgtcatgtttatccgtgatcctcagtgttctctgtggtcctcccgtcacccctttcagactgtcctttcagttctccactgtccctgcatcacctctgcccctgtcccgtttgtctgtgttcagtccatgttcccaggtcttgaggtggcccct

SEQ ID NO: 40392 - DNA, 1793 bp, Artificial sequence
  DNA replication origin
ctggcgctgggcttctcagggagccaacactgtggccacagctgctctgccctgggtggacactaggctttccctgtccccctactgcagtgtcctcagatgggggtggcctggtcccctgcagaggcacagccaccaatgcccatgcatagatgggtccatacagggacgaacacaggacaggaggctgcaacaggatccggtttattctgccttggcagggtggtcctgagagtggtgggtgccaccctgtccggggcggagagagggcccgagggccagttaaggccaatggcgggagaagcagggggctgcagcccctggaatgcggtgaagccaggccgaggcccggaggcagctgtggtaggccagggcagggtggaaggcaccggactgggaccgggccagggctacagggccgaggacccaggccacacgggcaccccgggaggcggggcacagggtcacgtgacacagaacatgaaacacaggcacagggtcataggccagatgcacatccagccatggctgggccagacactgggacacagtggtggtgtcacacacagaccacaggggggacacatggatttgacagccacaatgcacagaccaggctacagagctcgagggacgtgggaaggggccttttggcactactgcactggaatcgtgagacaaaggtagcaggacactctggcggtgcctggggcggtccccttgcggcctctctaggcttagtccgtcttccacactttgttgagcagcttcaccacttcatcatagatgacaaacactatggccacatccaggcagacccggcccaggcgggggacagtgcccttgtagaatctgggtgggaggaggggcggggagaggaaggcaggtcagcacagtgtccctgcacagggcaatccccagatactgaagtgagaggcacagaggcctgaaggggacagagtgggcaggccaggtaggccgggaaaggtttgaggtggggacaatagccctgcccctcccccactcacgccttgagcccctccttcttcaggatctgcaagccgcagtcccacgtgttccggtatttgtgcgcctccaggccctatgggggacatcagcaggcaggggctcagcagctagctctggcctggtccccccttcccctccccttcccggccccaccacctgcatccgggtcttaatcacatccagaggagtgtttccaaagacactggctgcgcctgcaatagctccgaagaccccagtgatcagagggttcatgggcttgttggggttgtcccctggatataggaggggtgaggtgggtcagagggtgccgggaggggcctggatcagcacttcaaaaggtgggtgcccgccacccaggggtggccccaaggagaggagaggagctggccatgtgcagagatggggccctgtgatgcagacacacctcggtaccagttgcgcagggaggtcatgacgaagaagcggatggcctggttcgagccctgcttcaggacagtggctgtgaggccctggtacgtccccttcagccctgcgggaaggcaggcacggggttaccctgcagcctctcaggccccggttgggaattggtgtgtgtggggggtgggtgttgcacaaagcccaaggcaggatgggaggtgcaggcccttcccaccctggcccaggtccctgagccctatcaggaaggtcgagtggctcaccttgttcccgcacaatctccctaaccccgtggaagaatcctctgtacttggggtttggggaggtct

SEQ ID NO: 40393 - DNA, 2176 bp, Artificial sequence
  DNA replication origin
ggaagtggggcggggcctcagcgtcccgggcccacccagaagcgcggcgggagaggggtccgcgtcccggaggggcccacctgccaggatcgccttccccgggtgcgtcagcttggccttcccggacgcgggcgcggcggccgccagagcgcgcggggcgcggggcgcgggcatggcgggcgggaggcggggcgccctgtggcggcttcgggtccgagactccagaactccgcgctcggtccgcggtggcggcggcggccggttatggtcccaggggcggggcggccgcgtcagctccaggtcccgccccgcgtggtccgagccaggccccgcccccagcccgccccgtgcgggccgggaaactgaggcctgggcggggcgcgccgaggcaggcgtaggggcggggccaaagcgcagccaatggccgaggccgagtccctgggcgaccgcgagcggcgggacgggggcggggctgcgggaggcggagccgtggcccagctccgagcagtgggtcaaggtgcactgtgtgccgcgccgcgggatagcgggcctcgggtctgcgcgactgtcgagagcggcgggatccccagggatcccggaggccaggggcacaccctccccgaaaacacgtggggctagcccagtcccagaggaactctaacgtttcaaacctggaggcgggaggcgggaggccggtgagaaggggctacgccgccgggcccccctcccgcagcagccacgggccgggcctcacctgccggttcccacccacacctttcccggttgtagtttctgcgctcagcgaacaaggtcaggaaagaccacaaatgcaagcggctgtattctcctaggcagcttgtctgggcaacggaggtcccacaccccaaagaggacccagcaaatctttaatggactgcggggcctaggaaactggcccgtccctcctacccataccagcaccaagcagagcacctttgcctggataaaccgactttaatatttatgattgccaagaggctgagagtccttttatgaggtccggtacctccaaacaagacgtgttcatgtagtcttcaaactggcctggagggggcagctccagccagtcggaggcgcccaggaggaaggcctggctccagcaggagggcccacagtccagtctctgttgtcggctaaagctggtcttgcgccgtcagcctctaccctggcctccccaggctctgggatggctcagaggttgccgtcattgggtttcagcaaaaataaatattgtccaggtgtccctgcctcccattgcgtcccctgtgctgctggagtgacatgctccttggagaagttagtaactctgcaggtagggtgggtggtgacaacgcccactacacgcggaagttgtacattggaggctggcgaagttgggagcagaggcatatccataggggaagctggcaggggctgggcccacggcagggcctgcagagggggaagcccacaatgagcagagctcttcctgcccatgggggtcctctcctggctgcccctgagtagcccggggcccagggagcagggtctataggaccagcccttaccacccagacgctgaggccccaagagagcaggcatccagaggcaaggagcgtggggtcagccagagaacctggcctggctagaggataagctagtctccaaatgggacacttacttagtgcaatcagctgggtctcattcatgcccatcaaaatctaaaaaaaccagaatgacattaatggtggaaggacacactcagccggacgctggagacccgccggcgtgctgcacactcacaccacaccctcaggcctgtgtttgccccacagtgtccaagcaccccacagcctctccagtctgctcgacagccaggctgccctgggcaggttctcaggtgcaaagcccctcccagcacacaccagcagcagccttgctgtccaggggccaggcccagcaggacacagcagtagttcacagctaggcaggcacccctatcagaaggcaggcatccttacagcagggaggacagcggccgtgccaacattcctgggcgtacacttctccacacccagtagccactgggatccttccagcccccacccatctattcccatccccatccaaagcccagccaggtaagggcagtgggact

SEQ ID NO: 40394 - DNA, 877 bp, Artificial sequence
  DNA replication origin
tatggttagtcaaggcagacgaagatgggatctgactctgctcagcagtgtcaccatggccatggaaattgagccccaaacccctcactatgtgagacgttgtctggaggggctcgcaccagcgccagagtgtccagatattagctgggtgtgatggcttttcaatgagaaatgctttcccacccccagagaggcgcctgagaaatgaactggaaagccaacagggagggtgatcaagcagtacagggctgacaaaagaacaatttagtcagcaaatctttgagtacttactgtgtgctaggcattattctcaataattgtgtcagtgaacaaaacagaaaagcctctatttaattgaactggcattcagcaaggttggcaggcaagcaacaaacctaatgaataattatatagtgtgtttgaaggtgatcagttatagaggaaaatggagccggtttgagggcataggagtgcctggatggagtttcataaaggggcggtcaaggtagcagcaattgagggggtgacatttgagcaaagacctgaagaaatggaaggatttggtcatgggaacatttgagggaagggtcagtggccaggcaaagtcctgaggcagaagtgtgctgtgtattcaaggaaggggctggagccagagatggggcagagaggctgacggagggccagatctcaggccgttaggaaggtcacgggctgtacttgggatgggtgcagggctgtcgggggtaaaaggatcatggtggctcatgtgctgagacacatacttgaggagtagggacaggagccagaagagcagctggaggctgttgcagtggtctaggcgagaagggacagtgactctgactagggtggtggtgac

SEQ ID NO: 40395 - DNA, 1942 bp, Artificial sequence
  DNA replication origin
gagcaagttggattagttttattttatttatttttgagatggagtttcactcttgtctcccaagctagagtgcagtggtgcgatctcagctcactgcaacctctgcctcccaggttcaagccattctcctgcctcagcctcctgagtagctgggattacaggcgcccgccaccacgctcagctaatttttctatttgtagtagagacagggtttcaccatattggccaggctggtctcaaactcctgacctcaggtgatccacctgcctcagcctctcaaaatgctaggattacaggtgtgagccactgtgcctggccagttttgttttgttttaaactagagaaaagaacagtggttctttaagcttgtcagagtggatgagtgcagaaggtgatggatgctgatgcagggatttgctgaaaccctgacatggagcatgtggagagggggtcagggacatccatggagcaggccttggtggcataggaaggacattccacggacactgtgctgtgaaaggctctcctgatagtttgttttctcaggaaaagggaagccaaatactcagcttgaggaatcgttagagctttgagaagagaaggagatatgaaagagttaacatgagagatgccatgggtgatggaaggaggggtggcagtagaggtgctatggatgacaggcgtgtaggggtggtacaagaggtgccatggatgacggaagtagggtagtgcagtagatgccatggatgacggaaggaggggaggtgccatggatgatggaaggaggggaggtgccatggatgacagaaggaggggtggtgggggaggtgccgtgatggcggaaggaggggtggtgcgggaggtaccgtggatggcaaaggaggggtggtgcgggaggtgccgtggatggcggaaggaggggtggtgcgggaggtgccgtggatggcggaaggagggttggtgcgggaggtgctgtggatggcggaagtaggatgggtagtgttgccagtgcatttgatgttagccttcatgaatttagagagacccatcagcactttggggttctgctgtctgtgtttagctctgcagccacaggtatggaatgggcagagaactagctctgagcaggactgagaacaatcaggagagtcaagagtgaatgccaggagctgtccagcatgatctggggccaccagctggggcaagtgcaagttgggcatggacagggctgcaggaattcagtccagtcactggactggtggagttgaggcgctcaggatggcgagctgggcagtgctaggcagagtaggtacttgtggaaggttcccagggctggcatctctcttctgaggtgtaaggtgtggctatggcagtgacttgttcttgtgagaagaacaaggtccccagctcataggaagtcaaataaattgccagagaatgagaaagatttgtaaatggcatcaggaactagggctggtgagtgatacctgacacaagattggttgtgaacggtttttattgaggaggaaggggaacggcttggaagcagcaaggagcacacctcctcagcccaggcccagtggggtgcagatgtggtaggtgacagccagggcctgagaggtgccagaacgcagggttagataggagcgggcaggtagaagcgccccctgaggtggaggagggtgtccagggactagaaagccaaggccaacttcatctggtcactggtgcgatcagaaagatgcttaccaccctagcaaacagaaaaatacctctgccatctaggaacttaaaagcaactctggagaaatcttcccattgaagagtgtctcagtcgagctaccctattatccgtaggttggagaccgctgttacgaggagggaatgtacgaggctgccaagctgctctatagcaatgtttctaactttgcccgcctggctt

SEQ ID NO: 40396 - DNA, 621 bp, Artificial sequence
  DNA replication origin
gggcagcgacagcagataaagtgggcaaggcaagtgcaaagcatagtcagcttctggatgtgtgttgaaggcagagccggcagggcgtgctgccaagtggggtgtgaggagagaagcagtgagggcgggtcaagcttgggggtgtgggcagtcatgcttaccagtgtggggacagtgtgtgaggactgcctgggggcatcaggactaatattcggacaagtcggacctctagtagatgccatgtggatctgtccagctggaagtaggagttaggttttagaggagaagcccagactagagatgtgcatgggcagcctccagggacaggcagcacccacagccgccacctgtgtgggagagcatggcagtgggggtgtggggctggggggggatggaccaaagaagccagagcaccccaaagccccacagcagggagagggggagatggagactggccagcggggtgggagaaaagcaggcaggggtgtccagaaaaccatgtctgcgtctgtctggaggagcagtgaccctggcagagaggctggcagaagcctgattggagtggattgcagagagaataggaagacaggggacaactgttacagacacacagatactccc

SEQ ID NO: 40397 - DNA, 1381 bp, Artificial sequence
  DNA replication origin
cgggcgcgctgagggacccggcgctcgcctcagcccggcggcggcggcggccgaacaatgaagctcctgaagccgacctgggtcaaccacaatggtgagtgcgcgcaggggtcgcgggaggccgagcccggagtcgggtcggggtctggagtcgagtcggggcgcgcgcaagtcctgcctgtctcgcccctgacgcccggtacccggtgcccaagccaagaagccggcgggagcggactttgtcctcagcgcggagaggctggtgagccccagcacgtgctccgggttgaccgcagcgagggccatcttcgcccctggctcttgctctgagtcttccgctgcccacctgtggtccttggaggggccgcggcctggctcccaggagcgggccttggtgccagccagtgccttccactggtctgcatcgcccgagaagtgctcagacggtcctgaaggtgaaaccgggatgaaatcccccttgtggcctttcagtggcaggatgaagatccgaaatctgcaagagggactgttactgcccctctggatctggggacagtgcccccagttggggaattgtggtccctaaataggagggtttgggggccccgggcccccgcgaaggatccacgattaatgctgagctgggacatcagggtgaactagggttgggcagatagggcacaggtgtgttctagcagaggggcttcttagctctgtggcagtggctccaaagcacacccttggggaacggactcatccaccccatatcttgactctgatacagagaggctagtggtaatcagtttcgtcatagttctgccttgttggcagaactgctgcaggagttggtgtttgctccccgggtagatgaaaaaagcgcgcctccccctcccccaccccactctgctgacagcactgtagcacagaaatcaacccagggagactcctccagcccagggcctgattctggcctgtctgactgttgacaggcaaagggtcaccctgatgctgtcttgttcctcatttctactttgcagtgcgactacagggtgctaccgttttctttaggagcgagaatagatattttaacatgtggctttttcgttttgaatttggtcccaggatgctctctactaccacaactaaactgaactgatcatgtgtgtgttctcctcctgccacctctctctccttccatcttgtgtgacatctttcccatttttcagggactaggttcacgtgtttcttttgaaactgttcatcctgagttaccccggtagatgtgctgtatcactgtctgtgtgttttgcctggcatggaaggtgtgagggtactttccatatgcccccagggtagggactgcctcagtcccttctgtatg

SEQ ID NO: 40398 - DNA, 1400 bp, Artificial sequence
  DNA replication origin
gtcgatcacgaggtgccgttttcttcatttttcattggctggcggactgaggggcgggcttggcgcgccggtcgcccagacatggcggacggcagcggctggcaggtgagtgtgctgggtcggagccgggaaccaccggggtcttccggagggagggaacgggactggctcggggcgtagggcgcggccgccgggccccgctcaggcgccgcctctcgccgcagccgccgcgcccctgcgaggcctaccgcgccgagtggaagctctgccgcagcgccaggcacttcctacaccactactacgtccacggcgagcggccggcctgcgaacagtggcagcgcgacctggccagctgccgcgactgggaggagcgccggaacgccgaggcccaggtgcgccgggagggagcggggcggcgcttcggagcgccttgcggggcccagctttccccacccctccacgccccatgccccgcgacctagccggggactgacggggtccctatcctcctcacgcttcctttcttttgagagattgtgtaaattagcatatcaacaggactttcagagggcgtgaaagacaaaggaggagaccagcgaggagggggtgtagagtggtttagagagggaagagggcagccgtccggtgttagggtcatcagctggcctacgcaggaggtgatgttgctgagtcctgagtgaccaggagccagccttcatccagccccggtagacaccgctgagaaacagataaggcctgggttcctgaagcagagggtaggtggatggttggagagcggtataccagggacctggcgggccttttgatacggagtttagagtttagtctaaagtgtgctgggaggcataattcgatttatatctttaaaagatcagtctgttagcaaagtgtggtggcgtgcacctgtggtcccagctacttgggagggtgaggcgggaggatcgcctaagcccaggagttcaaagctgcagtgagctatggtcacaccactgcacaccagcctggataacagagggagacctgtctcaggggggaaaaaaaagagagagggtaaaagaagttcaatctgtttgctagggtgtagagaatatattacaggagcagagagaccggtaaggaggtggttctagttgttttttcgtccagcaaatatgtaccacattgggtgctcttggggatgcacgagtgataagaagagtctctgccctcctggcacccacactgtagtgtagaatacagtgctacggtggaccccttgtgggagaggagatggagagaagccagccgaaaggtgcgaggctcatggggagtgccaaggaatgagaatcaatgggactgatcaacacttcaacattattaagtgtatacagtgatctgaa

SEQ ID NO: 40399 - DNA, 1284 bp, Artificial sequence
  DNA replication origin
atgacatgtgttctatcaaccaggtaatgtcaaagataaactagggacagagcatgggccttgacgtcctctaggctgtgttcaaagatgagcctcctcatttgccagttgtgtgacgtgaggtagatgatctgacctgatcctcagtttcctcatccgtgaaatgggtgaacacatacccactttacaggatccattcatttaccagacatgtattgaacatccaccacctgcccggccctgttgtggagtgactgcccatcctggtgcacatcctgggacacccctcagtcctagacacaccaggaatactggtcacctgggctgtagggtgtgggtgcagcaggcacagcagagaaggaaaccctaaacctttatcctgaaggagcgtgccggcgggggggacgaggagtggcagctgcggttaagatgaggggatgtgctgccaggggatggagcaggatgaggcggggtgggctggggcctcctggagaaggtggcagctgctgcaggacctgaaggaggtgagggagaggatagcagggcaggctccttgcaacaaacagccaaggggcagtggggctaggctggtagacaaggaggctcggggacacagcatcacagccacagtaccatgctgtgggtacgggagggcaggtgtttggagagctccctggactgggagttagacactggccttgggcatctaacttggggtggctgggtggggaccaaggcgtctcctggtgacagcgtccctggaggctttggggagtggagtgactgggcgctgttgggctctgggctctgagtgttgagctggggcccaccataccctgacggagggtgctctccgactccatagacaaagaaccggcgctgcaaactgctgcccctggtgatggctgcccccctgagcatggagcatggcacagtgaccgtggtgggcatccccccagagaccgacagctcggacaggaagaagtgagcagcttccactcgtcctgggactggagggtcgggggtgttggggttatcagcttattagccctgctgagtagagtggtatttgcctctagtgtctgtcctggggcggggggtgggaagggtccattgcaggccgcctggcccccgacatgtcttgtgtgtcagcagcttttttgggagggcgtttgagaaggcagcggaaagcaccagctcccggatgctgcacaaccattttgacctctcaggtgagagtctcctgccactctgccacactttcccacctgaccctttgaggct

SEQ ID NO: 40400 - DNA, 1654 bp, Artificial sequence
  DNA replication origin
gtcaggcctgctgaggacctctgcaccgtggggcccctctccctgtaactcatcccaccggctggttccacagcagctcccaggaagctgccacacattccagcagctgccctaagccactctgagcctgcattcttggggttctcccactgctccatgatggtagcctggccagacctaggagactccctgccactggatgtggcccagacatttctgggcagggcccccaagtccagtttggggcagataccaagtctcccttccggctgggcttagagctcttccctgcagcatgcccccttcatcagctgctctcttctgcttctagctttatgtcaaatgtcaaaaatgtgttaattcaaagtgcctagaacaaggctaaaaacagtgagctctcagtggctatgttagatggctctagacacccccattccgaggtgcctggcaggggccagcactgactcccaggccacacagcccctggaggaggaaggttacccagagtgcccccagcaggggctggcacaggtgctggttgtgagcaccattctgggcaggctgccaggccagcagggtgggtacaggctctgtagggagctgcgctgggactggcagaggagccaggacgaggggctagagccaagctgtggtactccaggcaaccagctgccagcacctcctcccatggcaaccctactgttgaccggcgtgtcctgcattcacccctgttcctgccccacccaccattggaaagggcctggtcggggattctacagacctctgtggccacttgatggggcttgggactaggcaagccctgagagggcagtggaaaacctcaccctgtgctgtgtggggcttggccctttctgggagaagccagcggcctggctgctcacccccagcacttcccacaccgcaggacccccactcaccagcctgtgttgagggcgcttcaccccgcatcttctgctggggtctgccgctgcccccgcccctgtcccatcccgggccccagggccccatgacgcagcagctcttctgaccgcagatcccgcctttctgggctgtagtaagtggtggctgtgtctcccacctggtgggaaggtggcagggaggatggggaaaagagccccagcctccagccctgggaggaggtctccacaggagtccttgggagggcggggctggtgggtgatgaatggggctgctggacacggaagatggctggacagagaacaggacacaggtgggagagagttcaaaccatttactaagcagattcttagccttcccactcccgccctctctcaagctccggtgcccacaagccttgcctggggagatgctggagtgagaccgggaggtccaggccaagtcactggtccctgggctcgggccctgccgatggagtaaagaccagctgtacacatcttccggtgggggccctgggctctgcatccgcccctccgaagtcagcaggagcctctgggaagtaaggcagcagccaagacccccagcgtcttggaggggaagcgaaatcctcagtctgacacccgctctgcctatggaaacagcgccgcgcacagaaaaggaaacttcattccgtctgttaagggcagggccgggctagtggcaggagaaggtcagc

SEQ ID NO: 40401 - DNA, 1135 bp, Artificial sequence
  DNA replication origin
ccaggagggagaaagtcatcaaacctcccacatctgtgaccagcctcagtgccatactttttctatggagggccctgtccaatggaactgagcacagaccagataaaagaactgggcacccagtggcctcagtccagggcctggagttcaaactttactggaaacaaaggggccgagagagactggggaaagaactactagaaaggggctggtgcccccatggggctgtgggttttggagccgcgtgcccccacctgagcctcagggggcccggagtgtccacaccagtggacctttcgagaaatggctgggccattgtgcagaagaatgcccggaaatcccgcgcctccctcctccagcaaggatgggggctcttcctcctggccaggaaactccaagttggcttccggagggtggcctgggggctggggtgccagggacaccatcgccactggtgggagggcagggcacagcccctccgtgtccctttgtctctcctgtctgaaggccagagcaggctgctaggcctggggccaccactgcccctgggtgctacacccagtgtgctgggtcactgggaacttcctgaagtggtgtcacctgaactgggcccccaaggatggggtgcgggcagtaccgcaggaagaggagcagcccctgtgaagattgagaggtctgggaagcccctgcggcttgggagagtgggggtcgccaggcagggggaaagcccctgtgccaccgctttttgccagagactcaggctccagagaggcagtgagtggcatggggggtgaggctggggccctgggcctgacctccacacgcctgcctggcctctctgtttgccatgggatgagagagacagtgctgggactcagagcggggctggagagtgagagtgcgagaaagggcctgggtggggcttggaccccggggcgggctttctggagagcccccctacgagggcctctacggcggtgacggggtggggggcttctgcaaaccttggtcagggaagtggagctggctcgagtggaagagaccacccggctcagtcggggatgtgggagtggactgggtggtgcagactgggggtcgagcgccttctgaagtgacggggccgggacgcgcaggg

SEQ ID NO: 40402 - DNA, 1121 bp, Artificial sequence
  DNA replication origin
gtccagctcaagcttctaaaagcaatgctgggggacggtgcagcaaggtgttcctggaaatgacctcggcaacacatcttagaagatgagcaggacccaacctgacagatacacgctgcgggcagaagaggccaaggtaagagacggcccatgtgaggcccataggcaggtaagtctcctggggcagagtgtgtgctcagggccgcaccaagactggtggctggactggccagtcctagcgcatgcaggtacacatcaatccagctgctctgggagtcggctcttcgtccatgggcaatgtgagccatggagggtcttaggtagggtgaggcccaggagaggggcctggtggggtgggtggcctagctgggcaagggcaggtccctgatgacctgaggaggccgcagcagtcatcccaggaagatggtggcatggaagggctgggagtagggggatctggggaagttccctgggcttgggttagggggtagtaagagtgagagggtgggtgggtcagctgtacccctggagtacacagaggaggagatgtccaggagggtctgtagaggaaggggcatggcccatgggtctgcagcaggaggaaggcagtgactaaagtgatagctgggagaaggcagtggtcctcagagccatacctggtggggagaggccacgtggggctgagcaaagagggtatgatttccttccagcctcagggctgggcacacttgccttcagaacctccccacactaggtgagccagacgctggccttatctcatttaccatctcagagccatctgaagggggagaagggaaccgggccccaggagggagaaagtcatcaaacctcccacatctgtgaccagcctcagtgccatactttttctatggagggccctgtccaatggaactgagcacagaccagataaaagaactgggcacccagtggcctcagtccagggcctggagttcaaactttactggaaacaaaggggccgagagagactggggaaagaactactagaaaggggctggtgcccccatggggctgtgggttttggagccgcgtgcccccacctgagcctcagggggcccggagtgtccacaccagtggacctt

SEQ ID NO: 40403 - DNA, 868 bp, Artificial sequence
  DNA replication origin
gcgtggaatttacataagatgtgtgtttcagtaaagtgacttacaggaaccagacaggaattgtaattatacaaaggggatttcggaggaaggaagttagtctcagtccagggaataatgagggcctgagctcaggagtgcagtggggagggagaaagaaggattccagagagattttgggcagagtaattgacaggctcccgattagagcagaaactaagatgatgcctaggtttggaaaactgggtgaattgaatcattaagacactgaagtgtccaccaagtgcagaccttgtgccaggcactcagcatccaaagatcaaaaaagacctagtctctgccctcaggtgcttctacttgaatagggcaggtggacacataactaggtaattgtatctataccctgtgatgttgaggattacagctgtccctgcctgacctggacctaggggtgagggcaggggggcttcctagagaagtgggacctgagcttggcagaaatgggagttcacaggcagtgtgagatgggtcccctaggtacagtaggaacgcaagcaggaaggccagggagtttgtgatgtgtttggagaactagaagcagatgctggagtgtaaaaccggagcttgacttttattctctagagggtggggagccattgcagagccttaggcagagaagggcctggtcagatttgggtttagggcagcttgccctggtgcctcgtggagaacggttgtaaaggcgagaagctaggagcgagaggtggctgtaggaagtgctggtgaaagagagtggaagctggagctgacacagggagttcaggaaggagagtgggctgggggatggtggggtggggaagtgcaggat

SEQ ID NO: 40404 - DNA, 1373 bp, Artificial sequence
  DNA replication origin
gttagggtaaggtgggataaggttgaggtaaggcggagtaaggttggggtaaggtgggctaagatgaagtaaggtttggcaaagttggggtaaggttggagtaagatgagtaagggggtaaggttggagtaagcttggggtaaagtgggggtaagcttggggtaaggttggagtaaggttggggtaaagttggagtaaggatggggtaaggtggggtaaggctgggataagatagagcaaggttggggtaaagtggggtaatgtggggtaaggctgggataagatagagaaaggttggggtaaagttggagtaaggatggggtaaggtggggtaaggctgggataagatagagcaaggttggggtaaagtggggtaagcttggggtaaggttggagtaaggttggggtaaagttggagtaaggatggggtaaggtggggtaaggctgggataagatagagcaaggttggggtaaagtggggtaatgtggggtaaggctgggataagatagagaaaggttggggtaaagttggagtaaggatggggtaaggtggggtaaggctgggataagatagagcaaggttggggtaaagtggggtaaggtgggataatgctgggataagatagaacaaggttggggtaaagtggggtaaggttggggtagggtggcctacagttggagtaaggtgaggtaaagttagggtaaggctggggtaaggtggagggtaacttttcagatgtgatactgtttttgcacgccttatctttcccttcttgctgctcagttaggagcagcttttctcctcaatttaactgaagtgagcatttgctggagaagttgagggaacacgcacattgtgcagccctgtttgtctgagctgaggcttgtgtttgtcctaggaagggccatttgggagctgtttgagatggcatctcacagcgagcagaggagggcacagtcagggtggtgattggggtgaaaactctgctcatgaagaatgatttggtatgtgcacagatgatagcttttctaaatcctattttgtttttctgaaaaataagtgacagtaacctgaacacctttgagtttctccaatgctggcttagtctgaggctggggcctgcctgccatccctttccctctctcactgagtggctgctgcttgcccgtctctgacctttgagagtctcaggtctgatggtggtggagatggagcacaggtgactgattcgggggactcggagacacaccccttggaggagggacagggagggttggaggtagctggtttcatgtgggcagaacacaggacatagacatcctctgtcaacgttggtcttctctgtagtattttgtgcagggtcctggtcagt

SEQ ID NO: 40405 - DNA, 1095 bp, Artificial sequence
  DNA replication origin
tgagaccaaggcaccagcattcagtgtctggtgagggccttcttgctgtgtccccatggggcagaaggcagaagggcagaagggcagaaggcagaagggcaaaacctgcctcgctggttccttcaagccgttttacaaggtcactgatcctgtttatcagggctccccctgcagaacttaatcacctcctaaaggccttgtatcttaatgctgtcacattggcagttaagtttcaacacatgaattttgggggcatccaggccatgacagttttcaaacatttttctgcatatgtaggacccatcaaacgctgtactcctgctctggtgcacacactgagctgggcatctgggttcaacaatgcttcactttcctggcacgcagagctgaggggcagggacagagatgaaatctctgaggcacagtgatggtatcatggaaaccttgaactgaggggagggtcggagttggtttcactgaggaatcgaggactgagctgagaaccgaaggatgactgggaacctcctgggtgctgtgggactgggactgggggcgagggagagggagtctcagatggtgggaatcccctgtgtagtggccctggggcctgatggtggccagaggatggagcccagagggaggggaggatggtgaggcaggggtggaaggtaaggggtgttccaggcccggttaggggattggccttggtattcgtgccatggacagccattgaggcgtctaagcagggagtagccacagatcaggctcctgttttccagccaccgtttatttgtggcttggaggatggatggcacaggcaggcactggcatccaggtgagagatgacagctccccagactgaggctgttgggggtgtgtggtggcaggagtgggagcagaggtgtgtttgagagagatggaggatgtagtggcggtctaggcatgggtcatggggaggaggggtgagcataaacggtgatggagccattgcagagatagaacgccagaacaggacctgatgtggaagggaagaccaagccttgtgtctgacttgggtggatctggagggagattttgcaaagcaacttggtcatg

SEQ ID NO: 40406 - DNA, 766 bp, Artificial sequence
  DNA replication origin
aacccgttctttagagcagggtccccaacccctgggctgcggagtggtacaggtctgtggcctgttaggaacgggcctcagagcaggaggtgtgcggtgggcgagtttaccgccgagctccgccccctgtcggatcagctgggcattccatgctcatgggaggcaaactctatcgtgaactgcgcatgtgagggatccaggtggtgcgctccttccgggaatctaatgtctgatgatcagaggtggaacaatttcaccccgaaactatcccccacccaaccccatcggtggaaaaattgtcttccacgaaaccggtccctggtgccaagaaggttggggactgctactttagagcatgtcctcggagtggaggtacctgctctccacgcagtacagcatctggctgtgtggtggctgcagtccagtgggtctgagaggggtggagggggaaggtggagaaggagaggagggaggaggggagggagggaaaggtgagaggggaagacgaagggaaggagaagaggtgggggagggggcaggggggcagcattggccaggtaagggcgtgtccactgtgaggcaccgtgggattcctgggcgaggactgtgagacactggtgagcgtgtgtgcagggctctttcgggcttcctctgtttttaatgacatcagagtgcgtgccatgcatggggctgtcctggtgttggcactgaccgcttggagcccagctgctgccccctttctcaggccacagatgcgcccaagagc

SEQ ID NO: 40407 - DNA, 922 bp, Artificial sequence
  DNA replication origin
gtggcattctatggtttataagggaatgagatcactgagattcacagatagtatcagggttctggaagagcatgtgggatagaaggaagtgttgtggccatctttgaaaaatacaatctgcagaatctcatccttttaaacaattttagtgaatcttttatctctctgtcacagactggataatgtatatttgtctgtctctggacagcagagtgggcagtgggaggactccccaaaggcacagcagaggcctggggccagggcactgacagtggagaggggatgggggccatccctgtgtacagtcacacctggtcacagctgtgtggcaccagatgtggtgcgggaggtgggggaggcatcggcgtgaccagctggatgatgggcagggccatcggttgtctctgtgacagcctctgagacacgggcgcaggggtctggtgggggctgtgtaggtgaggctagagcccactggggaagtgttcctggggggctgggggctgcggggggtgtgggggaggagattcccgaacagagcagggaagccaggccggtggtgtgtgctgctggggagctgctgaggctccttcccgccctgctgccctgtatcctgactgggaaacagagccccgcacaaacaaggctgtttgggttggctggggttcgctgggaggattgcagtgctgaatggagccatctcaggctccaggagaggcgctgagtgagagagcacattccgtggtgactgtaggcctggcgctgtcccgcccagtttggggagcaggctctgtgttgtgcttggccagctcactccaaaggagcagtgcctcgtgggggcagcagcgagtctccaacggccggggcgtgtttcctgtgcagacgacccctcctcgctgaaactcatgatccaaggagataccta

SEQ ID NO: 40408 - DNA, 1278 bp, Artificial sequence
  DNA replication origin
gccgccgccgccgcccgctccgcccgcgcgcccggcagccaatcggcgcccgccgcgcccacgcgcgacccagggcggcccgggggggcggggacccaggtcccccaccatggacccgagaccacggcctcggggcgacgccctcgcctcctacagccctggccgcgcccggggtcacccgaccagacccgcgccgcccccgccctgcacggctgttcctgccggcctcctccccgccacctccccggtgccgcagcccaggcccagccttacgctccccccgccctcgctgggacccgggtccatgccggtcctcggaccatccgtccggtggcccttctctaaagcctgccctggctttccgggccagaccctgcacgctccgccccaccccgccgaggtcagcagggatggtcctggcgcggctggccagtgcccagcattgcccctgctgaccgctcggtgctgcgcagacctgctctgcgagcagacgcacctggcaggctgtaggccacaggcttttgggcagtggtccggcctctctcttcctgggctgtaaaatgggattatttgtgaagaggagtgatctgaggtgtctggcaggaccggccctgaccgtctcaccccagctctgcgcctgcttctctgctgacccataggctgtggggatgctccaggcagacccgatcccaccctgcggagaaggcttgtaggggaccgaggggcactgtgaaggcagggccagggcctgcaccccatttacagagggggaagttcaggccctaatcttcagtgagtcagccagactcagtgactgagagcaagtctctccggtcatttgtgtcactatcacattcccaggtgtcctccgcctggactttcccaaagtgtccccaggcggcatctctgaaggctttggggctgtcaggcttgcggtcaccacctccccaggtgagggcccccttgtatggagatgtctcctgcaccccgtatagacagtacctccacagccagggaatccgcctctgctccccacccgtcctgtgccccttggtccctctgctggcccgtgggctccctgggtggaggggggtgtcgctagggcctttccatctctgaatcaccagcacccagcacggtaagtgaaaaattcatgtaagccgcgtctttgttccacagtccttgctctgctgcattctgtggccagagcgccgttgaccataaccctgctctgggtctagaactctaaccagtgtagggatcccccacagtcccaac

SEQ ID NO: 40409 - DNA, 2637 bp, Artificial sequence
  DNA replication origin
ggcggcgcggaggggccgctcaccccgcagcccggcctcggcctccgccgcttgtcgtcgcgccccgcccgcgagcccgccccgcacgtcccccgccggcggccaccatgagcacaggcctgcggtacaagagcaagctggcgaccccaggtgagcccagcgcctgcccgcgtgcccgcgcgcgcctttgtccccgccgcccgcgcgcctctcaccgtgtctctccgtctctcccccgcccgccggcccggacccgctcggaaccggacccggactcgaccccgaccccgaccccgcagaggacaagcaggtacgtgcgcagcgccgctcccccgccgggagacccggccggctgtcacccattgtgacactagcgccttgggcgcccaggcgcgaccccgcccccgccggccctcacccagccctgtcgcgatcaccgattgtcagccgggcagtgccgccgcgcctggggcttcagaggagaggagtgggggccctggtccccggacccgcacagcagggaccctgcgcccctccccaggatggggggatgggcagagtgtccccctcccacagggccagtgccagcatctcctgctgacctggcctgtaggccatgagctgggggtcctgggtgaggccatggtcgtggcaggccacgctgggggaggggagtcaggctccatcagccagcacagtccctgaacagccctacagcagagggcctgtggtcaccacccacctcccctgcaccttcatgcccctttccctccccatacacaaatttgagtgttcaggtctgcaacagggactcttccccagattgggaacccccagggtctggtctgagtcattctgggtgcccagatgggtcctgggaccctgtgggtacaaataggcttgtggcttctcaaaagggttggccccaccctccaggaaagcaagactggacaggaggctggtctaggcacctgggtgaaacccagccgagctcagggttaaacaatgctgtgaggcccctggggtggggcgggggctgacaaccaggtgggctgggggggctggggaaagcctgctggtgtcctctctggcttgagctcagccatctttggaggaaaaaagaagagcccaattctggcaccagggtggcactggcagcccccatcagggatggagtttctcaggagccatggatgctgagtggaactccagagtcctggcccagggtgcagcaggcagggcaggagggcgggcaggggggccaggagctgggggagtcactggctgaccagtgccattctcctggaagggacacaccccacccagaggtggatgaggctctctgggaggggccccttggggagccaggctgggagctgcctccccatcacagcaggtcagacaaagcctgagatgcagggacacatgcgtcaggctactgtttgagggaaatggaaggaactgaggctgggaaagccaggaggccaggcccctgaggcttctcctgtgcctgcaggtgtccccagcttgacccaagggcactctgagaccctgggctccagccactgctgttgggtgcagccaggttctcttgcccattactgcagggtggggaccccctcctgctgaggtgcccatcgtttgaggtcaaccgggagtccacctcaccccatcccaggcctcccaggcctccaagcccagaggaagaaggcactgtgtggccaaggaagggagccccggagcaggagccaggccaggtgtctgggtgaccagtgggtctgggggagctggaagcacatggcagcttccctgctaccaccgttgctgagcctcagcctgtccaagcattctttttgctctttgaaagggggctgtagaggcattgggggagttccgtcactacgctctgtgcccccacctcctcacaggcagcaccggtgatctcttggccctggctgctgctcccagagctgactcgggtgattctaagaatggaagtgccagagaggctcaggcattgggaggagatgggcgcagctgtgtcatatggctcaggaagccctgggagtatcttttgtcacttggggaccagagaaagggggtggcaggtacggccccttccttgaggctcccccagggaatccacaggccctgactgggccccagtgggtggcagggcaggtgggttgaacgctgagagtgagattcttgccctcctgacctgggcctccccagaggctgtgccttaccaatggggaaactgaggcaggcagtctgagagccacacactctgttagacacctcctagcctgaggcctaggcccagggctgtctgtcttcctggagatgccctgggcctgagatgccagcctgtctgggtgggtgctgggcttcgaggtgtggaccctcagttggaaactgggtgggactcagcctagaggcttcctgcaggtcagggccatggaaggctggggccagtgaggaggctttctggcagcaaggactgagggatgcactggtagagctggggggcctggagctgccccctttccctgggatgaaaggctctcctgttcccagctgtgggcctgcccctcctccccaggtgccagtggtccaggccccacaacaggacca

SEQ ID NO: 40410 - DNA, 1294 bp, Artificial sequence
  DNA replication origin
gccccgctcccgcacccgagccagaggcggggcgtcgcaggcgcccgcggagcgcgcggcggggggcggcagagacggccccgcccgccgtcgccgggaaacggtcgcctggaaattgggccgcgggcggagccacccgaaagcggctgcggagggcagggctgagccgaggcgcggtcgggccatggctcgcgtggaccgggagccctgccgcgcccccggggcctcagtccgggctccaggacagcaggaggggacgaccgggtcctgcacgcgggccggggcgggccgggagtcggtagccaccgcgcgtcccgcccccaagaggtgctgcgcggcttccgcccgccagagggcgccggaggccgctcccgggacccacgcgcaacagcgcgggtacccgcccagttcagggcccgccgtcttctcgcagacttgcccgaaaacctcccggcggcgtctcgacgccccaagtgcccacagacacgccgcgccctgcacccctccccagccctgcttggggctgacctcccccgtgcgtgcgtgcgtgcgtgcgcgcgtttgtgtgtgcgcgtccgtgcgggtgtgtgtgtgtaatgtgtgtgtgtgtaatgcctgcgtgtgtgcgcgtgtatacatgcgtgtatgcgtgtgtgtgtacgtgtgtgcatgcattgggtatgtgcgtgtgcgcgggtgtgtgcatgtgtgtttggtggactctttcccaagacattcgggggaccggaggagggcagagcccaccttttctgaagtccagcctgcctgtcccctaggaggcttagggtggacagaagggaagggaagggaaaggaagggtgcaggctgccggagtactggaggtccctgcaaaacttggaagcccccgccagcctgctgaataaacgccggccacccatgcgctgccctgcagccctcaggtggccctgccctcagagacaggggtgggggtgggatgggacccatctcccacgtgcttctgtggacattcccttgccctctgagcatcctcaccagctctgacccacaggattggagggactgggagctcctgccagccgggcctccctcccatgtggctactccagggactgcgggggtctcccgagctccgctctgtgggccacccacctccatgaccccagtagaatcccaacaggcaagcccagcggagcaggacatggggcctggaaaggttccagggtaggactggtcaggccaagcccctgcacattagaacattagaagctggaggccccaaccccaccccacc

SEQ ID NO: 40411 - DNA, 1804 bp, Artificial sequence
  DNA replication origin
tgaccgggcctggggtccgagcgtgcccccgggcctgggggggtcgccgcgatggactcgctggcagcgccccaggaccgcctggtggagcagctgctgtcgccgcggacccaggcccagaggcggctcaaggtgcgtgtgtggagagggcggaacgtgggtctgtgaccccgcgggctccgggactcggcatggggtccccgtccccgcgcgccacggcccgccagcgcctaggctcagcccttccctccgcagcggcctcgcaggtccgcggccccacggtggggcgacgtgccctgtccaggcctcacctcacgcgactccaaaacgcggcggagaatgcggccgtgggacccctccaggggccccaagggtctgcgggggctgggcgcctgggcgcgcgggcgggggaggctcggcgccgcggtctataaataggcgctgctccgccaccgccgctgccgccgcccccgcggctggatccgggccaggtggggcctcccgccccctggcactctccggaggggtgagtgtcgaggcccccagcttctccggcttatggagggccttgagtgtgtcccaggggtcccaatcctgctgccctctgcccgaggagggaggacatcgcctgtgcctgctgcggcctgacatctccccacggaataaatacagtgtcggtccctgcagagccctccctgggattggggccaggggtgccttctcctgccaccacctcgcctgccttcttatctccaggcttttgcccacgggccctccccttatttttgccaacgaaatgccccaccctgggaaccgtaccctctgctgtctcctcataccgcatttggtaagagacagggtattgggcttctggagaaacctttgtgtccctaccctgttccatcctgtccccaggacattgacaagcagtacgtgggcttcgccacactgcccaaccaggtgcaccgcaagtcggtgaagaaaggctttgacttcacactcatggtggctggtgagtgggccaggctcctcgggggagtggctggggtcactggccagccaagctctgtcgttggagccccagacctaacgcagctccttctctgtacctgtgtgcaggtgagtcaggcctggggaagtccacactggtccacagcctcttcctgacagacttgtacaaggaccggaagctgctcagtgctgagggtgagtggcccccaggaggccctggcactgatccccagtccccttccatgggacctctccaaggactccctttcaggtccagctcccactgttctgttctcgcggtgtgggtcccctgggggtagggccaaggcaccaagatggatgaggacgagggtcctggctgccaagggtgaggggctgagggttggagaggcccttccagtggccccttccccgtagagcgcatcagccagacggtagagattctaaaacacacggtggacattgaggagaagggagtcaagctgaagctcaccatcgtggacacgccgggattcggggacgctgtcaacaacaccgagtggtgagtgaggcctgctgagaaaggccttgcctaggcggccacagcactcgaggcctggcctcacctccctcctgcccacagctggaagcccatcaccgactatgtggaccagcagtttgagcagtacttccgtgatgagagcggcctcaaccgaaagaacatccaagacaaccgagtgcactgctgcctatacttcatctcccccttcgggcatgggtgtgtggctgtcctggggccaggctcgggagtgca

SEQ ID NO: 40412 - DNA, 927 bp, Artificial sequence
  DNA replication origin
cgctgtcaacaacaccgagtggtgagtgaggcctgctgagaaaggccttgcctaggcggccacagcactcgaggcctggcctcacctccctcctgcccacagctggaagcccatcaccgactatgtggaccagcagtttgagcagtacttccgtgatgagagcggcctcaaccgaaagaacatccaagacaaccgagtgcactgctgcctatacttcatctcccccttcgggcatgggtgtgtggctgtcctggggccaggctcgggagtgcagcccctacaatatggccccctggctgtgcctatgcccacccttggctgctctcggcaggctgcggccagtggatgtgggtttcatgaaggcattgcatgagaaggtcaacatcgtgcctctcatcgccaaagctgactgtcttgtccccagtgagatccggaagctgaaggagcgggtgagcctgccgtcgcacaggggcctggccagggccctggggctgagagtaccagggggacttgtctggcctcaaatctgatggtccttgccccaccacagatccgggaggagattgacaagtttgggatccatgtataccagttccctgagtgtgactcggacgaggatgaggacttcaagcagcaggaccgggaactgaaggtgaacatgcagactggtggggcaggggggatggagctggtgaggggcagaaccagagggctttgtctccttcacattgagcctgctggaggagggccaggtcagcccagttgggtgcaagagtcatttgttctaggagtagaggacctgtacccccttcatccagggctagaaggtaaaggtcaccatgtctttgcctggctggggtgggtcatgtgggccccgtgtggtgcttggcaggtatggagcacttgcccagatccagaggtgcagca

SEQ ID NO: 40413 - DNA, 1116 bp, Artificial sequence
  DNA replication origin
agttccctgagtgtgactcggacgaggatgaggacttcaagcagcaggaccgggaactgaaggtgaacatgcagactggtggggcaggggggatggagctggtgaggggcagaaccagagggctttgtctccttcacattgagcctgctggaggagggccaggtcagcccagttgggtgcaagagtcatttgttctaggagtagaggacctgtacccccttcatccagggctagaaggtaaaggtcaccatgtctttgcctggctggggtgggtcatgtgggccccgtgtggtgcttggcaggtatggagcacttgcccagatccagaggtgcagcagtgggccaggcccccaaccccaaccctcttcccatgggtcaccagaggaaggggctgccccagtggcacaccctggctcccagatttctgagctccagggttggtggctttgggtgccccggcagctagagtgatgatggagaccatgccaggggcaggtggccaccagggcaggggcatcagcatggggagacataggctcagccctggggagggaaggggcagctggagggggtggttcttgatgagggaggagatgaggagggagcatgcctggttgggcatagcctggaaaggccctggaatgtgagccacatgggctctggctccagccaggggcagagaggccagaaaggggcaacgccaggatctctttgaggagagatagttgatggtgatgctggaggggtgccccgggagttacatgcccgtttcccatcagtaaccgtgcaattacgctcaccgggtgtgagcctttctccctccttcccccaggagagcgcgcccttcgccgttataggcagcaacacggtggtggaggccaaggggcagcgggtccggggccgactgtacccctgggggatcgtggagggtgagtagagtcttggggtaccaggtctggtgggggaaggctgtcctgggccggcgccagcccactacccacccccaccccgcagtggagaaccaggcgcattgcgacttcgtgaagctgcgcaacatgctcatccgcacgcatatgcacgacctcaaggacgtgacgtgcgacgtgcactacgaga

SEQ ID NO: 40414 - DNA, 1527 bp, Artificial sequence
  DNA replication origin
gctcagcgccccgcgcggccctgcaagggaagcgccgcagtaagccgagcggtcggcgggcacctgggcgacatctctgagtacccagactgccggcccggctccatccagcccctgatgcccggcgtcccggtagcccgccagcctctccaccctgaccaccccgcacgccggctggaagtcccctctaagtctgacccaagtctctcccagctgcagccaaacgaccagagctcctctcaacccgggtcggcctagggagcagccgggggcccgaccggactccagactcaccggagcccatggcgagaagacggcagcccggcttactctgcagcgggaggcgtaggcgggagagccgagcgataaggccgccccgcccctgccacgcccgcaccgaccacagtgctgcggcctggccagaaatagcccagaggccgcgcggacgcgcgctgcagcggcagatagcacactatcgccggaggccgcaggccgctcaggcttccgctcccacccgctctcaggggcacacggagcactcggacacccgctgcgacgttcaccaacattgttctcctgtcaccaggacaggacgcggcattcacaacggaagaaaacggagcatcgtgtggcgggaagggatcatgcgggtgggaacatcgggaggcctaggctcaggatcccggcacaccacagcggtgctggggagaagaggcctcgagcgagggcaggggacggcaccgagagttgccaggaggtggctcaccgcccagtgccccgggggccctccaggtcgggccgggctgtggagaaggggtgtaagcggtcacgaccccgctccttgcagcctctggcctccttatgtctggagggctcccatttgattcagcccaaccctgcccgctaggcgtctggggataagggaagactcggcccgcctcgacagaaaatggggtctcagcactcgctgggtgacccgcgggagcaggcaaaggagggctcccaagtccgttctgcagcactggggcagggaacagacccaggatcctgggaatcctcttctgcctagctttgcctgcctgccagagcagggcctgcggtttgggtgctgtgaccgtccgggggcgggggaagggcaagggaggcggatctctgaagtcccgcccaacttcgctcctgatcccccaaggtcagagagggccagctgggcgggggctacggtccaggcccctcggaaacagacacaatgacctgggagggggtggtgctgagaataaattagggtcagctgggggctgtggccccgcgtctccgggtcgggaacagtccggtctggtgtccaggggtgcgagggcgtcccggagacggacggtgtgtccgcggcgagcgtcactggtcctgcatctgctgcttcatcctctgcagcatctcctgcatgcgcctcagctgcgggcggagacaacccggcgggtgagcagcaccgcggaggagcatccctgacgcccgcctccgccgcccccgccgccc

SEQ ID NO: 40415 - DNA, 4786 bp, Artificial sequence
  DNA replication origin
gggcctcgctgccgaccgccttccctgtcgacacaaccgagctggtgctgaccggcaacaacctgacggcgctgccgccggggctgctggacgcgctgcccgcgctgcgcaccgcacacctgggcgccaacccctggcgctgcgactgccgccttgtgccgctgcgcgcctggctggccggccgccccgagcgtgcgccctaccgcgacctgcgttgcgtggcgcccccagcgctgcgcggccgcctgctgccctatctggccgaggacgagctgcgcgccgcttgcgctcccggcccgctctgctggggggcgctggcggcgcagcttgcgctgctgggccttgggctgctgcacgcgttgctgctggtgctgctgctgtgccgcctgcggaggctgcgggcccgggcccgcgctcgcgccgcagcccggctgtcgctgaccgacccgctggtggccgagcgagccggaaccgacgagtcctgaggagagaaccggtgcgtcctgaggagagaaccggcgctgggcaacacgggcctgcaaactcgacaggaccctgcccgaggggccctcgcgccaacctggaccggtccccgcctcctccgctgcccaatctctcagacccaccccacctgcaggcccagaccacgtgggacagaactcctgcccaccctaccccgagggaggcgaacccgcacttccaggcttgggaggaccatggggcacaatgcggtccagaccctgctgcgtctcccttccaaactctggtgctgaataaacccttctgatctggtcttctctgcacgactgacctggaaattcccctcgccaaactcaggaaaaggccccaggaggcggttcaaggggacacaaacacatcctcacatgcccaccctaacctcaggggcagacaggagtcagtgggtgacctctccccttccagacacactcccaaaaggccacatgggaaggcatgagagagatgctaagtgataacgtgggggccagtgaggacgttgtggggacactgaggaccctgtgggggcagtgaggatgctgtggggatgctgtggggacagtaaggacactgggggcagtgaggacgctgtggacactgcggacgctgtggggacaatgacgctgtggacagtgaggacgctgtgggggcggtgaggacactgtggagtgaggacactgggggcagtgaggacgctgtggacagtgagggcgctgtgggggcggtgaggacgctgtaggggcggtgaggacgctgtgggggcggtgaaggcgctgtggggatggtgaggacgctatccggggcggtgaggacgctgtggacggtgagaacgctgtggggacactgaggatgctgtgaggacgctgtgggggcagtgaggacgctgtggaccgtgaggacgctgtggggatggcgaagactctgtgggggcggtgaggactctgtggacggtgaggacgctgttggggcagtgaggacgctgtggaccgtgaggactctgtgggggcggtgaggactctgtggacgcggtgaggacgctgtgggggcggtgaggacgctgtggacagtgaggaggctgtggagacaatggggacgctgtagacaggacgctgtggaggcggtgagggcgctgtgggggcggtgaggacgctgtggacactgacgacgctggaggtaacaatgaggacattggggacaatgagtacactgtgggggcggtgagaacgctgtggacactgaggacgctgtgggggcggtgagggcgctgtggacgcggtgaggacgctgtgggggcggtgaggacgctgtggggaccgtgaggacgctgtcggggcggtgaggacgctgtggacgcggtgaggacgctgtggggacggtgaggacgctgtggggaccgtgaggacgctgtcggggccgtgaggacgctgtggacgcggcgagggagctgtcagggcggtgaggacgctgtggacgcggtgaggacgctgtggacgcggcgagggagctgtcggggcggtgaggacgctgtggacgcggtgagggcgctgtggggacggtgaggacgctgtggacgctgtcggggcagtgaggacgctgcggacgttgaggacgctgtgggggcgatgaggacgctgtcggggcggtgaggacgctgtcggggcggtgaggacgctgtggacgcggtgaggacgctgtggggacggtgaggacgctgtggggaccgtgaggacgctgtcggggccgtgaggacgctgtcggggcggtgaggacgctgtcgggacggtgagggcgctgtggacgcggtgagggcgctgtgggggcggtgaggacgctgtggacgcgatgaggacgctgtggacgctgtgaggacgctgtgggggcggtgaggacgctgtggacgcggtgaggacgctgtggacgccgtgaggacgctgtggggacggtgaggacgctgtggacgcggtgaggacgctgtggacgcggcgagggagctgtcagggcggtgaggacgctgtggacgcggtgaggacgctgtggacgcggcgagggagctgtcggggcggtgaggacgctgtggacgcggtgaggacactgtggggacggtgaggacgctgtggacgcggtgaggacgctgtggacgccgtgaggacgctgtgggggcggtgaggacgctgtcggggcggtgaggacgctgtgggggcggtgagggcgctgtggacgcggcgagggcgctgtcggggcggtgaggacgctgtggacgccgtgaggacgctgtgggggcggtgaggacgctgtcggggcggtgaggacgctgtcggggcggtgagggcgctgtgggggcggtgaggacgctgtcggggcggtgagggcgctgcggacgttgaggacgctgtggacgcagtgaggacactgtggggacagtgaggacgctgtggacgccgtgaggacgctgtcggggtggtgaggacgctgtgggggcggtgaggacgctgtcggggctgtgagggcgctgtggacgcggtgagggcgctgtggacgcggtgaggacgctgtgggggcggtgaggacgctgcggacattaaggacgctgtggacgcggtgacgacactgtggggacggtgaggacgctgtggacgccgtgaggacgctgtcggggcggtgaggacgctgtcggggaggtgaggacgctgtgggggcggtgaggacgctgtgggggcggtgagggcgctgcggacgttgaggacgctgtggacgcggtgaggacactgtggggacagtgaggacgctgtggacgccgtgaggacactgtcggggtggtgaggacgctgtggacgcggtgaggacgctgtcggggctgtgaggacgctgtgggggcggtgaggacgctgtgggggcggtgaggacgctgtcggggcggtgaggacgctctcggggcggtgagggcgctgtggacccgatgagggcgctgtgggggcggtgaggacgctgtggacgcggtgagggcgctgtaggggcgatgaggaggctgtggacgccgtgaggacgctgtggacgcggtgaggacgctgtgggggcggtgaggacgctgtgggggcggtgaagatgctgtggacgcggtgagggcgctgtgggggcggtgaggacgctgcagatgttgacgctgtggatgctgtgggggtggcgagggctctttggacgcggtgaggacgctgtgggggcggtgaggacgctgcagatgttgacgctgtggatgctgtgggggtggcgagggctccgtggacgcggtgagtacgctgtggacagtgagggtgctgtggggacagtgaggatgctctggggggcagtgagggcgctgcgcggacagtgagggtgctgtgggggcagtgaggacacggtagacagtgaggacgctgtgggggcagtgaggatgctttgggggtggtgagaacactctaggcagtgaggacagtcccagcagtgtgtctcgtcctctgagcatgttcaggggctggttcttgtggacagtgccggccttgaggacaccaagagcatttcaagggttgggtttcctgatgcagggactgcggcgttggcagcattcagttcactaggggagcgttggggcaggtgaccagggctggttcaggtctgttgctccatccgggatccctggaccatccgaatgagaagatggcctctatgtgacagagtcacatgcggtgggggttcttggagggccccacagcgatgagtggacctcaggggttgcagggtctctggaatcattgtgttctggagtgaacttgcccccccacaggctccaccaacacccccaaaccctcttcctgccatccctccccatcccacagcagcggccctggccccagaccccttctgccagggctcagggctggcagcctgctcctgccagccaagagccgttcctgtccctgcccacagctgctgccttccccaggctcccaggctgcaccacacggggcctgcatgttccttctgactggcacaaggtactctccatgccactgctccttgctcatctcctgtgcctctggcgagtcccccaccgggccaccacttccctcaggaaggcctctccgactgcccagaccagcaaggggcttctcagagttctccagtctctggcctcccactgccctgcccggattctggagctgagcaaacaggtcagcacatggtgcccaacttaggaggtgactgacgccttcctcactatttgggctggcctggg

SEQ ID NO: 40416 - DNA, 1005 bp, Artificial sequence
  DNA replication origin
ttggagaggctgccgctgacacggcgtttgtcttggcctttgcgggacaagacagatgaccatcttgcagggcctcactcactcgctcgctcactcactagctggctgtgtataggcccaagatgtggcttgaaccccagatgggtcttggggacacaggcctggacactgtcctgcactatgtgtcaggccagggcaggcctaggaagctctgtgagaatgggcttgggaggggcctctaagattgaggagtagccacagcgggaagggcgtgccccgtggagggactggcgcgggcaaaggcatggagggcctggcccatgggggagggtgcaccagggctgggccttgacctaaggctgagatcccaggagcccagggaggtggggtgggcaatggtggtgagagggcccttgggctgcagggcaaggagccctgaatcagctagcctgggactggaggtgcggggtccaggcagggcttggagacgggacccccaacctgttcctgcctagaaggaagagtctgaggtcacagaggggcccagctcatcagtggggagggggtcctggggcaggtgtgttgtctgtgaaatgaaggacaatgctgggatcaaggtggtgcccagatctgcagggagggtgtgcctttctcccgtccccacagggccattcaggtatactgaactgggactactcacttccccacaccccttggaggctgaggccccagggtcagtgtgtggagggtcagctcagagtcaggcatggggactgggggctcccaggcagccaaggaaggtcagccagcgagggaagccctgtgccttccacagtcagtaccttggcacgaaccagtctaaaccacggagagccggcaagaggagggattgtggaggaatcatagggttcggctgccccgccgaccagcaggcaggaagttcttccttaggtctaaccacacagtgattccagtagctttcctcaacaggagtccctctgcctc

SEQ ID NO: 40417 - DNA, 1005 bp, Artificial sequence
  DNA replication origin
aaacacttattgggccccgggctgtgcacaccgccgcgggggaggggcgggcgacctgaaggcctggactccatggcctctgccagggatgccgggtccatgggccatcaatgatgcaggaaaagaggctctgtcacctctggccccgcctggagagagttgcctgtggggtccttcgtgggccccctccagcctggggtggccctagcctcagcttcagagctgggctgacccccgactagccgaggcattaatggggccccgtggaggaggtcctgggaaggtctggggagctgaagtcctggccacgtgggggggactgcaccccctgcccagacggagcaacaacattggggtgggtggcggggccctgggggcccatagctcagcgcagcgtctgcgcccaccccctgtgtttccgatggaagacaggctgaaggtgataaatcaccaggtcccacccccacccaccctgccaacgggtggggaaggggggctgcatgtgacagagatggggaccgagacagagatgggagccaggtctagaggagagaccagagacagtggcactgtggtggccccgttgacacgggccaggacccttgcttgggtgtctggcctccccgctctgggcgccccttccacaaagcccatctggaaaccagctgagagccaccgtacccccaccccggctgacccccaacagggaggtagaggagggagggagacctttgcagccataactccgtcccccgcctgcccgcccccaggaggaccataaatcagcaggggctctcaaagcactacctccacaggctgaagggagggcttcagggccactggtcttagggactaggcctgtccttggctgtgtctgtccctctttaaacagccctcaggctgaggcaggcatatcacttgaggccaggagttcaagaccagcctggccatcatggtgaaaccctgcctctactaaaaatacaaaaattagccgggcgtggtggt

SEQ ID NO: 40418 - DNA, 866 bp, Artificial sequence
  DNA replication origin
gtggccgctggctggtgatggatggccagaggggctggctgtgctgatggacgaccgcccatcatgtgtgggccgggggtggggcctgtccaggcctcggcccaggcacggacacagactcctcatcccactctgagacactcccacagtggggacccatagggactgaggcccagcacatcaatgcctggagcctccagctcccactggttccatgagttgtccaggtccccactgcaggtagggatgtgccaggatgacagcatctgtgaggatggggtctcccgggcacctcctcagctcctgccagttgccaagggcaagagccccctcctcacacctctgcagcctgggttgactgggctgcggtcccctgaagcatggggctggggacctccatggcccaggccccccagcagggctcacgcaggctgggttgggtctgggcttcttctgtggagaggtgtaccggcaggactgatggggcaccagatctgggggcctggtcctggctgtggagaaaaggccttggaggggcagggtctctgagctccagtggggttgggtgggcatgcaggagggccagggcatgaacagaaatgggtcaggggctgagggctgggggtgtctgacaggacccggcccacatggcagtggccttagaaggccccagggttctctgtcctggtcagcctgtctggtcaggcccgggattgtcacctcactggagagatgggcaagccgaggctggagagaggtctgactgaagggaacacaggcccaggctgagatggcccctgctgtgcgccctgagctctgctacacctgtccaccggcccccacagctgcccatacctccagaccag

SEQ ID NO: 40419 - DNA, 1126 bp, Artificial sequence
  DNA replication origin
agacagcacctggctggcccggttccctcctgagacccagcaagaatggcaggaggctgaagccagtgctgaatttgggtctggagtggccgggtgggaggtggacgggatccattgccgtggctggtgacgatgcctgtatctatgcagggctgggggacataaagggtgaggattggagggactggaggctcagggtgggggttaggccagggtatgggctgaggagaagtgacccgaggtggccatcagagcgggtggggacatcctcaggcccatggcagggcagggcagggcagggcgtggaggctgccgtggaggaacgtggggatgggagaggagggccggggccgggagggcacctcaaggggccgacagggttaggagggagggctggggagaggggaggggtgggaggggttctcgccaggtggtcttaatctcctcagtgaaataggagtcctggggggtgggcgggggaggtgggagctggagacagctgcgggagggggccgggcctgacagcctgaggccaccaggaacccctgcctaccgggccgacgagtgtccgagtgtctgtgggctgagactcagagccggttcttccacccaccccttttcgcttggcctcatctgcctttactgagatgattttggtcacccggaggggctggcatatgtctgtgggggtgtcgtctgggcccttcctgctctcttagctgcctgagtgactgggcagggcagggcctgggccactgacaccccctcacttgggtccccactaagctgttgtctgctctgaggtaatgccaatggggctagggggtgcaggggggagggaggaggccttggccatccctgtacacctcagcttcccctgccagcccagctcagggaacagagggacagagcggggggtggcgtgggtccaggacacatgtggctcctgtgtggacgtcctgggagacgggagggggcatgggcagtgtggaggcgcgggctgccctgtcctgctaagtgggtgcttggcaccagctgttctgggtggacagatggatgtgagcttttaccagtgccctaaagtcaatccagcccctccctccagcgtgtttgccaggaccgagtg

SEQ ID NO: 40420 - DNA, 1974 bp, Artificial sequence
  DNA replication origin
ggatggaccgcctggagttgcttacagcgccctatttggacgcggcctcggggtctcggggaaggcccgccgccaggagctgccctcaccgtcctccctcccgccatcagcagctcagccccgggccccagagaagggcgggcggctgggggcccaaacctcgccggaacccggacaggaccgcgcgcccaggagctctgccctctcctcccctctccactcccacctcttgactcccagccctcgggggcgggcgccaacacagcagcctcgggcgctccccaatcgtccctccatcccacgaaagtgcttggcccacagcaccggcgaacgcgacattccgggcgaccctcgtggccgtggacgagccgagaccccgagcctgggaggcgggcgggtggggccgcgtgccggggctgcccgcggggccgctgagttgtggcctctgccccttcgtcggaccccagccgccaagccgagagaagaaccgcgggcgggggtggcgggggaggagcgggagcgggagccggcacgggagcgagctgggatctgcatcaaagccgggtcggacattaggtcctgcatgcggaggcgttgacgggagtgctgtctccctctgtgcataggcagtgggtttgcagcctctggggcgggtgctgagttagaactgggggctggggactcctggagtggagggacccaagccagagccagaacaggggccaggtccgcctccagggagggctggagacagaagcggtctacttccctgcctgccagggcagggcgcatttgggtccaccgccggatctcctgtgccaccgcaaacactgcctgcgatgaagaaggaggccgttcctgttacccagcctggggtctcaatgggagtcctccccaacctgtggctcaggtggtcccactgctccttgaccttgccctccctggacctctctcctccctggcgcccgcctcctgacacggaagtcctcaccaagcccacccccacgtgttctccttggtgttgggcctttactcaaactgctggggtcgtgggtactctggctggttccaagctctggggggtgtgtcagacagcaggcaggaaccctgcccaggagctccaggcccacagccacgttcccaggaaggggcccagggcttggaggaggtgtccctgtgagtctggtcaggaccaggctgaccacatagctggcaaaggcctgggagttagacacagcctggtgtgcacaccttgtggctgggaggacactggacaggatgacaggaggtgtggccccctcacccggcccagagcatcccctgggactcttcctaggccccagcaccatctgctccctggtcccagggcagggtctgacccgcctgagagtcctagtgcctggaccctgggggacaaaagactgcaggattgacaaagagaacagcgagaccctgagagaggcagacatgggatggggtaatgggtggagagaagactggacagggaagcacacagccgtgtgacaccagcctcctcccagccgggagggggccggccagggtctgcacagccagccgcatacagctggtccccaacctcctgtcacccggcctagctgtcccccgcaactatgggtgcgatgttctgggccaagttcccaggaggacagatgtggggagatgatgagagggatggctggccggatgggtaatggcaccctctgccccccgacctcgccaggcaccaggactccctgcagactggaagttcccacaactccagaacaaacaaacaaacagacagactgatggacagcccagccctggacccctctccaatttctgaggctgttgatttagctgcccacttggtgggaggacccagccacatggggagctggctgtccatctgtctgtccatctcctggccacactagcccctccaccccaggtgcagccaggcagaggtgaggc

SEQ ID NO: 40421 - DNA, 1758 bp, Artificial sequence
  DNA replication origin
ggggccccacccagccggctctgttggccgaccctaccccaccggctgcctatactcactcgcttgatttcggacccccggaccccgttgctcaacgctgggaccctccaggagccctcggctaaaggggcccggaagccctcgaagcgcgaggccgtcccagcctccagccggagccgccgcctccaccgcctccatcgcgcagcaggatagggctcctccgaccctccctcccgcctagggcaccgccccgccgcgctccgccgccccgccaccccgccacccgcccacactcctcttcacctgccgccaccccacccgtcgtgccctcccgcagcccggagggagcgcgcccgtcggatggccctagcccggcacacgcgggttccgcacgcgaacgcagcgcctcagcacggcccgcggcaagtgttcctccctccctcacctggcccggccgcggttcccttcctcctcgctccccctgccggccgcacctccacacccgcgcgataggaggcctgactgggagctcccttgcgtggatcaggaaggtgaggcgcggctaggggtcgcagggtctgattcctcagggctcgatgcaaggctagggcctgggctgagacatctgctcctccgcatgcaatgcgcagcgaagacaagacgcccatttctcccagcgcagggggcgagatgggagctatgataccattttacaggccggaaaaccgaagcttggcttccactcgggtaggtaaggggtggggagcagaggcttggctgagtgcaggaggctgaagggagggatgcgaccgaggacccgcggcggcctttgctgtctgggctgcacctcagccctgccccaagggagtccagtgtgctgagactcgccccccaccccagtcttcgtagttgtgggtgaagcaaaccctaattccagaagtttttttccctagcgcaggtaggctgccgctggagaattgtggccgcccatctgtctgcccagttccgcctcccctgcacacacgtggctccctcaggggagccttcagacaggcaccctcacgcccacccagcaggacccccttcccctcctatccataaaggcacagcacctccccactgctcagaattctgagcaccgctgggttgccgcgcaccctcctttacctcccgtgcgtccctggtgggcagacagtataccaggatctttgggctgggctgtgtttcccaggcaagttgcgcccccagcattggtcccaggctacttggggcaaatatacacacagaagggaccggccggaggttcgaggtgcacgggggactcctcctctaggcctcagagtatggagagagcagaatcgggctccgccgcgcaccgtgcaaagggaagcactgaggagccgggctttacttgaccctgctaattcgttttaggatggaccgcctggagttgcttacagcgccctatttggacgcggcctcggggtctcggggaaggcccgccgccaggagctgccctcaccgtcctccctcccgccatcagcagctcagccccgggccccagagaagggcgggcggctgggggcccaaacctcgccggaacccggacaggaccgcgcgcccaggagctctgccctctcctcccctctccactcccacctcttgactcccagccctcgggggcgggcgccaacacagcagcctcgggcgctccccaatcgtccctccatcccacgaaagtgcttggcccacagcacc

SEQ ID NO: 40422 - DNA, 1993 bp, Artificial sequence
  DNA replication origin
ctcccgcctccacctcctccctggctgcccctgcacctgggtgaggagagggcagcttgggctctcgcaccggccactgacaggagccccagggccgcagcgtcctctgttccttggcgcagcaggacaggacccagcccagtaaatgcccaacagccccctgaagttggctcactatcgtcgctggagaccccagcagagggacgctgcccaggctgcgcagcccgcgagcccgagcgtcacgcgcacttgcgcgcaccgcccgcctctggccaggacgcttatacatccggagggtgggcagtgcccgctcctccgacctccctgcgcaccggccgggcgcagggagggccgggggcggagcctggccagccgagggagccgaggacacgaggacatgttggagaacttcaggccactgggtcgtatgctgccccccggcacccagcagccagcctgcctgccgggagaagctctatggcccgaccaggctgggcagagtgaggccgaggcccgccgctctgcctggtttctaggcccaggcatcccagacgccaaggcctgacttggcctgtgcgtttccccacctactgtctccagggtctcctctaaccagttcagcgcacccatggctttcctgtacagggcctctccagctgggtgtcaacctcagctctgtgcctctgtgccttgctggagcctctgtgccttgctggagcctccctggtgctggtggtcagggccactgtttgcaaggcctctctgtatacaacctcattgcagccttcgcttgtgcatgctcaggatgggagtgggaggcaggcaacctctcccagggtttttaggatctcaggacctcagaccctgggctggagaggatgctggctgggaactgggaaggcccagtaacgggctggggggctgggcgccagtggggaggctggccctgggcctgaggttcaggaacgcatgtgagtccagggccgcagtgggtgagtatacgaatagtgctgcctgtctgggatgtggtgtgtgttgctgcctgtatggggtgcctcatgtcctgccccccacaacccctgccgcctgcagctggagctttgtgggccatgtcagaaaagggaagctgtccttagtgcatttttcttgccctgagtagtcattctgggccatgacagtgacaatgacttatgtctctcagtgtcactgaggggacccagggacaagtccagtgaggagtgctgtgtggggatggaccagctggttccaggcccctttccttcctctctgagcaggaccagccattgtccccaggagctgctcctgcaggaaggacagtcccgtggaggcgggtggtagggatgctggtggccgcagatttggtagtgttgcaggagacgtgcctgtgttggcagtctgcacccagagaggcctgggccagtcggtgggggcatgggggtggggctcctgcatgtgccccagcctgagggtatgcccaagcttgtgtcctgtgtacatctgcacacacctcagggcactggccagatgtggggcctgtgggtgaggccaacattgaggagggagaagtgaaagtgaaaaaccctggggcctcctggagactctgggtcagccgctcaaggatcggtccagaggtccccagacctctgtgcctgaggtttgtagggaggagcagagcccttccagcccccattaaccccttcgtgcctgagcaggacctgcaggcaggcaggggcggccagcttgccacagcagagaagaggccgtcagggtggaggaaaccctggtcaaccagaagggcgacgggaagaggtgaggggccccacccagccggctctgttggccgaccctaccccaccggctgcctatactcactcgcttgatttcggacccccggaccccgttgctcaacgctgggaccctccaggagccctcggctaaaggggcccggaagccctcgaagcgcgaggccgtc

SEQ ID NO: 40423 - DNA, 1057 bp, Artificial sequence
  DNA replication origin
gacacctctcctcggggggctgtagaagctgacggtggcttcgctgcacagagaaaggccgtgccttggcaggagcaacgggatgttcaaggggcgttggtcatggaggtccctgggaatggaggaagggggcagggagcttggaaagcaagagggccctgcacttccagggtgctccacccgtctgggcccctcggctgctaccagccccaagtggggggcccatgacgccataatcctctgggccaggggcccctggcagtgagtggcaccacaggcccccgcccccggactccgtgggctgggctgggctgggcgcggtgcggctgggcacacgcagtcggaggcggcgccggccaggccgccgggcgcctatggacgcgcggagcccgctgtctccccgagccagtgcgttcagcatcgcctctctggttgcagcggaggcggcggagcgcaccgcccaccagggctcagggtcctccgaccgggtgaagcttcgctggctgccaggatccccggcagggatgcacttcagcaccgtcaccagggacatggaaggtgagcctccaggccgtgtctacactggcccgcccgccagaccccctgcctcagctgctgtggggcccgggtgcaaagtaggtggaggcagctcttggtagcgtgggctccaggcttctggctgcgattctggggcagagaggaagagccggcatcccgcccacagcctgtcccctcaccagcctgggggcccagcttggagatgggcactcaggtatacacaggcccggaagagggcgagtgaggctgggaaggagagcagaggtggccgtgagcctggagaggggggaggaaagttaataagagaggagagagcgggagagtttcacagaaggagagaaagcctcgaggaagccgtggagacgaaattgagcaaaggggagaaaacacaaaaaacccaaagaagaaggtaggggagaaacagaaggacacgaaaaggcaataaaaagcaagagcgaaagagaagagagaaaacgaagggaaaatttaagacagaaag

SEQ ID NO: 40424 - DNA, 976 bp, Artificial sequence
  DNA replication origin
agggcacagggcaagcttccactccccttaagacacataaccccaagacgcagctacccagagtgtactcagtttgtgtctttcctgttcctcaaatctcccccgctttggaccctggctcagtgaccagtcagggctcttgaaaggacattctgcagtgcctggacgggtgtaggccatgggctacccccacatgatggcacagcagtagtggccgtggggcccttcaggacaacacaaggattggccctcacttgccgtcccctctgcctcccctcacaagcaactccctgcaggcggtgggcagaagacagatgccaggagccagcctctaggacaggcccgctccctcccccacccgaagcctctgcaggctggagggtgctgcgggacgtgggctcccgggtgaagcccagcgccgacaaggcccttgccgggctggcctgagccagcggctgggctgccgctgtcctcaggagggcctgtgtgcctggggacagcaaggagggcctggaaaaaaaccacagagctggagcagagcacaggcccaggttcctcagaaaggacgccggcagcagggaaacagaaaccacgagaaggctttgcaaacaggccctgagctccccttggctgttcggactccgagctggtgtgtacattagacacagcgcggcacccgcctttgtctaccggtcaaatcgggtgcatctgcaaaacttgttccccttgtctcttggtctttaaaacaaatacaggccggttgggaggtgacgggccgctggatacagagccaggccccacaactatagggatctaggttgaaggaaactgggtagcaacttccacgcaacagtgcacgctgtttttaagggtaatcctctcctgaaagtgtccagagagttgcccggctgccgctctttatcttgcccgcatagactgaactccagaactgaaccagagttttcttgaggtggga

SEQ ID NO: 40425 - DNA, 956 bp, Artificial sequence
  DNA replication origin
tggcagggtcggccttccccgccaccagccaggaggagctgtggaaggcgtacctggagcggcacggggtggggtcgtgcatgtggaggtgaacccagagggccttgacccgtgtgctgggcgaaccctaaaagtgcctttgagaagtttccccacctgtgagattgaaccctctgctgccgcatgtgctgggagcttttccaagggggactatggactaaacagagaactcccacccaccccaacactcaaaacaatcaaggaactggacaccctgtggggcaccgagagggggaggctgggctcctgccatctcatttcgctggatgcgggtcctcccgccccggtgccgctgcggtgggagcccacacttggccttgccgggcctcaggcacagggcagtgcgcgttctctttattaattgctgttaattgtccgggcagctgaggcccgccctgcataatctctcctggccaccccacctttccggcccagctccaggatccagagttccctggggatgggggaaggggactaggcgctcaggccggcctcctgggagagggagacttgaagaagtccggggctgagtacttggctgaccaccctagggccacaccagcccaggggagcaagagctgtctgcagcctgcggctccagaggcgggttctgagagggcatggagtagggttgtgggtctggggtcagatgggagtggaggagggagcgggttgatcgggcagcatcgcaggtgcctaaagagtttcatggtgcagacgacccttggagttgggtcaccaggcggagacccgccactttccagggtgccctcccggtccctcacgcttacaaccactcgctcaccggtagcgcttatcgtccaccggcacgaagtccatgagcagcatatagtcggccatgggatccatgccgaagagcttcacttggaaggtgg

SEQ ID NO: 40426 - DNA, 1865 bp, Artificial sequence
  DNA replication origin
ggggccgccgaggagctccgacgccccatgcgaggccctggcggagagaaggctcttggccgccctcggtgttccccgaccagtcggtgccagcgtgcccgagaccccaagtcgccggcgccccgagccctccccggggcccgcgcccctctgcgggcggcggcggcggcgggcggggcgcagccgtcgggccgggcgggcgagtgcgcgcttgcccgccgccgcggccgttgtgcaaccggcgcgaaagcctggagcgccccgggggcgcaggcgaggtcgggcgaggccgccggcccggggtagagcgcgcacagggccggaacccggatcccacgaccccggccctacctttctccgtgccgctgggctgcgtcggggaagccacggggttccgcgagcgcgcgaaggcgctcatgagcggcagtgcgccgggccggtggttccggggcctgcgggcgggaggcggatcagggcggcgcctgcgccaggcgcccggcgctcactctctcgggggaggacactcaccagtcctcagggtcacagtcccggaagcctttcgcgaagggattgctggcaatcttgagctgcgtgatctgcagggaggtgggtgtgagcaagccgctggagccctgcagcctgggccacccgacctcggcggaggataggggagtgttaggagaagcgcaccaagggcctttctgctgccctgacaagaaccagtccacgtctgcccctcctctacggagctggtgctccctcctgcaggggggcgggggtctgaggaacctcctctctcactagggaacccctctctggtgtcccccaggtgggtggggatggaggccctgtgctcctcgctgggacaggaatgtggtcaccaccccccacgtgcagtggggtggggggtggggaacagagcgggttccctagtaatctgggtaaacctcagatcaggcccctgatggggagtttccggaatggttcggaaaacaaactttcaggacgaagtgacagttgccgctggagaggtcaagctgataggaggctgggccggccagcctcgagagggagggggctgcctgaggcccttgggagtggggctccagttgggttgggctccactgggaccacagcctgcaggtctaagcggacccactgtccccaaacggcaactgaaaattacacccgcttttccagaggcgttgaatccgctcaggtcctccccacaggccctcacccgatggttctggtaggcagtgaccgcggtgaatcgtgtctcctcgaacacaaaggttttgaagttctcctcggcatatttctcgctatctttgcgtgggtccacatagaccacgtggaagcggggctggtatctgtgcatggaattcagaataatctggaagacaaggtggggaatcagctccagcggtggggctgggctgaggatctggggtgggagccaggaaatgggctgaggtctgagttggcaatgagtttcctggatgagttgggcaaaacccttaattccaagatgaggctgggtcactgggccaagaggaggctgtgacccattggcaactgccaggaatgagctccaagtggcaaaagatctgggtttaggttctctttccttaggtgcctgcccagcgacctcactggcctggactccataaagcctctttctccagcccccttgcagggccccatcttttccattaaaaaagcttcctgcataaaatcaggagtggggtgagagaaggagggcgacccctctcccagggcccaggcccactaggctgtgcgacccctgaccagaggccgctctcctcatcggcacaccagcactgcccaagctccgcctcagc

SEQ ID NO: 40427 - DNA, 1220 bp, Artificial sequence
  DNA replication origin
ccctagactggcctctgggaatggttcctgccattcaattactaagaccccactcacttcacgccgccagagcaaacatgtatacgaaaaacaggtccgcgagggtggacatctggaaactcctggctgtgccctcggagaggtggcactcaggctgccgctaccacgtggggtgatgagccgagtggcctagaaggcagcagttgccacaaacacactgggacaggcacgggaggtgggggacagagcctcggccacgtgcacttcccgttcatcttgtgtccaagtcagcagccttggcgctgaccggctgtcagcccttcctgcttgcgctcaggaagggagggatcaaagagttcctctcgccccatccctggtgttgagttaacggggagaggtcccttagccacctggcctgggaaaaatgcttcatacacaggtctcaagatgactcatggctactgtcattgtgccccctggccaggtcactccgtagggacactcacagcaaataaagtcactaaggagggaacatgcgggcctgggctaggccggcaggggaaatgctagcagaacagtgctgcctgtttttgtctttccatgaccccatcccggtcaggggcttctccccctcccagcaccgaccggcagtgtctgtcatgacccttcttcccagcttccatggaaaagcacaagcatctgtcccgaaaacaggccagggcgcaggcccaagtcccagaatagggacaactgcaggtgggaggaatttaagtaaaaaggcaggatgcacacctgggcggtaccaccagccctggggaggttgggatgagacgggacggtgggaaggtggggggagtgcacaggcctggcaggaggggcctcggagaggggaggggcagtgggagcccctatggggcgggcagagggcaggaggcgtggcggacagggcgctgtgggaccgggaccgacctacagtcggcagggattggggctggggaggccctgagggccctgagctaccccgggctcgctgtcccgaagattcccaacgcgatctaactgggcacaaataaatggacacgcaggcggcttccaaaagaggcgaaaccgtttatcaagtcggcgccggggcggtatctacagtatctacagtatctacatgtatctacaccgcctgcaggcggggctctcgggctgtctacactgcaactgccggccgg

SEQ ID NO: 40428 - DNA, 1530 bp, Artificial sequence
  DNA replication origin
tgcgaggagcagcagggcagggccgaagaccactctgaggggagggctggagtcccccatcgtggccttaggaagagtgggaggtcagctgggtaggagcgtgtggccctcacatcccgggcctgtgggcctgcgtctctcctggttccagctgcaggtggggcaccaggggcagcactgccttgtgggcttaaggagtggcctaacacctctcccaactctcacaggtgcgtgggactcatgaactcaccaatcccgggatcgccgaggtcacgatccggccagatcgcaagatcctggccaccgcaggctgggaccaccgcatccgcgtgttccactggcggacgatgcagccactggccgtgctggccttccacagcgccgctgtccagtgcgtggccttcaccgccgatggcttgctggccgcgggctccaaggatcagcggatcagcctctggtcactctacccacgcgcatgactcacccactcccttcccgggagacgaggagggcgggcagggaggtgggcatcaggccccagccttggcctgaaacctcaagggcctctgaggaccagcaagtcatggcccaaggaccatggagtccccgctgtcttcatgaggttggtatttccttttgtggagtgcctcatcacaggacggtgactctgggggccagccagagccctggccgtccgaggcctgcaggagacgttggcttgggcctgctgtgttgccagctgagggtattttataataaatttccattgccaagttgcaggcttgaggtgggagctccctgaggaggccctggtcccccacttagcatcagtgccctcagacccccaccaggcaggatgctcagccccaccctcacacctgctgttgaatgggccaccccgagtgtgggtttcctgggccaggcctcaggagatgataggccccaaccatagctgcgtcgatgtccacatgacccctcaccccgaggaggccaggagctcccaacacacaggttgaggccaggatcaggatcaggaagtaactgaactccctaaagagtgaagcagagaaaggtgcctgtgagggacggcaaggggggcttgcagcgcacagggccaggccagatgtgggatccgggagggcacgcctgcccgcagagggtgcagtggggaaggcgcacagggtgcacctccaggtgagtgctgggcagaaggcacgagagcagcaagggagtgtgacaagcaccgcctcacagtggccaaggccacagtcacagctgcggctgcacacagggtggcccccagggcacaacacagcaagagcaggacttagcagccagagcctcacactgcatgcagccgggcccagcctggccggtcgtctcctcctaaaagcgggtgttgattgggaaagaaccatgaccctgaatattggagtggggcccatgggcagatccagagaagctgggaccacacacgcctgtgtctgcccggattgccggaagagcccctctagctgaaggcccggggtg

SEQ ID NO: 40429 - DNA, 1149 bp, Artificial sequence
  DNA replication origin
ttggctggatataaaatacttggacctcgccttcctcctcagccttgcaggcatcaccccgtcatcccttggcaccctgtggctgtggagcattctgaggacggcctaaacagcaccctcatcaacatggtctttttgtctggccaccaaaggttttttagctatgaagtctaataattttattagagcgtatctttttttttttttttttttgagacagggtctcactctgtcgcccaggcaggagtgcggtggcagtgatctcagctcactgcagcctccatccactgggctcaggtgatcctcctcccgagtagttgggattacaggcacatgccaccaccccctggccccaacgctcggcccaggaagaggccagcaccccgacggccccgtgcacgtaggacctgtctgtgtggctccgggtctcgtgcagtgccctaccccctctcagaacccagccggggacgttgcccccaccaggcaaggtacactgtgtggctcctgccgcctccagggcgtctcccccttgtccccccctcatcctgccaaccccccactgggtcttgctcttggcagcgctcccagccctgtcgagcttgggggttcacatacctcatggttttgctgaaaatggagtttgtatttctcaccctcgtcagctttggggtggttgtgaggttcttctgggaggagtgccagcattctgctgccatcaagcccgggacgtggcctctcgctaggcactagggtgcagtggcttccctggggtgaggggtcccgggacccagcccctctcctgcagctgggacctccctgtctctgctgctctctgactggggaaggagtcggtcagagctggtgcgaggagcagcagggcagggccgaagaccactctgaggggagggctggagtcccccatcgtggccttaggaagagtgggaggtcagctgggtaggagcgtgtggccctcacatcccgggcctgtgggcctgcgtctctcctggttccagctgcaggtggggcaccaggggcagcactgccttgtgggcttaaggagtggcctaacacctctcccaactctcacaggtgcgtgggactcatgaactcaccaatcccgggatcgccgaggtcacgatccggccagat

SEQ ID NO: 40430 - DNA, 1389 bp, Artificial sequence
  DNA replication origin
gtcccagctgcaggagaggggctgggtcccgggacccctcaccccagggaagccactgcaccctagtgcctagcgagaggccacgtcccgggcttgatggcagcagaatgctggcactcctcccagaagaacctcacaaccaccccaaagctgacgagggtgagaaatacaaactccattttcagcaaaaccatgaggtatgtgaacccccaagctcgacagggctgggagcgctgccaagagcaagacccagtggggggttggcaggatgagggggggacaagggggagacgccctggaggcggcaggagccacacagtgtaccttgcctggtgggggcaacgtccccggctgggttctgagagggggtagggcactgcacgagacccggagccacacagacaggtcctacgtgcacggggccgtcggggtgctggcctcttcctgggccgagcgttggggccagggggtggtggcatgtgcctgtaatcccaactactcgggaggaggatcacctgagcccagtggatggaggctgcagtgagctgagatcactgccaccgcactcctgcctgggcgacagagtgagaccctgtctcaaaaaaaaaaaaaaaaaaagatacgctctaataaaattattagacttcatagctaaaaaacctttggtggccagacaaaaagaccatgttgatgagggtgctgtttaggccgtcctcagaatgctccacagccacagggtgccaagggatgacggggtgatgcctgcaaggctgaggaggaaggcgaggtccaagtattttatatccagccaaactgtcgctcaattataaaaacaacagaccaacatttctgaacatgtaagaactcagagaatcctgcacccataagctgttcttgaaagactagaagattaactccagtctcgtaagagataactggagaactgcagcaaatggtctggcagggagcactggacccacttgcctataggatcagctctaagacaatatggggattacggctatggaaccggttattataactcacagaaatatgggaggcactgagagagatgggatggttgttaagttcactgatttagctcagcttttgtcctttggggccaaagatataatagtcaacctcatccccgagagattatctgagaaccccccaccataagtaatgacaaaaatagcattatttccttctcctctcccacctcactgtaggtgcctatgtttccttgtatagctgcataaagtaaaaaaaagatctaaatatactcaacaggctgagtgtggtggctcatgcttgtaatcccagctgcttgggaggcaaagacaggaggattgcttgaggctgggagtttgaggctgtagtaagcta

SEQ ID NO: 40431 - DNA, 2335 bp, Artificial sequence
  DNA replication origin
ggcagctttggcccgaccgtctcgcgcctgtacacgcggccccacctgatcccgtggcacttggcgcggcgtgggaatgggcgcgctctcccatcacccaccgcgcggcactgccgcgccagcagggaccgggagagcctgcgaggtagcggccacacggcatacagcgcaggcgcggcctggatgggaggagcgcgtggagcgtgccgggagcatgcgccgggtcgtacacggcggccgcgcgcacgctgggggcgtggctgcgcgatgtaatcggtctctggacgctgcgcggcgctcctaggagcaggcgttcccgactccggcaagagggtcagtgtggaggcgggagcccgggcggccggcttgaactccgtgcacgcgggcctggagctgcgcccctgcgtcttttcccgacttctgatccgcagaggggcactcggagccccagcctgggtcgcagtgccttcggtctgcgggcctcagtttctcggtccgcgccgggggtttgtgggggcacctggagacatttgggccgttctcgcagtctcgggaagccgcgcccgctccttgcctggcctcacggcggccgatctcgttctccactttctaggtggcgcctggactctcgccctcagagggaggcccgtcccacggtctgtggctacggatcccaggaccctcttcgcgggcgattcgcgtagcctcaggtgggtgggcttcttgttgccgtgggccttgtgagctcgtatttcctgcatggcggttgctggggggcgggcggtgcagtcgtctgcactcagcttgctttaaggctttgggcaggttttgttcttggggctcctgggtctccccagagcagagaacggctccagcgttccaggtgctgcctttggccttgtgggggcaaacacacatgcgccgtggtacctgcccctttaggatagtgctgtccagtctagaagggccgaaagtcttctatgccaggcagtgtggggagaaaagtagggggaccaacagactgataggcgtgggagggctaaggttctcaaaatggtgagagtgcggcccagggttaggaaggctcaggcccaaagcaggcctggctggctggtgcagggaagccttctcccagactgcaggggacacaggtgcgcaggtgagtgggcagggtaggggactgggaagaagggaaggcagagatctgggtagcacactgtggctcccgggcatggggtgtggtcattgtgggcaacctggatacctaaccttggctggtggtgggagctgggccctggatcggggtcactgcttttttagagctcagtgagggactggactggactcgactcacgtccaggccttagtataatcctgcagtaaggtgggaagccagggtcatgggctgggctttcaggtgaagaccccccccccagaggggggtcagacctgagggattccagagtgtttgggtggtggaggtagggccagtggccctggcaggttctagtgctgcaggccaccctgggaggtacctggaggaactcaccctgaggggggatggccagcagataggagatgtgggatgaaggtgtgtgcaggccttgtgctcccagtgagccggtggcgtttgtgtgtggggtgaagcagagagtttcctggaggtcgtgagtgggcctccgtttgcagagagactggggagggggctagatagagttaggctgcagagtgtaagagccctacaggagggctccttgcactggaatagaactggctactggctctggagcctcctaggtgactgctgcgtggagaaggaggggcgggtccagccatcagactgggactccccagaccctgggcacaagtgactggagtggcgggagcagacagcaagtggggttccaggattttacaatggtgggggctgggatgctctgctgtggctgggatggggactgtggaaaggtggtgtttgtgggtgggggtggcattgcctgcaggtggcactcagttgtgagaggtgaatttggaaagcatgtggggtcaggagggagcagagaatagcaggctcactgctctgtcggggaagcaggtaggacctgctgtgtgcctggtgctgggatgtaaaagagcctaatgacgacgcggtctgtgcgttgttcagagtttttggggcggctagagcctactcagcagacaaatgtagtttataatcgcgtgctgtatagtagttaagcctctggtctctccagccagtttttgctgcttccaccacttatgggttagtgtgtggctgcagacaagttacttcaccactgtgtgcctcaaagac

SEQ ID NO: 40432 - DNA, 1845 bp, Artificial sequence
  DNA replication origin
caggcccaggggaccccgcaggcacaggccatccccacacctcactactctggtgggacactggcccagagcccccacccaggcagctgcacagccagggcaggaaccagggcccagcagggcaatgtgggcaaagcggccgctctcccggtctcccttgcccagcgtgggaccggtgtgctgggccaacagtggtttcgatcctgcgtctccctggagacggcccagggagtgcagggtggggccagagccgggtgctctccgcctggccccgcggccgccgtcctgccgccttcacatgtttttatggtgcaataaaaatatgactttaattcctcagattgttctgtgtaacctgcaattacccccggcgacatcctccacacttctgctgtggcaccggatctcgcaaagacgtgggagcaggagaagtgggcggggggtgctgcccagcgaggctgagtggcccctctctgccacaccctgcatggggcagtgtcaccctctcctgcccccaacacccctgagtgacattgggcagttccccaggccccctgggtggtccacatgcaggggaggggacacacagttatggagggcttcgagggccacagcggggcagcaggggagggcagggcctggcagggctctgaggagtggacagggggtacagcaggggtcatcagctcaaggggaggggtaactgagatgctcagactgcagccccctccctgagcatgctgcacccttgcttggccctagcctcacttggcagccatcgggcacctcggccctgctctcctggccgtgaggtgaccttagtgctggctaggccctcaggcagggctgcccctgtgagagcagcagcgtcaggtggggctgcagtttggtggggctgcagttgagagcacctgtttcctggcctcgggtttgggctcctcccacagggtcttggcacatgagctcacctcggctgacacctgcttgccttacctggcccacggccactccagccccagtgcagcagcttggaggtgccgccagtgcctgggcactgggccctggtcccctccccaggttgaagcaggacccagaggcaggcctgaggcccccacctacccctcacacactgggcaagaactggaggtgacccaagacctttaatgagggatgccctgaggtggctgggcagtgtgctcatcggggcagggccatgaggccacactaacccctccaggccctattgaggctccaggtgcctgggccacctcgggttgaggctccatcctagtggcgtcaccgccccatgctcacatccctccccaagagagcacaggttggcacctggcttcagtgggtggcatgagaagcgtgttggtgtctgcgttgggctggtgggtgggggccactcctgcctcccagagctcagagccacctgagcctcctggtctcggtcccaggctgctgccccaccccgtgtccctctgggagccacttctcctccccagggtccctgagtgcccctgtcctgggcaagagatcctcccgcccagcctgatgagacctgctggcctctgcccacctgccctcactcatcgccacttcccacccttgggcctagtcagggtccaggagggttggtgtgggtcattcattgccagacacggggatccccaccctctggagcaggaagcagcagggggtctacacccaaggccagcgggccagcatcagtggccagggcaggtggtgcagcccctacaggtattaaggcccaggcacagggcgccccatcaggaagcatctccctctgaactgcctctccatccagatgggcctgggcca

SEQ ID NO: 40433 - DNA, 958 bp, Artificial sequence
  DNA replication origin
tgagatgtgcggctttcagatggtgtgcctgagggagcccccacagctggtgctgggcctgcatttccttggccccaacgcaggcgaagttactcaaggatttgctctggggatcaagtaagtcccgaggaatgcaggctgcgatgcgatgtgcagctgggtatccctcgagtgccggcagtcctacagtggagagctgctgccactcttgcggcatttatgtggccttcgtgggtttgcagcagagattcctcaggcccctcagacagggcgggttttagggggacaagaggcggttctgccccagccagacgctgttgagccagccagagccaggtgaggtgtcccctgtggccccgggtcgctgctagggcccttgcccacctggccaagcaccacgccaccatgagcagagtgccagtacctggagagccaccccagggctgctgtgtgtcttctggagctggggccattgcctgggtcttgggctcaggctgtgtgttttcggggtcccggggtcaaaggaagccatggcaaaggctctgggtgggttgacaggggtagttggaggttgggacattgtgcatggcctgagagaggtggctggctggatgtggggcctgggaggtggtggtgtggtgaggccaggatgcgctgtctgtgggtaaagcagagagcagaggcctaaggcaggactgtgcctagcaggggaggatggaacagcaggaagccaggccagggcaagccagggcgtggctgggtgggaggtgggctggacgagcactaggcatctgctgggagggaggtggatggcacccacgggtgtgggcaggggtcctggctgctggctgggggtcaggggacagtgaggagaccagcagcctctgaggccctcctcttcccgggggtgggatgctgtggacccccctccctgtgctgaccccgcctgcctccccca

SEQ ID NO: 40434 - DNA, 850 bp, Artificial sequence
  DNA replication origin
cccgtcctgttgatggagagttctggggtgcagggggaaggggccagccctggagcccagtgtctcatccccaaaggccgcaggccccaccgcccaggctgcaggctccggtttctctgggtgcctgcaagctgcagcggcagcaagatgaaaccgcaccgaaggcttccagctaccacggcccggcaggcttcagagcccccgcatccctccaggccaccccggagccacagccacctgccagagcagacccccaaagcaggcttgctcgatgaaaacccctttcctcaagggtgagtgcctgagcctggaagaagctggaagaggatgggtatcaggatgtggtggggggcggggggcggggggctctcgcctgggagaaaccctgggcagtccaggaagacgaggtgcagggtggtggggggggtgggggtggaagcagaggtcggaggcccctgggagaaacttttctgggtagagtgagattcatggccctgcaaggtggggacagcacagaggcatcttcggggccctggtgctttcagggacaagctgctgtgtgctggagtggggccagtgctcagctgacctcagcaggggagcgggtggcaccgtggtggtgaccctgctggtgctgggcacccctgcagcatggctggggtggggctgggggcttctgggccacagggcttctccttgccctcagaacaaggcagccaagggccttcccctcactgctgtgacacatggtggcagagaccagaggcacctaagcccagtcaccccaaggctgccaaagcccaggcacccccacttctgaggctgcccccaacgtgtcccttcccgctac

SEQ ID NO: 40435 - DNA, 1003 bp, Artificial sequence
  DNA replication origin
gcacatggaacgctttggggtccctttttagccggggattccagtgaatgaaaacggtagcaggggctcttttgagcttggtcatggggcagccctccgaggtcagcaatgtgcagaaggggtttggagagaaggcttgagcatgtgagggtggcacggccagcctcatcagcagcggactcctttcccagggcagagtggagggcagcaaacaggagaatgagcaacctacctaggtccttgggatgcccctcaggaggacgagctctagggggaatgctgtacgtcaccatgctcggtgccagtgttggggattttctaaagggagatgcccactcggagggcaaagggtgatggcataggggctgcatataaccccggacatggtgctgacgtggcccccctgtgccttccccaaggggcggcctgagctgacacccatagcgatcatggccgggaggctcctggtgcagcggctcttcggcgggtcctcagatctgatggactacgacaatgtgagttctctagcaggacgccacgtgcagcctaggacaggctgagttcgaggctagctcttctggggtgaggggcctttgtgcgctgtgtgtctgcatgtagatgtgggcatgcgtgtgtgtgcgcttatgtgggtgtgttgtacacacgtgtgtgtgcatgcatgggtgtgtggctcagttctgagagtgtggcgcaggcgtgggcaggtgggtcgcctactgtgcttgcagcctgctctgggcgcatctggtcctggtctgtgatcgctgctctttgtgtcacatgcagtggggaacttcggttttcggggcccaagggccctccctgactccagacctgctttcaggttcccacgaccgtcttcaccccgctggagtatggctgtgtggggctgtccgaggaggaggcagtggctcgccacgggcaggagcatgttgaggtgaggcctgggagcagcacagctgaggacagtggcgactccacg

SEQ ID NO: 40436 - DNA, 1567 bp, Artificial sequence
  DNA replication origin
gtccgaattccccagttcccatccagattccccaccccaagtccggagactcccacccaacgtcagatcacttcacagcggtccgaattccccacaccctatcccagtgttccaccctaggtctgaaggcccccgccccgaatccggccgcattcggccccggtctagccagcgctctcacctctcccgcgacggcccgcccgggactggacccgccccggtccggcgcaggcagcgcggcgggcagccctagctgccccagaagccccacgacgatggcggcaatggcggtggcgctgcggggattaggagggcgcttccggtggcggacgcaggccgtggcgggcggggtgcggggcgcggcgcggggcgcagcaggtaggatggggtcggggcgtccccgcggtaggtgtccgcgcggccggggtgtcctcgtgagggtgtccgcgcggcggtggccagggtgtccccgtgggggtgcccacgcgggggtgtccacataccggcctcttggtctagtcttgctcaggagtccgggctgcttctagccacaagtagcccccttcccaggtggggaaactggggctgggtgccttgtctaaggtcctgctgtgctgactgcacctgtggtctcccagagctggtatcccagtaacaactacagttctgaagatgatgatatcccacctcccgaggtcaccaggcaccggccccactggccagacttcccaacttctccccagacccctagactctagaggttagaggctgcacagagcaatgggaggatacacactcgtcctcctggagcccctgaagaacagttaactaaatcaggacaataatcataactgagcactcgaagcagaggctgggtgtctggtcactcaggacagttcaagcctcatcctgtaggacagactcccctagatccgaccagagcgccaccatatctgttatgtgtggccagtttcattccatgcacgacaacatggtcccccaccatgcagggggcccctcgacccagccccctggatgcttgtgacagcgagcagctctccccacaggcagtgagtgtagaggggtgtaaggacggggtcagggctccttcccagggatggcggctatgggaggcatggtggctggccctctgcccgcggtggactcgggagggagggctgactgtgtgtgtgaatgggcagagttggtgctatggaggttttgggggtctccaggacggagggtggcccaacagagttctgggaggcagtcaccacctcgtggccttgctgagacctggaaccctcagccagggcactccatctttcaaagcttcttggctgcatgcgtcaggtgggcaagctcaggaaggttaaatgcacccgtgctggcggagtcccataaaaggggattcggcatcaaaaggaggaaaaaggttcaaagggcatttatcatggggttcagaatcacggatgtgaggggcggtagtggggacaacagacagaaaagcttccccttcccatactcacagtccagacacggcaatagccaaattccaaatttctag

SEQ ID NO: 40437 - DNA, 1263 bp, Artificial sequence
  DNA replication origin
tcagcacagcaggaccttagacaaggcacccagccccagtttccccacctgggaagggggctacttgtggctagaagcagcccggactcctgagcaagactagaccaagaggccggtatgtggacacccccgcgtgggcacccccacggggacaccctggccaccgccgcgcggacaccctcacgaggacaccccggccgcgcggacacctaccgcggggacgccccgaccccatcctacctgctgcgccccgcgccgcgccccgcaccccgcccgccacggcctgcgtccgccaccggaagcgccctcctaatccccgcagcgccaccgccattgccgccatcgtcgtggggcttctggggcagctagggctgcccgccgcgctgcctgcgccggaccggggcgggtccagtcccgggcgggccgtcgcgggagaggtgagagcgctggctagaccggggccgaatgcggccggattcggggcgggggccttcagacctagggtggaacactgggatagggtgtggggaattcggaccgctgtgaagtgatctgacgttgggtgggagtctccggacttggggtggggaatctggatgggaactggggaattcggaccttgggtggggatctttggaccggggtggggtccccagactccttgtggaaagctgaggttgaagatctgtgctgtgatgaggggctccagatagcggtgagagatcccgcttcaagactgggttgggggtccagaccaggaggataagcctctccctggagtagggcttgacctggtgagggtgtggtagagtcacaggggagggtcccacttggtccttgggctgggatcagactctcagagctggagagttgcaggaggcctgggggagggtctgtggagccccagactcagagggccttggtgacttctccaacaggctccctgttggaggccttggggtaccccagggcctttccctgcaagagagaggctgctccaccaggaaggggcccaggactccccagggtcggggggatgtgtggtgtgcaggaccacgtgggaatgttagagaaaggggaagtcactccgggcctgccctgctaacagacctgctttttggatttttccagccagggatttttgtgtcctgttgctttttattgtttaaagtgaccctccaagcctgagggaccgtaggagctgccctgcagagcccagtgagacactagttaatgcagaaaaaacagattttacttggtaac

SEQ ID NO: 40438 - DNA, 904 bp, Artificial sequence
  DNA replication origin
agacctgctttttggatttttccagccagggatttttgtgtcctgttgctttttattgtttaaagtgaccctccaagcctgagggaccgtaggagctgccctgcagagcccagtgagacactagttaatgcagaaaaaacagattttacttggtaactactgacaacatgagaaaaagctggctccatgctgatttgtctagatgtgcctggagtttaaagggagagtgagggagtgggaaggggtggggactcagtagagttagggaaacagaaaatcaccaaaactgggaagggagggttggcccctgtgaaaccaactgatctgggtttgccactggggcttaccgaagtcaggcccccaacctcccacagagactgggagacaggggccccatcctcaggtgttggctggaacacacaggaaattcttgtggcagccttgaacttctcaggcaggcactttagagggggctaggatcgttctgggaatgtggccttgagctgttaggagctatgttagtgttcgttccagcctagataggccagggtgaggcccagtggagaaggggactctaaggagcctggctggagtgtggggagggagggtctttgtcagcactccccctgtgcaagaagagcagagacctgcttctttcctctcaacagtccccgtccattttctgttctgtgttgtgttcataaactaccagcgggaccatctgttgagacttggtagcaaaggatttttgctggatgatgcaagcagtcaagcatttaatgaggaaacaaaaataacaggccaggcacagtggctcatgtctgtaatcccagcacttttggaggccgaggaggatcacttgaggccaggagtttgaaacaagcctgggcaacataaagacccc

SEQ ID NO: 40439 - DNA, 852 bp, Artificial sequence
  DNA replication origin
cactttgccttattcccactccatgtgcttcacccaccctgtgtctgtgttttatgtctcagtcagctgctgctactgccaaggggcctaagggagcactgagtcctgggggcttcgatgacagcacgctgccactggtggacaagagccttggtgagtggtggagcttagggagcctagagggtggcgaccccagctgccccagttgcctgacccttgggtgaaggtgaaggaggagtcaggcctcccactgagacggcttccataggccactttccctgccctctgcctcttggctactcccttcccacagcatccgcgctgttgtcaagctggggtgaggctgccagctggcagaggttgggcaccttagtgacagagagcctctagggctacctgggccagccctgtgtgggcttctctgccccgatcccccctggctgccacatgcagcccgtctcctcctcctgccttgcagagggcgagaaaactggcagccgggatgtgatccccatggatgcgctgggcccaggtgagtgcagatgcagtgtggttggttttctgtgccgggaggggaccaaggcctgaagtgggcctgctggttttatggggtgtagatggtgctgggtggaggagagatatttggtttaggggtgcttagagggtgaggtacagggcagctagagagggattagtgctcagccaggggctctgacccacaagtggaggggagtctggagagttggcagggtgttggtgagagctggcaccagcctggatctccaggacagggtgggtgggggctgtctcccaaagcccctgtcccacgagtcccctgtgtctgggctgaga

SEQ ID NO: 40440 - DNA, 1051 bp, Artificial sequence
  DNA replication origin
agtggtttgggagtccaggccccggccctctcgcttgggcgctgtcccaactggaggtagctccagtccccccggccctgtctctgaagctcagcgccctgctcacaggggctcctgtgaccgcctgcacacaggcggtctccaggggctctcctggcagtgcccctcgccctcgcgggatccctgctccttcctggagaggtggggcagaggtgtgttctgacacctagtcctgcccctcagggagctacgccatggctgagcttgtgcggaatgtgcgcaatgcacaggctccgccgcgaccgggggcctgcctggaggaagacaccgtggtggcggtgctcaacaccatccacgaaatcgtgtccgacagcctggataacgcgcgctcgctcctgcaggcacgcggggtgccagcgttggtggctctcgtggcctccaggtgtggaggggcggggtcggtggcttggggagccgcggaggtgggggaggggccaccactgaccccgcccccggccccacagccaatcggtacgcgaagcgaaggcggcgtcacacgtgctgcagacagtgtggagctacaaggagctgcgtggtaccttgcagaaagatggttggaccaaggcgcgcttccaggtgcggcttccctggccttccttccattccctgctcactttgccttattcccactccatgtgcttcacccaccctgtgtctgtgttttatgtctcagtcagctgctgctactgccaaggggcctaagggagcactgagtcctgggggcttcgatgacagcacgctgccactggtggacaagagccttggtgagtggtggagcttagggagcctagagggtggcgaccccagctgccccagttgcctgacccttgggtgaaggtgaaggaggagtcaggcctcccactgagacggcttccataggccactttccctgccctctgcctcttggctactcccttcccacagcatccgcgctgttgtcaagctggggtgaggctgccagctggcagaggttgggcaccttagtgacaga

SEQ ID NO: 40441 - DNA, 1739 bp, Artificial sequence
  DNA replication origin
gggccagacgaacacctgcagggacagggcagtgcctattgggctgtatgctgggatctggcttgagagagaggtctgtcctggtggggcctagccagttggaagagcctgcatgtcaccagggtggagggctccagccgcaggagggctgtgggggagtattacaggcagagcagggctgatgcagataccccagcggggagtgtgcttggagtgtgttggagcagaaagcccagcagggcaggagtagagggagcatggggcatgaggactggcgagggtgtgatgaaatgtcactgggtgggtacaggggagatcgaggtagtacccaagccaggctgaagccccagtttggagacaggcaagcttggaaggctgttttgacccctcatttctggagcactgggcagagcagcaggacggcgcctcagttgcccgggaacttggagtggttgccaggaagagtgcctcctgttgctagggcagctgccctggttgcactgcatcagttgacttacagagggtgggctctattgtcagtgggggagggtgggccctgttgctagggggcgtagctctctgcacagcttcagttactggtgaaagcaggtcctcttgctaggggtgtggccttggttatacaactctcagttactggccaatgctggtcttgttgccagggagggtgggccctattaccaggggcgtggccaggatgcatagcttcagggacctaccgggaaatgcgggtcttgttgctaggagagcgttcctggttgacacctccctccccaccccaggcctcctggatgctcctgctgccaggcaggtccaactgatttgagcctcagtttgttcctctgtgaaatgggaacgcttttccccttgggtgactatatgttgatagtaaatattacgtgactcatccacacccatccctggccccagctcacccacgccctgggagctctgaagcgggaagcgggaggggtatgatggatgagagcagattctgggtgaccgtgggtggcggttgccctgcacctaggctttgagctgctgtaccagcccgaggtggtacgtctctacctctccctcctcacggagagccggaacttcaacaccctggaggctgccgccggcgctctgcagaacctcagtgccggcaactggatggtgagggaccaggtcgggcagggtgggcaagtcctgagagagggaatcccaggcacctcactggtgcagctcctgcctcggctggcggggaaaggaggggccacaccaccaccccaggatccaagaggtgtatgggctgcgggcaatgcgtgcaccctggacggtgggaaaacctcggtggaggtgccgttgagcttttggggtagggctttgtcgggcacgggagcaggaaggtccagctggagagagcggtcagcgtctggaggtgggagagtgcctggcatgtatgtctgagcaaccctctccccgcctccgcagtgggccacgtacatccgcgccacagtgcgcaaagagcgcgggctgccggtgcttgtggaactgctgcagtctgagaccgacaaggtggtgcgcgccgtcgccatcgctctgcgcaacctctcgctggaccggcgcaacaaagacctcatcggtgaggacgcctgcaaagcccacgcctgggcaccgaactgtgcctgcagctttggggtcccatcggaggggcttggaggatgagtggtttggga

SEQ ID NO: 40442 - DNA, 723 bp, Artificial sequence
  DNA replication origin
atggaccggaactttgacacgctagacctgcccaagcgaactgaggccgccaaaggtgagtgggctgagatgaagccagctccactgggggatgtctgggctcaggattgccctggtagtgaagctttgagccatcaagcaggcctggagggcctcagggaacagatggggaaacaggcccctaggtgcaggatttcctggagggtgattcagcaccaggacacctgctgagggtttagaatgggaggaagtgccatgggtcatgtcaggcaaggttgggggagacaggcacagagaggccgagggcttgctcggcctcacggtgcgtaagaggtgggaaggtttggagggacgcctccagtggaggcagggcctcctgtgttagccacaaagctgagttatctgagggggctgggagccaggcgggcatgctcacatccaggttcagaggctgggccagacgaacacctgcagggacagggcagtgcctattgggctgtatgctgggatctggcttgagagagaggtctgtcctggtggggcctagccagttggaagagcctgcatgtcaccagggtggagggctccagccgcaggagggctgtgggggagtattacaggcagagcagggctgatgcagataccccagcggggagtgtgcttggagtgtgttggagcagaaagcccagcagggcaggagtagagggagcatggggcatgagg

SEQ ID NO: 40443 - DNA, 1757 bp, Artificial sequence
  DNA replication origin
gtgcagggcctacgaggacacagcagatgatggcggcgagctggcggacgagcggcctgcgttcccaatggtgacggcgcccctggcccagcctgaacggggcagcatgggcagcctggaccggctggtgcggcgctcgccctcagtggatagcgcccgcaaggagccgcgctggcgggaccctgagctgcctgaggtgctggccatgctgcggcaccccgtggaccccgtgaaggccaatgcggccgcctacctgcagcatctgtgctttgagaacgagggtgtcaagcggcgtgtacggcagttgcgggggctgccgctgcttgtggcactgctggaccacccgcgggctgaggtgcggcgccgggcctgtggggcactgcgcaacctctcctatggccgcgacactgacaacaaggccgccatccgggactgcggtggtgtgcctgccctggtgcgcctgctgagggctgcccgggacaacgaggtccgtgagcttgtcactggtgagtgggacctggccatgctcacatcccctgggaagagaagagtgtgaggctcaacccgggaggaacgaggccactcggcctgcgaccgcctgggaaagcacccggtaggcaggagtgcagctgctgagacgcttgccccaggagccaggcatcaggcccagacactgtgacaggttccccagtctctaccatagcagggaggctgacgctgcgcccctcgggcatgtcccctcacctcctgccttcacacctcctgcccccacagaaactctcctgggacccacctccttggttcccaccccaaccgtgcagtggtggggcttgtgccttgtgagagctgagggacaggtagggtcaccgtgtctctgtgaggccctgtggcctcaggagtgttagtgccacctgccacatggcagggaatgggtgggacgggacagcactgccacaccctcctctgcacctcctcccctttggggctccttcctagctggaaaccagtactgggtgtcccccggaaccactcacggcttttgttacttcctactgttctgcatgagctgggacatgaggagagtgggacaggtcctgagcgtggccacctggggaggtaggcaggcggtgcatatggtcagcacagattggccaatcgcaccccacaggcaccctgtggaacctgtcatcctatgagcccctgaagatggtcatcattgaccatggcctgcagacgctgacccacgaggtgatcgtgccccactcaggatgggagcgtgagcccaacgaggactccaagccacgggacgccgagtggacaactgtcttcaagaacacgtcgggctgcctgaggtgtggaccagacctggtgctaaagcccacatgcacaccaggccccgtcctcgtggtcccagatagtgtggaagatggcggcgagcttaggagcgccagagcttaggagcttcagagctgtggcacaagtcctgtggatgagaagtggggcctgatggagctgtcctcacccccaagtggtgtcccagtcttcccaggggcaccctctggaggggtctctgtggtaccgtagccctgcccagctctcacctaccttcccatcacttgacagccagagggggagctgggaccttcctgttcatctgcctgggaggctcatcccagccacctgtgacctctgcccttcccctcctacccctgggaggccctgctgaccccacagagtcctgggtccccacagtcctg

SEQ ID NO: 40444 - DNA, 1078 bp, Artificial sequence
  DNA replication origin
ggaggatgacacgcgcagcctggccgctgatgacgagggtggccctgagctggagcctgactatggcacggccacaaggaggaggcctgagtgtgggcggggccttcataccaggtgagctgcaccccgtcccctgtggctacctcctctgggaagtctgccctccaccccccaactacagagtgccccacttgtcaagtggcgcagttgagttagtcatgcatgttagtttgaattggccttggctctcgtcagggacagaagaaaggtggaccctggggtggtaggagttcggctgggcactgtcctgcaggcccagggcccaggaaagctgggaagagtgccggccactggccttgctccagccacactctgggtaaccagaacccagagccctggcccttgtcacagcccctggttctgtccccattgccctcagtttctgcatctctggagtggggatgtgaccacagcccgggtcaggattttgttgtgtgaccctggccaagtcacctgaccgtcactcctagcctcagggcaggcggtttgatgacagcaacccacagggctactgagagctaaggagatcttgtgccccaaggggctggtggcctgaatactcctcaggtggtcctactgggatggcttcatgcggagagggccatttactccccctacatcctggcacagccagagatgggcctcatggaagatggggtggttttgtggaagggaggtgagacggtctctccagcagccatagcagatgtctcacagaaacttgttttgctcgggattgggaaactgcccggtgacagcagtgagtgagtttgctgtcctgggagggttgcctgggtcctggtagccgctggctggggtttggcatttggctctgaattggttctcactgggctggtgcatgactctctgtgtccccaccatgctccgggccaagatacaggtgctctcagcccagcgctgctgggtgagtttgcagtcctgaagaaggtgtgatggggcagctcagaggcagggctggcggctgctgtgacgatgtccacgcgccccacttgcctgt

SEQ ID NO: 40445 - DNA, 1178 bp, Artificial sequence
  DNA replication origin
tcaactgcgccacttgacaagtggggcactctgtagttggggggtggagggcagacttcccagaggaggtagccacaggggacggggtgcagctcacctggtatgaaggccccgcccacactcaggcctcctccttgtggccgtgccatagtcaggctccagctcagggccaccctcgtcatcagcggccaggctgcgcgtgtcatcctccaagccatacggctctgcctggaagcgctcgggcagggagcggccacctggtggcccaggctcaggacccaccgggaaggcttcccggtggccaggcagtgtgaagcagccatcaccagggcctgggccaagggggccagcacgtgggggccgcatgcccagccctcgggacaggctgccatagctggggctgtcccggggctcggggccttcgggaaagccacccccactgctgaggtaggctcgagagagtgtggccactgggccaccaccacgcagcaggaaatgccggtccagggcaccatctgcaaaagggcctagtggggggccgccatccagcagggggagtccatctgggcccacgggcacctggcgtactgtccgagtggtcaccgtcttgacagtcttggtgacctggtggatggataggcaggtaggtggggtagcacgagaggcctagaaactgctttgctggggtctggctggccttaatttcccactcgagcaatgagaggccccacgtggcaagcttccatgtccactctgcaggtgggacagctgcagcagcctggccctgctcacccacccactgcctgggcctggccataccttggtctcggtgcgccgggttgtgccatcttcggatgtgacaatagacacatgggaagtgggtgtgccggggtcctcctccaccgtcacggtctcctccagcacatcaggtgcctccggcatcgtggccagtgaggcctggctgcctgggctctgctcctggggcaaggagggacattggtgggcaggcctgctgctcagtcacccctggagtgcaggtctccacacacagcagctctgcctcagctcatgctggccagcacaccagggtgccttcctcctggtcctgaacccacccaccccaaggcctgtttcggcccaagctgacaaggacagcaataagttcttgccctctgaac

SEQ ID NO: 40446 - DNA, 902 bp, Artificial sequence
  DNA replication origin
agccaggccttggacaggggaggggcctgcccctgcagtctgttcttcaggacacagaccgtggtgcatctgtgaagtccggtggtttgggtagataagtaatatgggaccagggcccagccacctgtgccccagcatccctctgtgtgttggtccaatcttgcttttctgctccctgtgttccttgcattttgccacaaaagtgagactgatgctacccagcacgtcccacgaccccagccccctctgtccttctcacctccttgtgaagaagctgagccgaaggtgcgtgatggggcccagagcccctatgctgggctcagccctgtgttcccgggaccctcttgtgagcaggggtaggtggtctacctccctggtcactctggcccctcccacaagcccaagggagctcatgggaaaccccaggcctgggcagcagcctgtttctgggccagtcctgggggccccagacctggtgcaccagagattgaagagccaagggagggatgagtgctgggaggccgggcggggtgcaagaggagcaaggatggggccccagctggggagggggtgatgagagacgactgacaggatgcagcatgtgggattgggctggaggtggggtgttcagggtagagcccatgtctagggtacagaggggagcagcccagagttgggtctgaggcagaggctgtgtggggctgcagggccagggtccctgagagtgggccagcctgggcaggtgcacgtcagacatggacactggggccagacagggatccagggactgcagccaactcctgttgagagtcagcccaccattccacagccccaccctaaagatgttgcagagagctgagccaccagctggctatgggcctctcactactctacacctcagt

SEQ ID NO: 40447 - DNA, 1872 bp, Artificial sequence
  DNA replication origin
tgcagggccccgccccctgtctctggggggcgggacctcacattgcccgccccccgcccgccacgcccaccccggcccccgccacgccccacctgggcgcggccccgcccgattggctgctcgccgtgaccgccgccagatccgcccccgcggggagcgagtccgccgagcctgagcccgagcggccgaggcgccggagccgagcctggtccagccaccgcctcccccgctgctggccagcgccccccgagtcccggcccgatgccggccgaactcagacaggttggagggaagttggcttggggggaccctggcccggggtcggaggcagagggcggggcgtcggcctgcccgggaggacccgcttttgttccgcggagccgctggcccgaggcagctattgtcttgcgcccctggctgggctgcgtcaggctggggccagggccgggcgggtggcggtgtgagcgcggtgcccccgggtatgcagggcgggccgcagggtctctggagcccatccgcggggcctgggggggtcgggacccctggcagtttgaccctcctcttggcaccggcccggaccggatggacgcttcttggccagcgcccaggacaggtgcctggggacacgggtggagagccagggccttcctgagcggcttctgtctgtgcaggaaggaggctgaagtctgaagagggaagcccgggtaggccttctgctccctgagagggttcctcctctcccctccacaccccctacgccggctctgactcccgggacctgcaaaggagcttccggagctttaatggaagtcttctctgcctccgaggcgcacgtgatgggagggatagagacaggccctgcccactaatggatgctggaggagatctctaaggaaaacgggatcctccccctctcagcattgaggtggggggaggcataggcagtttgtcctctgctcagagcagtgctgggttcagtaacaggcagggaaactgagcagaggagagaccagccaagaccctctgtggtgggaggcaggtctcccacacacctgctacctgggcaactaggcccctgcctgtcctacggccctggtgtggcccccagggtctggccctcagaggtggagggaccagtttttgggaaatccatggtcacagtgtgtctgatgaccccaagctgagcttggggaagctgaggtggatgacagtcagccctgctctcccaccccaagtttgctcccccagcttggctttttggcatctctgcctggggccacgccctggcaggtgcactgctgtgtggagaagtaagctccaggtcttggagactggtcagaggctgtggcaccaagggaaagggcattttgtggtggccaagggcttgctgcctggtgagagatgccagcctggcttgtcctggactctacctgggagggccataatggggatggagaagattcattcattcatccatcggacagcagccacctcctgccctctgggagcctggcctgcaggtgtgggatccaggtgtgcaatctcaccttaactcattctctgtgtgtgctagccaggccttggacaggggaggggcctgcccctgcagtctgttcttcaggacacagaccgtggtgcatctgtgaagtccggtggtttgggtagataagtaatatgggaccagggcccagccacctgtgccccagcatccctctgtgtgttggtccaatcttgcttttctgctccctgtgttccttgcattttgccacaaaagtgagactgatgctacccagcacgtcccacgaccccagccccctctgtccttctcacctccttgtgaagaagctgagccgaaggtgcgtgatggggccc

SEQ ID NO: 40448 - DNA, 1747 bp, Artificial sequence
  DNA replication origin
caccgccacccgcccggccctggccccagcctgacgcagcccagccaggggcgcaagacaatagctgcctcgggccagcggctccgcggaacaaaagcgggtcctcccgggcaggccgacgccccgccctctgcctccgaccccgggccagggtccccccaagccaacttccctccaacctgtctgagttcggccggcatcgggccgggactcggggggcgctggccagcagcgggggaggcggtggctggaccaggctcggctccggcgcctcggccgctcgggctcaggctcggcggactcgctccccgcgggggcggatctggcggcggtcacggcgagcagccaatcgggcggggccgcgcccaggtggggcgtggcgggggccggggtgggcgtggcgggcggggggcgggcaatgtgaggtcccgccccccagagacagggggcggggccctgcagccccgggtcgccccctgtccccccacttcccaccacctccccccacccactgccggcctggacttctgctccctccccctccctgcggcaggggtgtcactttcccgccgaaagactttggccaagtccttcccaggcctcggtttggcctcggtttatgaccacacttcagtccgcctgcaaagggggaaacagttccggcagggcaggtgcccgtgctgcgatgcacagagcacaaggcctccctcactggcacaaacctggctgcgactcagtttcacctgccatgaaatgggggccgatgagacagtagtcacggctctgtgagatctctccagtctcccagatcccccctcaccctcctgcccagccgccactctgaatgggcctgcgaagaactgtccccacagagttcgatggggacctggaaaagggccctgcaggggacccccactttgtatcttgggttctccccatcgaggcacagaagccccgaatgcacccccactgctcccccaggccagcctcaatgtgggccacaccctagggaatctagttctgctgcagtgaaaaatgggaggggaagggccaggctggagccaccttcttatgtcaaaccccacaaaggccaagccaatggctccagcatcacgaacagggaaacaggttctgagattaaatgagctgagaccaacccagggagactcagtgggtctggcaagagaaagggctcgggcccaggcctcccactggcttctccgcagacccctcagaaaacagcctccgcagggaccactccctgctgccctgagcgccatatacagaggccactcggctagcatgctcaagattctaggtacccaccatgtgcccctctgagcctcagttcccccacctgcagaggggtgagctaccctaccactggctggacccctgtatcttgcatctagggccaacctgcctggaacccctggagcagagcgcagaagaccagacactgcgccaaaaacgcgcccgcatcttatctttaagctggctccatcttctcaactgcaccagcagctagtgccccagccacctatccacctaagacgagcccaaggcaagttccctgatggcacccctccccactgggtgggcgtcagccctgtttcagctggctgtctagaggaggggccccttcctgctggaagatgaagggcaggtagccaggaccctggagcagcccagtgagtgcagcagcactccccctagcctggttccccagcctcagcccccagctacc

SEQ ID NO: 40449 - DNA, 1472 bp, Artificial sequence
  DNA replication origin
atggatgggggatggtggggaatggacagatggatgaatgaatgggtcggggggatgctgaaggatgaacttatagatgaatgaatggatgggtgggtggagggatggtgggagatagacatacagatgaatggatggatgggtgggtggggggatggtggaggatgaacaaataaatgaatggatggatgggtgggtcgggggatagtggaggaagaacatatagatgaatggatggatgggtgggtggggggatggtggaggatgaacatatagatgaatggatggatgggtgggtggggggatggtggaggatgaacaaacagatgaatggatggatgggtgggtggggggatggtggaggatgaacatatggatgaatggatggatgggtgggtggggggatggtggaggatgaacatatggatgaatggatggatgggtgggtgggggatggtggaggatgaacatatggatgaatggatggatgggtgggtaggtgggggggaatgatgggagatggacatatagatgaatggatggatgggtgggtcgggggatggtgggagatgaagatatagatgaatggatggatgggtgggtaggaggatggtaggcgatggacagagagaaaaacagacgcatagatgggatggtgggggatggatggatgaacgtatggatggatggggggggatggtggaggatggacagacggatggacagattggggaatgaggggtatggacagacagacgggtgaatggatagggaggtggatgaagtcatagaagggtagacagctagatggatgattggatgggtttacagatgaatggatggatgagtaatagatttgtgggtgggtggctggagggatgggagaagaggaggccagatagaagggggtgtaactgagtgagtgaacaagtgtgtggacaggagactaataggtggttatataagaaaatgaggggagatgagaggatgggtgaatggtggctagttggatgggaaggtggctggatggatacgggtggtggtagagggataaaatgatgatggaagaatgtgtaggagggtgggcagatgggatgctgaaggctgggtggatggaggagtggatgaaggagaaaacagagtgcgatgcatgaatggaagggggggtgggctgtgtaagggccggtgggcaggaaggaaatgctggaacctcactaagtggggaaagccccggcccgcaaaccctctggggcaaaccatggtcagcacacactgtcaggaacacgaaggcatggtgaggaacctgagggtagaagctaaatcctttccctgaaaccaaagctgacatttgacgacatcttgccaacccagacattcctcctcgggagtgcggccagagccttgtccggaaaatgaaattatggggcccgagtccagtgtgggttgaggaattagaggaatttccgaagggt

SEQ ID NO: 40450 - DNA, 1393 bp, Artificial sequence
  DNA replication origin
gaacagacacctccccatgactaagccaccatcagggaagtccccaggacccccaaggcccagctggtgctctgcagtgctgtccctggacccccaccctccattcctggccctgtctacagaatgggccctgactccctatcccagctctaccctgtcactccctctgccagggccaggcggggagcacgacagatgggctggacagagggtggtgcctggcatccgtgtgcagagctccctgctccacccagagaccggggatcctgctgctcctgcaccttctgtccttactcaggacagcctcatgctcccccaggccagactcctggggtgaaggagcacagggaactcaccctgaatccctgtgtagcacaaacagaaggaggggtgctaccctaccctcacagagccacagagatgcagagggccccgggactggggggagactacagggccacctctggagggagtgccagagcaaacatgggagccaagcagcccagatgtggtgggtggggagactcaaatttagcaggattgagggtcagaacttgttctcccaggaggaaccttggtcagaaggtccttgtgtttatgctgaaaagcctgacagggcagctcagccaagagctgggcaggggctggcttggctgtgctcaactaccctctcagctgggacttgagtcccttagcgaatgttctgtgcccagtcctctgctgggcgctggtggaccccagaatgggggtagggtggggacaggggacagctgggagcagacattgcggataggatggggcaagactgggggaaatgccttcccagacacgctgcggctcacactgtcgcctgatctaaggcctggatcacctgcttaggagctgaccggccactggcatggcacaccgggcaagagagcgctgactgcccccctgcattcagcaccatcccagctccaatagagtgagtacaagataggtaacacctgccttgtttggaccagacctctaaacaccgcccagatcccagagtaaaggcagataaggcagtagttaagaagtaggaagaagtaaaggcagctaccccagagaagctaaggtcgggagaggtggaggctcccactgcacccccctggcccataccataggggaggtttcccccacagcagcctgggtactcacctgaggttattagacagcagcattaagagcctactctaaaaaatacccacggggcacctttcttttccttatttctaaatatgcctggatgtagggaaagggagctgaagtcctttagttccattttaagtatgttacattacacatagctaagaaacggtgaaatattgtaagcagccaatatttaattatttaaaaattaaaataggct

SEQ ID NO: 40451 - DNA, 1423 bp, Artificial sequence
  DNA replication origin
ggctccagcagaaccagggtccaatggccttgaagagatggctggggacagctggactcattacgtctactcctaaatggaggaaacgacccctcagctacacagcacctgagccagaatgtcaccatggtgctgctccacaggatgacagctacctggtttgtgagggcccctattctagggacagctacttcattctgccctcccagagcagcaagcaacaaccctatgccaggaggccaattggcacgtcaagtgccagctccaatcgattgatagtagctgcctggctctgaaaggcagctgggatcgattcaccatgctgccagcacacagatggacccagcggtggtcccagcagtgagttcttgccttgggccatttcattttctttgtcctggccaaggaatgattggatgaacacactggactcccaatatgggtggataagacaagagtgtctggtcacacccctccaccactcataagcatggttgtgggcagtttggttccccaggcggccttggagaatgcaatgagccgaggaactggtcatctccaggtgcatccagggcaggaaaggatgacagcatgcgtgagccagggtcactggctaagaagtcatctcaggacctccccctagaaaagcccactgggcagcatccctgctggttcccccctacaccacaaggttacgcagagctggcggagggtcatggtcccactcatgtcaggtgctcttaatctggcaaggaaatgtaacctacgtgaatctcaacaggcagtgaagcaccgtttcttcctgactccaggtagggtgaagaaaatgggacagtagtacggggtgcgggcataaacgcacaactctgcctccccagacgcagagctgtggggctgtgagaatgccaggaggaggtaagaaagggcggccccatggggggcctgcagggtgggacaagcccaagaggtctctacatccaggcctggtgggggaggtgagcccctggtttaccgagggggtcccttcctgccctcggaaatactgcagctcctacctccatcgtctccccgctgcggggacccaggggcgtgaggatgagagagcccccaggccccagggtcagacgactgtgttcaagcaagtgagaacctctctgaggctgtttcccaactgtaaaatggggatagcagcagaactctctctcgcggcttgcgtgaagaatacaattcgatgtcgacaggagggagcggcgcgcagcgcgcagcgagtagcaggcgctgaagaaggatacctgtgaactgggagtggtggcggaggctacgcggccagagtccggggaaggggcgccggctctgccagtccctgctcggggctggatggtcgggggatgttctcgtaagtcggctgggagggagcggtccc

SEQ ID NO: 40452 - DNA, 2071 bp, Artificial sequence
  DNA replication origin
ccattaggctgcagccaggggtcagaaacacaacaagggaggctgggcgcagtggctcatgcctgtaatcccagcactttgggaggccaaggcaggcaaatcaccagaggtcaggagttcgagaccagcctggccaacatagcaaaaccccatctctactaaaagaatacaaaaaaaagtagcggggcatggtggtagacgcccatagtcccagctacttgggaggctgaggcaggagatcgcttgaacctgggaggcggaggttgcagtgagctgaaattgcaccaccgcacggcagcctaggagacagagcgagactccatctcaaaaaaaaggaaaaaagaaaaagataagaaaaacacagcaagggagaccacagggaccagtagcccagtgttctccctctctcatcctctcacctagctccatgcggacagctgtgaggcccccggagaaagccacagagagaaaatgctttcagctgggtgtcaagaacttttcaagagtggcagctgttgaaatcaaaagagtggccacagaaggtagtgagcttcctatctgagtttgtgtgcaattagaggttggatgccagtgagcctgttgcagccccaagatcccagggcttaggtgcccatcctagacccatttcatctgccgtcacctgcttcctggcatcgcatgtcatccagactggagtgtcagtggtgacaaagaagatcagagtgtctgctctggctctgtctagctgggaaaagtatggctgggggtggggatggcccaaggccacaaggtatgacagaacaggatgcaaaccaccatctgacatgttactgcatccctctttgtgggcaaagggaaaccttggtcaactcatgtccagctttgaggtgcatggcctggtgctttggggaagcccattctccaggtgctgccatgaaccccagggcacagtccatcacccccaagccccagatcccacttgtccaccaccaccacctcttggccctatagattgcataggtttggctgctcagagggaaatcactggtaccagccccacatgatcccactgctggatggtgggagagacaaccatgtctggctgggtctgcggcccgctggccatgagtccctgggcatctggagtccttgtaaaaggttctgttgggttccaggggaaacacagataagatagcaaaagtgtggagcacaacgggcccgcatgtaggtccaggttagactcttgccgttgctgattaccagccaggctcttcccatccctgagccccagttttctgcagggcatcagggcacctaggtcttcaacacaggttgaagctaatgtggcctctcttgcttgccacctttttcaacttcaactgaatgacataactgctccaagtctcagtgtttacatctataaagtgggatgaaagaactgctgacccagacattgggtttagagtgctttacacattatcattatccctaatgtctttgtcatccatgtcatagttttttgaatgctcactttgaggcagggcctgagcctctgggctttgactctccacctttctgccacataggcccaggcacagcccagaggctacaggagcagcggtcccagctaatgcctctgtcctgttgggagggccccagtcagtgcccacctgctcaccctgcacaagtcaagctgggccagcccctcgtcgctggggcctggacctggatgtgagctcaaaggctacactggggggtggaagtgggggaggtggtgggtgtgcagggtatagtgctcaaatgcctagtccagggtctgggggtacatactgggaatggcagggacatcagggaggaaagagccgacctggaggccataaagtgaaggaagggatgaccaagaggaagatggccaggtccagaggtggggttgagtgaacaggatggggagaccaggacgcagtctgagggggccagtccggaagtgagcattcctgtacctcttccgagagaggccgcagggtgagcaggtgacagatggtgtccatgagggcatggactcaggggcggc

SEQ ID NO: 40453 - DNA, 1252 bp, Artificial sequence
  DNA replication origin
ccaggacgcagtctgagggggccagtccggaagtgagcattcctgtacctcttccgagagaggccgcagggtgagcaggtgacagatggtgtccatgagggcatggactcaggggcggctgcgacctcccatggcgtccctgcaggcagggagccgcggagtccccgaaggccgctggatcaggaagcgctcagacgcccgcgcagcccgaagctttggcgcagccccgggggcggggcgccaggaggtggcagcctccgagcgacagcgcgcccagccaacgggacgccggcatgcggcgcgccgccccgcccctcgctgcgcggcccaatggtgaacgcgccggcttcgggctgggcggtactgggctggctgcggtggcgcgcgggcgcggcacccggaagtcggcggcggtggcggaggcggtgagtgcgcggctccggggctggccgactccgctagtggcccggccggcctgggctcgggggctccgggctctgggctctgggtgcgcggaccgggccaggctgcttgaaggtgggtgggctggccgcacttcctcaccctgcctcagtttcccctttctgaggtatggtatagaatcaggcggctgggtcaggggcaaccacgtcgatcccggccgacgaaaatgccccgcgcgttactggaaggtgtttttgataatccccgctggcacgggatgcgagggactctggcaggtgggaccagactcgctgcggggaggctgagatcggcagggttgggagctgcgtggtccctgcagggtgtgtgggctgctcggccttggccagcatcagggacagctctggcgcccggtcactctgccccctacccgcggcctgctgcgggccagcagggtgacagctaatgtgggtgtgagtagatagtaagtgctgggtcatccctgcgcctggatgcggccttcctggggaggtttgggtagttagatcccccacccccaactccagagcgtcagaggtaggggctggcagggctgcactcagggcagtccttgccccaccgctgggctttgtagcagcctgggctttgcccgttttcctctaggaagtgggcacagagggctgtttgctgagacccccaccttccctgcccctagcacctctcctgtgctcccttggcttcctgctggaccacaagctttagagtgaaccgtctgcccttggacaagtccctgggcctcaggcccccttcctcttcaggaatgtcacat

SEQ ID NO: 40454 - DNA, 968 bp, Artificial sequence
  DNA replication origin
tgttttcacggagcccatcctcatggtagggataggcttgttttcaagacagcccaagccctatggtaggggccaacaaaggccaggctctgccatgctgctgccatgtgctgactgacacgtcaccaaaggatgggccctgcttctcatgcatctggagtgtcaatgacaagcatggccctacttcgagaagtcttcccagcctccctatcccgggccatttctctccagaccccttctggggtccctgagaagcccctcatatccctgtgggtgttttcagaagcagcacccttgggtgggcaccggggtgccctccaagttcgccgtctggcgcagaagccgggcacaggatcaagttcccaggacactgcacgtgattccacacactgcaaaacgtaatcagaatgacagcccacaagtgaagaccaaggaagcacaagaggctgggcagcccaggaagagctgacagctggtcaccttagctcagggaagggctatggccaccacacatcacagcaggcaggggcttggtctgaggggcctgcagtctgaggacatgcaagtaacacaaagctgtgtaggggtcaaagggggtgggggcaccagggcaccctaccctggaccaccagagcactaggatcctgtgggaacagaggctctgctgtgtccatctaacaacatggtcaccctctccagctgctcccagcccacccaacacagacgcaggacacagacacagggacactcctaagagagtggcccaggagtagtagaggcactgggagcaggccctggctctgaatgaccttgggaacacgatctgccaccttagcctgagttttccttgtatgagcaggactggatcaatgaatgcttgccccaaaaggctgcccagaggcaaatgagctagcgtgagaaagccttccaaagagctactcagctacccccttatagctgccgtcaca

SEQ ID NO: 40455 - DNA, 979 bp, Artificial sequence
  DNA replication origin
ccattcatgcgattggagcctagtgctgcccctcagccttgacgctggcccaagtggaaggatgtgttctgcagggcatctgttgggataggtgtggttggtgtcatagttgtcctgcaggacagggatctcacttgcacgacccatgaaccccaggggctgcctggccttgaagagttccagccacgattccatagctggggctgctgggccaagccgcatgtcgaacgtcctcgaggagcttgaggcaggagctgggccgagtatgcgtctcccagggctgggaaccaggtgggggactggaatgggtggcatcaatggtggtaacactgtcatctgccacagggctggacatggaggaaggcaaggaaggaggcacatggctgggcatcagcacacgtggcaagctggcagcactcaccaactacctgcagccgcagctggactggcaggcccgagggcgaggtaaggcgagtggggtggggccaaggtgagacagggtggggtggggcaggcctaggtgagacaaggtggggccaagggactacaggactggccaatgtatggtggagtggggcgggccaaggtaggaagtgccaaggtgcttgtgcttgggagtgggatggggcagggctgaggtaccgtggggcagggccaggttacagagtgggcggtgacaaagcgtggcagggcagggcccaggtaagggtggggacaagaagggggaagctgggccccgtggcaggtgggtggcttccgtgggcatatcactgccgccactgaggtgtgctgcaggggtatgcggcagagacaggaagagtgaggaggggagcatcccatttcccacaccctggccctctggcgtcgcagccaggagcccactcccacctgacccacgcagcactgtttactcctctcagggcgcactctccccttgtcctcatgcatggcactcctgactgctgtgtcactgtcccct

SEQ ID NO: 40456 - DNA, 1076 bp, Artificial sequence
  DNA replication origin
ccgggctccgcgcccccgccccgcccgcggcctcggtcccggagggaggcgggagggaagggcgcgccctcgcgcaggccgcggcgcccgcccaaccgcccgcgggcgcccctcgcgccccgcacctacctgaggcgcccgcgggctgcccaagccgcccgcagccaaaccacagccgggaaagcctcaccgaccgaccgccgcagccatctggaaagcctgtccaggctctccggtcgccggcacccgcctgccgcgccgggcgagcggagggcgggccttcgcggcgtgcggccaatccccgcgcgcggccgccccgcattgggggagccgcagagcgcgctgcggaggccgccaatcggcggcgcgtagcgcgtgtgtccgccgcgcgcggcccaatagcgcggccgcgcgggagggaccaggcgcccaggccgcggtcgcgctaacagtcgctgcccaggcggggctcgctggactgagggcggcggccgcgaggagcgccgggaacgggaagcaccgggaatgccgggagcaggggagcgcgggaagctcggggagcgcggggaatgccgggaacagggagcgcggagtacgccgggagcggacacgcagacgggccaccttcggtggacactgcagaagagaccgtgcacacacaggcgttacacaaccctgttaaaagcatcactgtatcagacatcatcatttataaagaacgcgtgtgctcaactgtctggcgctgtcccctttgctaatacaggatttccaaaacagggagggttcggccgggcacggtggttcggccgggcacggtggcttgcgcctgtaatcccagagttttgggaggtcgagtcaggaggattacttgagcccaggagttcgagaccagcctggctaacatagtgagagcccagtatctacaaattttctttctttttttttttttttttgaggcggtgtctcgctttgtctcccaggctggggtgcagtggcgcgatctcagctcactgcaacctttgcctcccggattcaagcgattctcctggctcacccacccgagtaactgggattac

SEQ ID NO: 40457 - DNA, 977 bp, Artificial sequence
  DNA replication origin
cgccgattggcggcctccgcagcgcgctctgcggctcccccaatgcggggcggccgcgcgcggggattggccgcacgccgcgaaggcccgccctccgctcgcccggcgcggcaggcgggtgccggcgaccggagagcctggacaggctttccagatggctgcggcggtcggtcggtgaggctttcccggctgtggtttggctgcgggcggcttgggcagcccgcgggcgcctcaggtaggtgcggggcgcgaggggcgcccgcgggcggttgggcgggcgccgcggcctgcgcgagggcgcgcccttccctcccgcctccctccgggaccgaggccgcgggcggggcgggggcgcggagcccggcctttgtgaggcaacatggccgcgggcggtggagagcgcggggtggggacgcctccggggctggggggcgggccccgggcccaggcgttgccgactctcgtcgctgtccgcccgggtaaagaggctcctctcccggagggcccgaagcctagcatcgccttcaggcgggaaaggtgtggacagggccagtgctcgcctgggaccctgccggctttaacacagtttgggaaatccaagaagtcgcctaagtctttttgtccacagaatgctcacgggttgagtgtcacgtagataattgggatacggttttattgtaacaatgagcatggcggaaataaatggaaggtggcaacctgttgacagtgatgcctgtctggtgtcaaccgatggacttgggtttcttgtggcaggagtctgatttgcctttttgcatgcttgcatgtaccttgttcctgcacggcagtcctgtctttggctgtcgactgttcgaggccaaccaccaggcgaggatccactgtttcctggccagactagactcccagctgtgggagtggcccaaaccctgctgcaggccttcactcacaaaagggagtgaatggccagcccggggtac

SEQ ID NO: 40458 - DNA, 1279 bp, Artificial sequence
  DNA replication origin
tgtggacagggccagtgctcgcctgggaccctgccggctttaacacagtttgggaaatccaagaagtcgcctaagtctttttgtccacagaatgctcacgggttgagtgtcacgtagataattgggatacggttttattgtaacaatgagcatggcggaaataaatggaaggtggcaacctgttgacagtgatgcctgtctggtgtcaaccgatggacttgggtttcttgtggcaggagtctgatttgcctttttgcatgcttgcatgtaccttgttcctgcacggcagtcctgtctttggctgtcgactgttcgaggccaaccaccaggcgaggatccactgtttcctggccagactagactcccagctgtgggagtggcccaaaccctgctgcaggccttcactcacaaaagggagtgaatggccagcccggggtacccagtgttgcctctaagtgcgggatatgaggcctgttggaggatgacaaaaggaacggatgaggtcatactgccgctgggttgggcgggaggctgcagcgggagagacttgaccaaaaggcagcctccatggcgctggcactggtgctggcccgtcacagccagtgcctctgttagccaacacagcaagtgggctaggaggaagggtgctgtccaagtgtacgggttttctccccgtgccaagggtccaggggagcttgccgtgagcccgttcctgtccgatagtcctgttggcaaggcagggtttgcatgcggtgtttggtcagctggagcagtggggaggcctacgggcagagagctcccctttgagccctttgcggccaggcgctgtgtggagcacttcccaggggttgttttgtagtctcaccgtgaccttggggtaggaaatgtgcttctggctggcttgcccagtcttagactctcttgttgtagccctctcctttgtgatgtcacccagcctcctgactttaatgccagctttccttgacatcttcacagctccagccctggcctctcttctgatttccagcctggtgtttctggccacctcttccatatctccatgtgttactttggcgccaagtagccatatccaaaccaaactcaaatcttcacccatgccaaaacattccttggcctatctaaagtccctttgattcctctctttcttacaccttcatgcagtcctaaggaggccccgtcagctcacctatttctaagcacagaccatttctcaccaccttcaagttaacatcctggcccagcctacctggtgagcctc

SEQ ID NO: 40459 - DNA, 1489 bp, Artificial sequence
  DNA replication origin
cggtgtgggagcagagggtggtgatcctgccccgggaattctggagtgcctgccatttcagccagatgaaggaaggtgtggccagaggagagagcagggggactgcttgcccagttgtgggcacttgggccagctcgtgattcccacaggtccactccatactcggcatacgacccagagacgtacacaggccactggaagcagctgactgtgcgcaccagccgccgccaccaggccatggccattgcctacttccacccccaggtctcaacgggggccctgctgggggagggtgcctagcctaggtgggcctcagcacagcctgatgggaacttttcaccacttactccagaagctgagccctgaggagctggcagagctgaagacctccctagcgcagcacttcacagcagggccaggcagggccagtggagtgacctgcctctacttcgtggaggagggacagcggtaaggagcccgagtggggcggggcaggtccctgcagggactgtgacactgaaggacctgcaccttcgcccacagaaagactcctagccaggagggcctgcccctggagcatgtggctggggaccggtgcatccacgaggacctgctagggctgaccttccggatctctccacacgccttcttccaggtagccatgagtccctggtgggcatggggacatgttgagggaggcctgacgcaccatcaggacgtgatgggaacagtgggctcaggcggtgagatttgggggagtatccaggcaggtgagccacaggggagggtgaagtaagaaagaggttggtcatcactgatttgactcgggataacctagaggtacacacggcagtggcccttgtcacagggaggatgaggagtggccctcagtgcattaccacagggcactgctctgggctcggcaggagggaggccatggtggcctctgggctgggaaatactgtttcactgtttgctcactgctgcaggaaggctgtggggacctggagcggccgtttttggagacaggcctggcaggacctcctggagggctaggtgtgggggtgggagctgcagttgggtgattccaggggccccggtgtgagttgtgggaggcaaagcccccttgctggggcagggaaggtacagcctattggcctgcggggcctcatgagccctcaaccaagtggggcaaggaggaggctgtgcttagcacgggcttggcttttaaagccaggggctggatgagggcatcagcaaggctggtccaaggtggggtcagggaagacgttgggcaccaaggtggggagtgggcgccggaggtcccggcaggatggagggaccaggaatgtgggcgtcggggcaccagtggcaccacaggagaggagccactgacatcctgggcaccgcctgcccccaggtgaacacacccgcagccgaggtgctctacacagtcatccaggactgggcccaattggatgcggggagc

SEQ ID NO: 40460 - DNA, 1287 bp, Artificial sequence
  DNA replication origin
cccgctcttccctccgccccacgacccgaacctcgacccctgaccccagcggcgggaaacgcgccgcgattcaaaaccagtacagctttattggctcaggaggcggacactctcattgtccggcccgccccgcgcttcccgccaaaacgcccgcggcgcatgcccggcccgcccgtcagccagaggagcgcgcactcccggcgacacccgcgcgcacttccgtcccggccacgcgcgcctctagagctggctaaagtggttgggggttggatccggcgcgtgacgatgacgttgccagaagccaggatcatagagacgctcggcctccgccgcacgcgctggcggactaagagtggctggcgaagcgagcggccggcgcgggcccctggcgggcgggcggtacagccccaagcctgagacccggacctgagcatcgcaggttcgagtcccgccccgcctggggcgaagccgggggtggcggcgacctcgcggcgttgcaccggctctgtgagcacctcccctctgagcacttcccttgtgacaggccacttcccttgtgacaggcccaggacgaggtggccaggcggcccccatggcgtccctggtctaggcggagaaccgcctgggcgatgagtgagaacctcgacaacgaggtagagtgcggggagacgctgggtagagacggggatggggtgggaggaggcggggtgggtcaggaaacctgccagagaataggtggggacgaggcaggtgcgataggggaggaaaggagacgggaatggggtcgggagggtagactgggggaggggcagggctgagtgcagagtgcaccgacggaggtctgggtgtcccataaggaagcttggggggccaggcccccagggcctagtcctcaccctagcaccccatctgtccccacacagggcccgaagcccatggagagctgtggccaggagagcagcagtgccctgagctgccctaccgtctcggtgccccctgcagccccggcagccctggaggaggtggagaaagagggcgctggggcggctacagggccggggcctcagcccgggctctacagctacatcagggatgacttgtttacctctgagatctttaaactggagctgcagaacgtgcctcgccacgccagcttcagcgacgtccggcgcttcctgggccgctttggtctgcagccccacaaaaccaaactctttgggcaaccaccctgcgcctttgtgacattccgcagcgctgcagagagggacaaggccctgcgcgttttgc

SEQ ID NO: 40461 - DNA, 1133 bp, Artificial sequence
  DNA replication origin
gaagtgcgcgcgggtgtcgccgggagtgcgcgctcctctggctgacgggcgggccgggcatgcgccgcgggcgttttggcgggaagcgcggggcgggccggacaatgagagtgtccgcctcctgagccaataaagctgtactggttttgaatcgcggcgcgtttcccgccgctggggtcaggggtcgaggttcgggtcgtggggcggagggaagagcgggcgggcgggaggcgccggcgccagacgcggagggaaggagctacgagtagccgccgagaggccgcggagccagcgacgaccgacccagccgagccgccgccgccgccgcgcccccatggcggccgccaaggtgccgccgggcccaagcggggacagggtgggcgggcggggccggggccgttatcagcggccacgtgggcggcccgcgccgccgccaccaacctccgccggcctgcaggctcggccgtctgctgggcctcggtggcgcggagtcggggcgcgtggggtttgggggctcgaggcctgcggagttggggcgtttgggggtgcaggctctgcagaggcctgggggctgcagggcccccgcgtgaccttggggtgggttggggagcggccgtcgccacgcgggacggccccagcctccaggaactggtgcgggcggcgggtttcctccggctcggcccacttggggctccccactagtacggtgcatttattctttccgtcgcccacgcagcacttcattcattcggttcttacgtctggaaccgccactggcctctgtggcagaagctcgcgttccagcgtggggcacaggtcctagatgcgccgacccaggcggcggctttgttggctgcggtgtctggttgagtgcgggccgctgcagagccgcagtgctgtggggaacagtgaagagcagcgaaaagcttatgttttcttttccagtttgagtctagtggtgaagtcttgggtctcttacggacttctgggtgaccaaggcatgtgttctggaagactcgaacctaaaatatgattattggtgctctcttatcctctaaattgggccaggatttcatgactttcaccggtacaatttatctagttattaacttagttttctgaactgtgaaaaa

SEQ ID NO: 40462 - DNA, 2415 bp, Artificial sequence
  DNA replication origin
atgtgggctgcaggtctgcactcttaacctcacggcttttcttgcaggcgggcaaaactgttccgatttgcctctgagaacgatctcccagaatggaaggagcgaggcactggtgacgtcaagctcctgaagcacaaggagaaaggggccatccgcctcctcatgcggagggacaagaccctgaagatctgtgccaaccactacagtaggtggcatgaacgaccacctcgacagtccccagcagcttggcctgggacctttgggaagattcagggctgattgggaactggggagcgtgttatttcatggagtgcaagtttgtggtgtgtttgttgaatttaaaaccagaaatacgtttttcagacgtgcctctgaactcagagcaggcccgcagcgaagcttagagcacacgggggtgtggagtcagccagacgggccctgatgggaggacgcagcgcccaggctgggctcgggacgaggagtgagtgctgcagggcgagggggtgctgtgtgtgtgtgtgtgtgtgtgtgtgtgtgtgtgtgtgtggtgtctggggggtgggggttggtgtctggggggggttaatggggggtatgtgtagtatctagggggctgtggtgtctactggtggtggtgtataggggtgtgtggttcggtgtgtgtggtgtctggggcagggggctgtgtggtgtctgaaggtgtgtggtgtctggggcgggggttgtgtggttgggtgtggtgtttgggggtgtgtagttggtctggtgtctggggggtgtggtggggtatgtggttgggtgtggtgtctggcgggggtggttgggggtgtgtggttgggggtctggtgtctgggtgtttggtgtttggggtgtgtatgtggtgtctgggggtgtgtgtagtgtctgaaggtgtgtggtctggggggctgtgtggtgtctgaaggtgtgtcggggcatgtgtggtgtctgaaggtgtgtggtgtctggggaggtgtacagtgtgtggtgtctggggggcgggtgtggtatccggggtgtgtgtaggggtcatctggtgtttggtgtctaggggggtttgtggtgtctaaggggtgtggttgggtgtgtgtggtgtctgggggtgttggggtgtgtggtgtctgggggtgttggggtgtgtggtgtctgggggtgttggggtgtgtgttgtctgggggtgttggggtgtgtggtgttggggggggtgtgtggtgtctgggggggtttggtgtctgagggggtgcggtatcgcggtgggggtgtgtgtgagagagattgggggtgttcgggcagtgtaagagcagatgtgtgaggtgcccaggcaccagcctccccagttatggtgtgttctaccctcaccaggatcttcctggggaggaaacgggaggggaacggggctgagaaggtggccaggtcctgggcgcctctgaagctacataagtagaggcccttgggcaggttcagccaagagctccagccaccctgtgaggggtccagcctggcctgcaaagaagtggcagtaggttgtcctgagtatggctggctgccagctgtctttagattgaacctgcactgcccagcttgttggcatgtttggaagtacacttgtcctggggtgtcccttggtaagcttcctagtgtcgtttgctgagtgtcatgcgtgtccggcggggcagggtccctcatcccaggtgcaggatgactgctggcaggagcctgagtggctcagcccttgagggcgatgcagaggggtgggtggtggtctgcctatgccatgggcacctcactgcacggcctggcctgccagacttccttgggaactggctcctgggttcccctccctccctgctcagcatgtctagtcctggggaagcttgcactctggctggtcctcctcctcgagccgtttgaatcatttccttgggggtcttccctgatgccctgtgctgctcccagagcctgggtcaggttgtgggttgttgtgtgtgcatcataagttggttctgggctcctgggcatctgggcagagccatctgtgtagccagcagtgtcttgtgcccatcatgggcccttggtagacagggaaagtggcagtgggtagaggctggcttctgggtaaggtgtcgaagaggctgtgggctgggtcggggcggggtgtgaagggggcatgcagggggcttggcatccgctgtggcaggctgcagtagacgagacccccccccagctcccagttcagatagtgacgtgtaggggtatcctgggggtgcatgtggcctggactgggcatgggcacctgggatggtctgggttctcagggagctgttctgaagagtggtcacctgcagggccatctccccttggggctgcctgtgcctggggagttggggtggaggcgtc

SEQ ID NO: 40463 - DNA, 2174 bp, Artificial sequence
  DNA replication origin
acccctgcggcccgggtggtgggcaccacggcgaaggccaggcccccctggtcccgggccgcggagccgtgcaggtggcctcgggggcgtctgtgggcgcagccctttccctaacgacccctctggtctgaagccccttggaattcacgagggggcgcgggtgtgacaccgcagcggcgtcgtggctgtttgccttctgaccgcctcgcagccctccctcgggccactgggctggaggagcccggccagcgggcgccgggccctccacgtcctggcccgagctgcaggcttgagagacggtcggctggagcccccatcctccccgaggcggggccctttgggaagcccggcgccccggccctgcccgataggcccggcgcgtctcctcccgcaggaaatcccacccgccccgccgccgcttaaggtggaccgggccggggccgacggcgctgtgggcggggtggggcggggcctcgtgtgggtcccccccccagacacacacacgccggcagaggaggcggtgccagcgggagaccctcagtcaagctccggagcgtccccagtgagggtcattgtcctcggccacgccaacatgccccgagcgtcccctgttctgaagcccagacccattagacccctccctaggtggagatctgtggggggacctcacccatcgcccccagccctgagtgtctgctcctctgcaaccagaaccccgagcggccctaccctgcggcacaggcatgaggctccttggcctgcaggcccctgctcccctggggaagcacccggccgcagctcctcagggtgggcaggccagggttgtggctattggaaggaggaacccaggactggggccgggacccagcccttaatgcaactaactactgcacagcagaaatggtgatgggctttctcccaggcagccgtagtggtaagctctgttctcagggtgccctgctccaggaggtgcagcctggagcgctcccaagcactgatggtagctctgaggcagtggaggggtctcagggcacaatggtgagcctagagcagacaccactggagcagatggctcgttacctgggctctgcagtggccacaagtgagcctctcagttggcaacacacctgccacctggtgcccatctccagccttgcccttgctcctaccttcccccatgaagtgcctcctctagtggcacatgccacagagcccctcaggatccaggtctgactccatgcccatgctctgtgcagggtgccaggactgtcaccttcctccaccagctgaaccctggagtaaactgccaaatgctgacagtgggaagaagcggaatcaggcctacttggtgagatcccttttcccttgagtttttaacacagggtttcactctgccacccaggctggagtgcagtggtgcaatcatggctcactgaagcctcaacctccagggttcaagtgatcctcctgcctcagcttcccaagtagctgggaccacagacgtgcaccaccatgccaggctattttttttatatttttttgtagagatagggtctctcactatgttgcccaagctggccttgaactcctggcctgaagtgatcctcccacgtttgcctcccaaagtgctggggtgacaggtgtcaaccattgcatctggccttgggatcccttttccttaacacagaggcctgggcagaggggtcccaagtagtgcagacccactactggagacagagaaccaagcgaggttggcaccggcctccccacccaacatggctgccaagcccatggcctagtttcctcctcaagaagagctaagatcccagggaaaaggaaaatgaagcagaaagcaggaggctccccagcctgcagcccggcagacagacatgggatggaaggctgaagcacactgcattctcacacagtccccagcaccggcaggaccccattctgctcaccattgtctgccaaagggaagccaatggaaacacactgggctggacggctggcccgagtgcccacatgggcgtccttgtatagcctaccctgtggtcccgtggggccagcacgcggacgcattctgtctcccagcacagctcccttcccgcagcaccatcgcatcctgcagtgtcaacaagctgcatcctcaaatgcaccctgcaacacagccc

SEQ ID NO: 40464 - DNA, 1907 bp, Artificial sequence
  DNA replication origin
taagagcgcagcagccgccgccgcccgtggggtgggatttcctccgccgccgccgccgccgccgccgcgggtcctgcgccgcgtccagcccgcccgcccgaccccggcccgaccccggccggccctgcccgcccggccccggggagggatgcggcggcgcggcgcccaggatgccccgcagccccgggacgcgcctcaaacccgccaagtacatcccggtggccacggccgccgcgctgctggtcggctccagcaccctcttcttcgtgttcacgtgagtcggcgccgcgtctgggggcacgcgggcagcgatgggcagggcccgcacagcccgggcacgggggcagcggtcgcgggggctggcggggccccgggcagtgggcgggcggggcgccggctgcaggcgatggcagtccctctccacccgctggggctgggggagttgaagcggtgtgccggcgtcccgggcaccggggtgagtcccttgtgtggggacaccagtgcgggctgggcacctcgggagtgtccaggcaggccctggcggggagcgctgggccctggcaggggaggaggccgggctgccctgggtgtggctgcagcccttccctccccatgggacccccgaggggacgtgggccacccacaaccatgagtcttctctgcaggtggccgtgggtgcctctcgggtctcctcctggctgcccgccccgggccagagtcaagttgttcccacgtaggtgtggcctggcctcgttgccacgtgcctgccccacagccactggtgacccgggcctggcccttggcctccttctcaggaagacccagtggtcatcacagctggagggcccaggccaggccacacccagggcccgatgttagcacatcacctccgtgggctggccatggtgcacaccaggacccttgaggtcctgtttctgggagtgagagcccgcgcctgcaggacactgggcccctccagcctcaacttcttcacccaagatacaggctggcttaggaccagagaggcatgcggacagcacagcctccctctgtggctgtggggtcaccccagggctccttcaggcacaaggagggttgggggctccaggcttcggttgcacagatcttcaaccacccaccccccttccaccaatctggggttgagacatagcccaggtggcacgaacgatggccacctgttccaaggtggggccacccctgagcatgtgagcctggagaggggcaggtaggggctgcctggcgctcgtcacctttgcaagagtttggggggcccccacgtgcatcgcaaggctgaatcgggtgcccgtggaggcgagagagttacctgcaggctggggctgggtgggcaccgcaggctgccaagagcatgtttaaaaaaggcctgtgtggacgggcttatttctggctcgggcaagccagtgtgttcttgtcacttagttgctgctggtgtggggcagagagaggtgggtggggggcagcctggggagcctggcctggggggacacatcccaccaaggcttctggaggggtgggcccagcccagtgctggtccccagggcctctgtccttgggcggggggtctggcttggttccttactctgtccatgcaattcagtgtcctttctcatgactttaaaagtaatgtgtgggccgggcgcggtggctcatgcctgtaatcccagcactttgggaggccaaggtgggcagatcacctgaggtcaggagtttgagaccagcctggccaacatggcgaaaccccgtctctactaaaagtacaaaaactagccaggcgtggtggtgggcacctgtaatcccagctacacaggagactgaagcaggaaaatcacttgaacccgtaaggcggagtgagccgaaatcgcaccact

SEQ ID NO: 40465 - DNA, 2098 bp, Artificial sequence
  DNA replication origin
tggagcctcgtctcaacacagctgcacaagctacctcaggcaagggtgccccagcccccaccctgtccccatgcagccccaactctctcggccctttggggccacccatcccccatggggtctgcacctgctcgttggtggtgcgcccccgagtgaccagcaccacatggaagccagtgaggccaatgacagggatgaagaagaggccggccacacacatgacagccatgctagcccgttaaggccaacggtgcaggccaggacaccgcagaccccatcgcagcagcacagagcaggtgcctgtggacaaacctcctcccaacctagggacggccacctgcccactggggatccctgggcaggaaccaagccttctgaggctcaatctccctggtgaacgtgtccccggtccacatcgcctctgcaatgaggcccacaggaaccaaggatacgtgatggtggtgtgcgcggctcccagcccctcagcgtggttcagcacgtagaccaggccgaaggccacgacgcccaccatgtgtgcactgagtgacagcaggaacaggaagaagtagcgatagtttcgacgcccgatgcagttgttgacccaggggcagtggtggtcaaagtcctgggcgggagcagtgcatcagggcacatggcaggcagggatgtggcacagggctgggggagcgcggggcagcagggcggtcacctctacacagttgtcacagacgctgcagtgggagcagcgcggcgggcggtagaagtggcacgtggcacaccacttcatgcggacctggatacctcgcacatccacgttcttgtacagcggagcccggaagtcgtcctccttgtcctcatcctcatccgctacagaccaggagccaggcagtgagcaggaagttgactttcctggcaggtgaatccctcccccaagtccagcccacccaccaggaatccctaaggctgtctcaagttagccactcacactctagtgaaagtgagaggagctgccgcagcacagggccctacctcgggggaaaacaccagggtccatgaaagtggccatgctgaagttggccaggacaaagaggaagatgatgccattgtagacgggaacagctggggacacagctcgtgtcaaccacgggcacctgcagtagacagtgggggcagagagtggagtctgggggtgcagagcggatgcaggcgcagagctatgtggtgcggcaggctgggcctgcaaggtcaccctcagagctcagaggcagtggggaggctgccacagccctgccaagaaacctcagccacatcgctccttcgagtaacggccagaggctgtgcgtatcagtacagcatgtgggctacccgtgccctgacccggcaacctctcagggcagccgtctcagagaggcccacagacctaaggtcaccccattccagcgacctaggctccatgactggggcggggtagggggcgggggcggtacacaggctggaggtgggagccccagatggaaaatgcgccacgatgcctcatccaggcctgtccctggcccagtggggcctctcaccaggcagattctggggtgtggggagccccagtccttggtcagtaagtgcatggggcatgtctcccctactcttcccagtcaggcacatccccatccagacagccccttctttttagtttgtcacctccctccccagatgacaaagtagaacacttagggactctagaatgcacaacaccccccaccacttcccatcttcccagccatcagcacttggctccaaggccaccccctcttccgggaagctttccaggactccaggctgccctctgcagcttccctataaggtgtgccctcacacaccttcctgaaaggcgccttcctcagcccttaacgggcctggcccgagtcccctctgaagagacttgccggtcctcgggccacacggcctgcagcgggttcctaaatccacccactcagcttccaagaagcccctctggcctcaggctccttgtctctcccctgcgcaccctgagacagctgctgtgacaagcagcagggacaggaacacaggggtttgcgtccct

SEQ ID NO: 40466 - DNA, 1123 bp, Artificial sequence
  DNA replication origin
ttccccatccaagggcctgactgccagcccatccctaagcccaggcgcccaccttgctacggcccaggccagccttcagcccgttgtcactaagcttgaccttgagcggtgcagctcggtccaggagttcaggcctaaggaaaggcggcttcaaactcaccgcgagcggcagccggggtggctccaccacgtacctgcaccagggcacaggggtcagtagccagcccacctgccacaaacacacaagggcagggctggccatacctggcaagagccaaacggaccaagagggtctaaggctgcccgccccacacccagcagaggcccccctccaccctgcccaggccgggcctcaccggggcgccagggggctacacagcacgtgctccacattcccacagcagcctcgggtgaaagggttcacacccccgcggaacttcccagtcacctgtggatgcaggaccctcagccagcctggcctcccaaggtccaggccagggtgggcagggggctgggcaagggagctggggttccttagaagctgatacttgcgggaagtggcttaggtgggatcagcccagggctgcccctcacataggttacccagcctgaacttgcagggagctgtgggatttctgggtcactggtggccacagtgtccacaggcaggatgtgcgcaggggacggggcaggcgtagccccacgtgggggtctcagagttggagcctcgtctcaacacagctgcacaagctacctcaggcaagggtgccccagcccccaccctgtccccatgcagccccaactctctcggccctttggggccacccatcccccatggggtctgcacctgctcgttggtggtgcgcccccgagtgaccagcaccacatggaagccagtgaggccaatgacagggatgaagaagaggccggccacacacatgacagccatgctagcccgttaaggccaacggtgcaggccaggacaccgcagaccccatcgcagcagcacagagcaggtgcctgtggacaaacctcctcccaacctagggacggccacctgcccactggggatccctgggcaggaaccaagccttctgaggctcaatctccctggtgaacgtgt

SEQ ID NO: 40467 - DNA, 1041 bp, Artificial sequence
  DNA replication origin
agctccctgcaagttcaggctgggtaacctatgtgaggggcagccctgggctgatcccacctaagccacttcccgcaagtatcagcttctaaggaaccccagctcccttgcccagccccctgcccaccctggcctggaccttgggaggccaggctggctgagggtcctgcatccacaggtgactgggaagttccgcgggggtgtgaaccctttcacccgaggctgctgtgggaatgtggagcacgtgctgtgtagccccctggcgccccggtgaggcccggcctgggcagggtggaggggggcctctgctgggtgtggggcgggcagccttagaccctcttggtccgtttggctcttgccaggtatggccagccctgcccttgtgtgtttgtggcaggtgggctggctactgacccctgtgccctggtgcaggtacgtggtggagccaccccggctgccgctcgcggtgagtttgaagccgcctttccttaggcctgaactcctggaccgagctgcaccgctcaaggtcaagcttagtgacaacgggctgaaggctggcctgggccgtagcaaggtgggcgcctgggcttagggatgggctggcagtcaggcccttggatggggaaacaggcaggttggtgggggcctagaagaggtggatggggcagacagagccgtagacagattcttgggagggggctaggtcccaggctgaatccctagtgaagccctgcccctcatccaagccccacacaccactgaccccgctccctcccagtccaagggcagcctggaccggctggatgagaagccactggacttggggccaccactgccccccaagatagaggctggcacgttcagcagtgacctgcagaccccgcgcccaggcagtgctggtgaggttggggcagccacgactagggagggatatgggttgaccctcctctgacctcagtctgacagtggtctgcatccccagagagtgccctgtcggtgcagaggaccagccccccgacacctgccatgtacaagtttagg

SEQ ID NO: 40468 - DNA, 1538 bp, Artificial sequence
  DNA replication origin
ggacagcacactggcctgctgcaggctgtaggagctgggagcgtcatagacgcctgagtcgccgaagagtgagtcggcctgggagcgcagcaggcgctcacgctcctccctgtccttgcgctcctggatggatgccatgatggtcctggacaggttgtcgtagcgcacaggcgagggctcccgggggcgggggcccagcacggggctgaagctgcggggtaggggccgtggcgggtcgcccgttgccccaggatgcaggtagggtgagtggtatccggccacgccaactgctgggtgggcagggcaggcgtggccaccaggcgagccaggattgagcaggctgtcataggacaggctgccgttgcggttgggcagtgcatggggggcaaaaatgctacggtggggcgtggggggccccccctcagagcgcaggggctgcagggccacatgatccccgccccgccggctcgaggccttgaggctcagggagcgcaaagcgcccgagaaggcatcagaggcgctgagcggtggggatggcgggtaggctgcatgcaggccccctggcccatagtcagggaggtccaggctcggctcggacacaaagtccaggctacggatgctgtcgtcccccagggtcagggaatcagggcctggaacctgtagggagaaggcattctcaccactgcccacctgccaccccgcctgcagccgccagtcagcacccacgggggccacacatggcaccgtggcctcaggaactgggcctcaaggagccataagagccacatagtgacccatggccctgtccctgagcatccacggctgaggggcaggggctctgcaacaggagggaggccacagctggctactgcagacacctggggttctgcccttggagccatgcagccccaggggcccaccactcagggcagccagagggaggaggagcctcgtctagcccctgtgacgggcacataggcatgggcttgggcttgggcttgggacaagagcctcaggaaccacaaagccagaagtggatcagggcaaatgtgggctcaatgcacttggccaaccagacccaatcccccactggacccaggagtcccaggaagatgacatacccagagccctcatctccaaacagggatgcctcctcctgcgaggcacggcccctacatgcctgcagactcagacccttggccaaggaggctcagactcactgcttcacccagtgactctctccaggaaagacatcagtcctgaggggagaggtccctggggatggggctggtctaggtgcacagggcccagtcacaggcctgcctctcggggtggcccagaaggaaggatggcaccctgggactgtttggtgttcctgatcactgcacagaccgccccgcactgcccaccattccagtgaccacagagcactcatgcaactcagggaagagaaatgtgctttctcaagcacgtctcaaattcttccaaagtcttcccgtgggccttacagagtgactaatggtggaattccaggcatc

SEQ ID NO: 40469 - DNA, 2005 bp, Artificial sequence
  DNA replication origin
ctctgggacctgtccgtaaggggaccattgggggctggcctggcggtgatctggggtgctgggtgatggcagtgggccaagcctggctgagagagggtgccccaaagaggctgactgggccccctcactgccccagccatgggacaggcccagacacagaccagcccagtggcccttgtcccagtgagccgacttccccatgggcagatgagtggacgggcaggcagagcgcttggggcaagctgtggaggcgtggcactctctcccgccgatgggtccacaccaggctggggtggcctcgggtccctggggcagagaagttggtggggagggggggtgcgctgtggggtcctggtccccgtggcaccatggcggatgtgtggcagtcagtcctcacaccgagatctcgtaggtggtcccacccacgccggacaccttcttaaccagcgtgtgccgtgtagggctggcagagggccctggggggccggtggcaggtcccagccgggccaggcccggggactgcccattaagcttacttgggggagtcttcagctgagggtggtccctgcatcaaaacaagcacatacacacatgcacacggtgaacacacgaacacggggacagaggacggaggaggcagcaagacagagacgacgcggacgtggactagtgcagccgagttgtggggccccgtgcagtccctgccctctgggcttggagggttcacctggaaagcaggtgagggatgcagagcctgcctggggagcagctgtgctgtcacaggacagacagatgttgtcagaactgccaccaccctcccgagtccctgggtccctcctagccagcactggccacagagagcatggggcagccaggtgggcactgaatggagcccctgccgtgccctgcactgggagcccagccactctgcctggcctcattcctgctctctctcaggaaaacgaggggctgccctcctgcccaccagcgctgaccaacagcagctgtatctttgctacttaaaccttcttgaggcgagagccctttgtccccgggctgcgatccctgcctggctgcaatgctgcccacttctaggtctcgggctccccactcatcactcccagtggcagcctcctccccaactccacaaaagctgaacaggtcccaccctgtggggtagaggagacccgctcagggctggactgctgtgccctcagcccctttgtggccaagtggcctgggctgggctgggctgggctctccctctggggctgcatctgccgacgggaaacaactgcgcctgtgcttgaggtttccaggcccggacagggcgacagatgccgtgaggacaccatgcgtctgtggcgtgggtcctggccccagcaggtgtgcagctctcctacctggacctgggcctgtgagccagctgaccccgccttctcagtcaccaacctgccgggtgcctggagccagcctgctttctccagtcctcagcttccccacctacgagcagggaagcccctgcttcctagaactatgtcctacagggagggccagggcccggccactcagggtggcacattctgctgctaggtaatatcctcagccccagcctcctagagatgcagccaagcaggcccagggagagccctgggtggacagggccactgtgacccaggaagccagagccacagcctaaaggaggcccaggctgccacatgatactggccccaaagagaaagccccatggcctcccacatgctgggtctgtgccagctctagaagaacgagtcgtcgggctcaggacacaaattctcataccctgtccccagagcgtgcccaggacatcctcagagctgggccacacgggctagccaaggccttcaaggcagggtgaggcgcatcctccctgtcccgtccccagagaaaaactcaggcccctgggatgacctatgagtgcccagccaagaggggccctggagacggctggacagctgccctgtgc

SEQ ID NO: 40470 - DNA, 1337 bp, Artificial sequence
  DNA replication origin
actgccagaactgacacagacccaaggcgagagaccctcacacttcccagccacagaccatcggccgccccctcttcccaagcctctgactcagcccaagtcggcagaaatgcccctgaggaacccaccgacccctgcacaccagacagcagccactccctcttctggggcccggcccctgccctcccctaactcgggatcctgcagcaatagccctggccttgcccaaggaaagaatcaaaataactctttttcttttttttaataaaattatagatatatagatgtagatataaaaacataaaacagacacaacgcaagcagacgctgtcatgtgcttactctcaggtccctgacaccaagggaagcactgacccctccccagtgtgctttcccacggcgcgagcaccgcagccaggccggggctgcggacgtggcatgccttggggtggggttctccagtttggcagggagggcctgagggctggggagggggctctgggtgtcaccagccccctgtggcagcatcacccccgtgcctgctcccgcctgcccccccgtcgcctcccacaagagcataaagcaaaggttaaggctttgatgaaagggacagcggcggccggagcactgacacatcagacacggcgcggcagcacagcacacagacacgggacacatggagccgggcccccggccacagctggctggctggccgtctgtccacctatccaccaccacccagagcaggccagggcagaagcatcagccttgccaagctacaagcttccagcggggtccgtgaaaggcaacgcgttagttaggagtagcctggcgggggacactcggtccgggagcccacaggctgtgtcagaaggacggtgggggccctgggtgcctctgtccatctctgggacctgtccgtaaggggaccattgggggctggcctggcggtgatctggggtgctgggtgatggcagtgggccaagcctggctgagagagggtgccccaaagaggctgactgggccccctcactgccccagccatgggacaggcccagacacagaccagcccagtggcccttgtcccagtgagccgacttccccatgggcagatgagtggacgggcaggcagagcgcttggggcaagctgtggaggcgtggcactctctcccgccgatgggtccacaccaggctggggtggcctcgggtccctggggcagagaagttggtggggagggggggtgcgctgtggggtcctggtccccgtggcaccatggcggatgtgtggcagtcagtcctcacaccgagatctcgtaggtggtcccacccacgccgga

SEQ ID NO: 40471 - DNA, 938 bp, Artificial sequence
  DNA replication origin
cagacggccagccagccagctgtggccgggggcccggctccatgtgtcccgtgtctgtgtgctgtgctgccgcgccgtgtctgatgtgtcagtgctccggccgccgctgtccctttcatcaaagccttaacctttgctttatgctcttgtgggaggcgacgggggggcaggcgggagcaggcacgggggtgatgctgccacagggggctggtgacacccagagccccctccccagccctcaggccctccctgccaaactggagaaccccaccccaaggcatgccacgtccgcagccccggcctggctgcggtgctcgcgccgtgggaaagcacactggggaggggtcagtgcttcccttggtgtcagggacctgagagtaagcacatgacagcgtctgcttgcgttgtgtctgttttatgtttttatatctacatctatatatctataattttattaaaaaaaagaaaaagagttattttgattctttccttgggcaaggccagggctattgctgcaggatcccgagttaggggagggcaggggccgggccccagaagagggagtggctgctgtctggtgtgcaggggtcggtgggttcctcaggggcatttctgccgacttgggctgagtcagaggcttgggaagagggggcggccgatggtctgtggctgggaagtgtgagggtctctcgccttgggtctgtgtcagttctggcagtgacagggtgtttgggggaaagacttgggtctgccgctacccacaggggactctcaggaacccgagagcttggggagatgaaatgggggtgcataggggccacctgttggctcagggccctgtgggggccgctgaacctgctggaactctcctgcctgccacatgccaggggcagggctgagggagtgtgagggatgcacagctgttcagggctgagaca

SEQ ID NO: 40472 - DNA, 1253 bp, Artificial sequence
  DNA replication origin
gcccaggcctccgtgggttgggctgggtggggggggggtctcaggttgcccctgaaggtctctgcactcctcctgcccttcccctgacacatgaacagatgccttaacttcctggagccaccagcctggtgagccattggcctctgcctgccaccaaggtcctgtggtcttggccagctccgcctgggccccactggggctgcctgcacccagagacgatgccggcgggatctcagagggcctgaggcccaagccctgtgtcctccagcagtggtacggcctgcggcagggtggcactccggccagcccttctccgtcacagggtccctgtccctgggtccaccctgggctgtggctctacatctcccatttggggacgagaaagccacaaaaccattctctattgttcttaagggtacccctgctaattaattccccaaataaaatttttggtgttgatcagctctgtctaccaatgtggtcccctggaccggacagggccctgggttggggaggtgacaggacctgggcagggagggtggtggccaggaagggaggggagttgcatgaggggcatgaggtcagtggatcagcaggttcagcgctgaaaacctgacctctgaggtccctgggagggcctggcccagggggcaagacctgaggaccccccagtccttactgctgttgcctttcagtggagaccctcctaagacgccttggggggtcagagccccgtgcagaggggctgccttctggagggcaggtaggatgtggggtgggaagccggccctgagctggggtctccaccctgagggaccctcgctgcaggatcgcctgggcatccctcccccaatttccacagagacgtgctcaccggccacttatgtcatgattctatgtccagccacaggcccagccctcaggacagaccccacctccacccttctctgcagcttctggcaaggatggtgcacagtggtgccatgtgcagggggctggcacggccactgggcatccggggcagtgctggtcgcctggcctccttgctggggccgctgggcctctggcctagaagggcaggaagccgtccactttgaggcgcaggaaggggtccagcagggcccggagcttccagacggtggcacggctcagcaggggtggcaccagcccctcgaaaggtgtggggttcaccacgtacacgtaggcagcggtccagaccagcagggcgcccagcagcagcctcagggtcagca

SEQ ID NO: 40473 - DNA, 888 bp, Artificial sequence
  DNA replication origin
tgcagctggagcaggagaaccacagcctggtgagcaccccacccaccgccccagccccagccccagccccacccaccgcctggtacccctgccccagccccagccccacccaccacctggcgcccctgcccctgcccctgccccagccccagccccacccaccacctggcgcccctgcccctgccccagccccagccgcaggagcggccatgacaggcagccccctctctctgccccccaccccagaaaaggcagaatcaggaacttcgggagcagctgggggccctcctggggccggggcagcagttcctgcccctgtgtcccgaacactcaagctgcactgctctggcctgggtaaatacagggcccagggaccccatgcagccaacgcccctctagcccgcagtcttagggctgatctgggggctctcccacagccccccgacccggctggcacgcagcccttggggaacagggcacctctgcagctgctgcggcgggagctgtgccaggggcaagaggctttcgtgcaacagtcccaggtgggcctgggggaggggctgtggggggggaggaagcttcgtaacagcactccaggtgggcctgagggattcattagggagggaggtcttcgtgcagtaggccagtgggcccagcggggaggtactggccaccctgctgatgctgcccaagcccatcctgggccccaccctcagaacgagctgcagcagatccgcctgtgctttgagaggaagaagatggtcatcacagaggtgcccgcctggctgagggggaggggtgctgggggcccacccagtgggtcctgctcctcaggcgtgaccccacctccccctaggtgtgggacaacgtggctgagatgcacatggc

SEQ ID NO: 40474 - DNA, 1419 bp, Artificial sequence
  DNA replication origin
ccctcccccaggcccacctgggactgttgcacgaaagcctcttgcccctggcacagctcccgccgcagcagctgcagaggtgccctgttccccaagggctgcgtgccagccgggtcggggggctgtgggagagcccccagatcagccctaagactgcgggctagaggggcgttggctgcatggggtccctgggccctgtatttacccaggccagagcagtgcagcttgagtgttcgggacacaggggcaggaactgctgccccggccccaggagggcccccagctgctcccgaagttcctgattctgccttttctggggtggggggcagagagagggggctgcctgtcatggccgctcctgcggctggggctggggcaggggcaggggcgccaggtggtgggtggggctggggctggggcaggggcaggggcaggggcgccaggtggtgggtggggctggggctggggcaggggtaccaggcggtgggtggggctggggctggggctggggcggtgggtggggtgctcaccaggctgtggttctcctgctccagctgcaggaaggactgttctgcagagcccagcagcccgcactgaagctgggacagggctaccctgggcgaggccagggcccctccctcccgtgacaggggtgggcatgggcagggtctggtccctgagccaatggatcccccctgcctgggagccccctggttcgaccctgggtgcaggggccagccccacccaagccctgcctccaggtctccttgtctcggcccctcagtgtctctcgctctctgctcctggctggacagaaagagcccgggagcctcgccctccactgtgggcccactgccccctgcccctgggactgggaaaggtctctgggactgcactgagtgagcagaggagatggggcccaggcagggccaccctacaaatccctggcagggctggtccaggcctcctccatggctgctggaggctggggttgggggacactgggggtgggggtggccgcaggggcccagggttttcagcccctccatccctccctgcaaccccttcctgatcccaggtccaggctctggcctggcccaacctgccaccctcttactgagggggctgccccaggcaacagtcacaaaggcctgggtgcagccagggcggtcacaatgggcccctcccacctggtcctgaagctgccccgcctgatgacctcactgcctctgacccactgacccaccatgcgagttttctttctttctttcttttatgggaaggggacttgctctgtcacccaggctggagtgcagtggcacaaggtgtctcattgcagcctccaactcctgggctcaggcaatcctcccacctcagcctcccaagtagctaggactacagatgtgtgcaaccatgccc

SEQ ID NO: 40475 - DNA, 809 bp, Artificial sequence
  DNA replication origin
cagcaggtgtgaggtcagggtaagacgcttctaggcttgtgaggcctctcaatgtctcctcccacgtcacagcacactccaaaactcagtggcaaaaccaccatgacagcccggggctcgatggtacatggccggcaacttggctaacgtatgggccggttctctgggggcctcgctgggcttgtccacccatctttaggcagctggggaccggctgggacgacagaagcctctcctgacccatggcctctcatcctgcagcccagcccaggcctcctgcagggaggacagtccccagagccaagcaagagaggtccaggcccagcgcacaagtgtcgtgccaacctctgcccacagcagcttaggagcagcccattggccaagtgcatccgaggccggcccagagcccagaggtggagaccagtacccgcctcttgatgtaggaggtgaagtcaccttgcaggggggccaggacaccgggagaggagggaacggggctcttcctaccatatgaggacttctccgagccagctttctgagggttaactgacggctgatgggttcaagaaggaggacacgggcacagggactcaggggcagtgaggggcagcagggccgatggtgtgaggagcaccagggagcaggagggaacgggcctggggcgtgaatctggccctactgtcggatgagttctcttccgccacccaaatctggtccgaccgttaacagcgtggccttcggcaagtgactaaagggcttcctgcctcagctttcccacccataaacagaggataacaggccaggcgcgg

SEQ ID NO: 40476 - DNA, 1842 bp, Artificial sequence
  DNA replication origin
gatggtggtggtggtagtgatggtggtggtggtggtggtagtgatggtggtggtggtggtgatggtggtagtggtggggtggtggtagtgatggtgatggtggtggtggtggtagtgatggcagtggtggtggtggaagtgatggtgatggtggtggtggtagtgatggtggtggtggtggtggtagtgatggtggtggtggtggtgatggtgatggtggtggtggtggtagtgatggtggtggtggtggtggtggtgatggtgatggtggtggtggtagtgatggtggtggtggtggtggtagtgatggtggtggtggtggtggtgatggtggtagtgatggtggtggtggtggtggtagtgatggtggtcctggtggtagtggtggtagtgatggtggtggtggtggtggtggaagtgatggtgatggtggtggtggtggtggtagtgatggtggtggtggtggtggtggaagtgatggtgatggtggtggtggtggtggtagtgatggtggtggtggtggtggtggaagtgatggtgatggtggtggtggtggtggtagtgatggtggtagtggtgatggtggtagtgatggtggttgtagtgatggtggtggtgatggtggtgatggtggtagtgatggtggtggtggtggtggtagtgatggtgatggtggtggtggtgatggtggtggtggtggtgatggtggtagtgatggtgatggtggtggtggtggtagtgatggtggtggtggtggtggtagtgatggtggtggtggtggtagtgatggtggtggtggtggtggtagtgatggtggtggtggtggtggtggtggtagtgatggtggtggtggtggtgatggtggtggtggtagtgatggtgatggtggtggtggtgatggtggtggtggtggtgatggtggtagtgatggtgatggtggtggtggtggtagtgatggtggtggtggtggtggtggtagtgatggtggtggtggtggtagtgatggtggtggtggtggtggtagtgatggtggtggtggtggtggtggtagtgatggtggtggtggtggtgatggtggtggtggtagtgatggtggtggtggtggtggtagtgatggtggtggtggtggtggtagtgatggtggtggtggtggtgatggtggtggtggtagtgatggtggtggtggtggtggtggcagtgatggtggtggtggtggtagtgatggtggtggtggtggtggtggcagtgatggtggtggtagtggtagtgatggtggtggtggtggtagtgatggtggtggtggtggtggtggtggtgatgatggtggtggtggtggtggtagtgatggtggtggtggtggtggtggtagtgatggtgatggtggtagtgatggtggtggtggtagtgatggtggtggtggtggtggtggtagtgatggtgatggtggtggtgatggtgatggtggtggtggtgatggtggtagtgatggttatggtggtggtcgtagtgatggtggtggtggtggtagtggttgtagtgatggtggtggtggtggtggtggtggtagtgatggtggtggtagtgatggtgatggtggtggtggtggtggtggtagtgatggtggtggtgatggtgatggtggtggtggtggtagtgatggtgatggtggtggtggtggtagtgatcgtggtggtggtggtggtagtgatggtggtggtggtagtgatggtggtggtggtggtgatggtggtggtagtcatggtggcggtggtggtggcagtgatggtgatggtggtggtggtggtggtgatgctggtggagctgaccatgatggtggttatg

SEQ ID NO: 40477 - DNA, 1093 bp, Artificial sequence
  DNA replication origin
acattagcttggtgcctgtgaggggctgggtatctcaggagatcgcagcaggtcctagcactaccctgttgcattcttcaaggactccccgcagcccagtgtctgtggagtggggcgtgaggtgctgcctcccatgttgctgcttagaaggacgcagccctggaaaccctcactgtggagtctctgagcccctcatccgcagagcagcagttgctgctgtttgcacagacagcaaatccggggcatgtttgtttagtaagattacctctgctggggcctggcccaagggacaggccaggcacagaggggtgggggctctgtgcatactgaacacccccccgagagtggctctgtctacagccggaccactctggaagtgacggcactgcgggcctggagggctggggcagtccaattgggcaccatgccctcacaaacaacacacacaccagcggtggggttgcgagggggcgctgagggaggatcctggctgccctgcttaagccctgcagcctgtggggctgtgtccacccgggtcgcatgttgcttctacctgcacggtggccccaccacacaaggtgccgtcctgccctccagtcaacttcctggggctctgagcagcctgtggtggcacctcacctgggcagagggtgggaggagcagcgcccttccttctgtgcagggagtctgatcagggttctgtctcactgtgggacagtgggggccggggaagagcggcaggtaccaagtgcagacagcagatgtagatgcatgcgggggtccgggctggggccaagaacacagccctggagtcagggacaccggcttcatgtcctcactctgccattcaagagctgggggacctcgggcaggtggtgtaggaacagggaggagtctgcctgcagcacgcagaggagggctgtgctggtcagggggtgttttggggagaggacctcaaagggaggttgactttgggaaaggggtcagagtacagaaaaagtgggtccaaatcctgcttcagcactgagaccctgcctcggcaggggtctccaagcttggctccaccccctgaggggccagttactgcatacct

SEQ ID NO: 40478 - DNA, 1120 bp, Artificial sequence
  DNA replication origin
cggaggcccagggcgctgcaaggagctgcttcctgggtgtcaggctccatccttgggcaggtgtggtctgagccaacgccctaggccgggccacggcggggaccctgtccaggtggccgggagggtacaggaatccctcagccccaagtccatggctggggagaaatcctcgggtgggggcagcagcgtcagggctgaccatccaccccccagccatgagcccgggggctctgctacctgggagtctctgctaattggccccagcgcctcccaggctgaacgttgctcaaacatgtcaaccttgctgcttgattgacaacctgtcactgtttcgtgaggtttctgaggtgttcccgggactcagcaaccttgaaagttggataaagaactccaggaaactggcaagtcagtcagcggccagaagtgaggccctttccccgcatgggggctgtgagggactgtggggttcatgggggcctgtgcggtgcatgggggcctgtggggtaggtacataggggactgtggggtacatgggggcctgtggggtacataggggactgtggggtgcacgggggcctgtggggttcatgggggcctgtggggtgcatgtgggactgtggggtgcacaggggcctgtggggttcatgggagcctgtggggtgcatgtgggactgtggggtgcatgggggcctgtggggtacataagggcctgtgggatgcatgggggcttgtggggtacataggggactgtggggtgcatcggggactatagggtacatgggagcttgtggggtacataggggactatgtggttcatgggggactgtggggtgcatgagagtctgtagggttcatggaggactctggagttcacggggtactgtggggttcatggaggactgtggggttcttttgaacatgcttcttttgtaatgagaagaaacaacaaaaagttaaggctgggtcaggcaggaggggcccctgaacccctgggaccccaaagccgtatggggaaagtgacagggtgggtaggcccagccccaccataggcctggagccctgacacagggcaagagactgcgcggtgccctggcccttcccaccctggcctctgtgtctg

SEQ ID NO: 40479 - DNA, 1406 bp, Artificial sequence
  DNA replication origin
tcacgagctgtcaacatccacccctagacactgccgtggggtcaacaccccacaacttgcccgtctgtatgctcccccagaggtttgagcagcagggcaccgaagaagtgagccacacccccattgcatgccctgcgaaggggacaaaggaacttttcctgtttcaggggaatggtcctcactgcctcctccagattttctgccctgagttgtgaggacagcacagcttgggctctgtccacagcttttactgggagcctgaggctccgtcactcactcggctgctttttcctgtgctggatgaagcccaggagctggctgtgcaggtgtgtctgggatttcatgggcatagatgactccaggacagctccttaaacaccaagctcaagcaggtattgccagctaaatgaggtcaattcctggcagtggatctcagggcgccggccttggaccccacctgcttgcccacccccagcaggcagagacctttctagaaggtcacagatgctgctgcgggatggatcgggtcccaaccctggctgggagtgatgcccgacaagctgctgtaattctcaattctgctccggaggccttggagatgctgcaggcgggcaggtggggttgggggtcagcgtcacaggaggggaaggccacccatgggggcacataggggctagtgtgagccctgcatgaggattaacagggcatgcattgcaatacagagcacgaagctgctgtgaccttcccctctgatcgctgtcacagggcctagcctgcacgtagcctcctgggcaggcacacccctggacccctccctggtgctctgctggaggccacgctgggctctggaatcttactgcacagagctcctggagacccaccctcaacccttgggccccctcttccttcctgggtcctggagggggctgttagggggcatgaggccacgcagcccttgagcacctactgtgtgcaagggcctggcgtttgtgaagcaggctgcggccatcctgggtgggagtcagggaatgggggtcccggaagtgctggcttttctggtggctgtgggggatcagggggccttgctgtgtatctgtgagctgagccatcctctgaggggctgagcgctggcaggaacctatcacgtttcccaggggcagggttgggcatgagaagccctatcctgcctctcagctaggccatgtttcataccccacagatgctttggaggtgacagatctgggtcaagactggccttcctggtgaccagccttcagatggacactgggcggcaggtgttcctgggctgccatggctggtctcctgtgctggtccccagagcagccttcctctcccctccccagacaccccatcctctgccgaggcctgtgagcacctgctgtgtg

SEQ ID NO: 40480 - DNA, 1143 bp, Artificial sequence
  DNA replication origin
agcatatttataaccacaaagaggtggaaacagctacactatccaacagtggggaaatgtttaagtcaatgctgggagagtaacaccatggaccagccccgaagagacatctgtggtgagtgaaatgcacgccatacaagcccagagagactgtgaacttggaagaaagaataggtgcacacaataagactgggaggaaatgaacaaactatcatcggccatgaggttctcctttacttacaataagtatatgcagcacagacatgagaaaggcattcctggagtgtgaagcccagggcaagaggatgcgggtgtcctgagcaagcaataatgccagcaccttctgcaaggtgagataagtcaccttggctctctcaggctccaatcatctctgcgactataaggacagccctgtccctggacaaggggcagctttgagggaaaggatagaaggccagatgggcagatggatggagggtgaatgaatgagtgaacagacatacaagtatatgggcagatgaatggagggtgaatgaatgagtgaacagacacacaagtatatgggcagataggtgggtgaatggacaggtgggtggatggacagtgagtaggtgaaaatggatgggtgagtagatgggggatgaacagatgggtgcatagagagatggctatgtggatgaatggtaggtggacaggtggacaaatagaggaatgaatggtgggagggatggatgaatggatagatgagtggatggacggatgagcagatggactagcagatgggtggatagatgcatggatgagtgagtggatgaatagagagatggacaggtgagtaaatggatggatagatggatggacacatgaatggatgggtgagcaggtggatgggcaggtggatggatgaatgaaaggatggatggatggatggatggatggataggtatatgggtggagggatggatggataaatcagtggcaggtggatgggtgaaaggatcaatgggtagaaggatggatggttagatagatgggtgtttagatgaatggatggtggacagtggatgaatgggagctgggtgaggggctctggtggataaggcttagccatttgaccgctgctctggcctgtgtgtttgcccc

SEQ ID NO: 40481 - DNA, 955 bp, Artificial sequence
  DNA replication origin
tgtgtgtgtgttgctcttgtgtgcttgtgtgtgtgctgcctgtttacatgtgtgagcgtgctgctcatgtgtgcatatgtgtgcgcatgctgctcatatgcatgtgtgtgtgctgcccatgttgtgcctgtgtgcgtgtctgttgctcatgtgtgcatgtgtgtgagcttgttgctcatagtgtgtgagcgtgccgctcatctgtgcatgtatgagcatgctgtccacgtgtgcatgtgtgtgatgtccgtgtgtgatgtccatgtgtgcatgtgtgtgtgtgctgcccatctgtgcatgtgtgagcatgctgcccatgtgtgcatgtgtgtgagcgtgctgcccatgtgtacacgtgtgagtgtgctgtccatgtgtgcatgtgtgtgctgcccatgtgtgcatgtgtgtgctgcccatgtgtgcattgtgtgtgctgcttatgtgtacatgtgtgtgctgcccatgttgtgtgtgtgagcgtgttgctcgcgtgtgtgtgtgctgcccatgtgtgcaagtgtgtgagcgtgctgcccatgtgtgcatgtgtgagcatgctgcttatgtgtacgtgtgtgctgcccatgttcatgtgtgcatgtatctgagagcatgctgcccatgtgtgcatgtgtgtgtgtgagcatgctgcccatgtgtgcgtgtgtgagagcctgctgtccatgtgtgcgtgtgtgtgtgctgcctatgtgtgcgtgtgtgtgtgagcgtgctgcccatgtgtgcgtgtgtatgtgagcgtgccgtccatatgcacgtgtgtgtgagtgtgctgcccatgtgagcatgtgtgtgtgtgagagatcatgctgccatatgggcattatgtctatgtctgtctgcctgccgtgccatggtgtgtgccctcctgggctcgcctgtcctttcatctccatgatgccctctggtccctggctctccccctgtgccc

SEQ ID NO: 40482 - DNA, 1055 bp, Artificial sequence
  DNA replication origin
cttcccaggaaagggccccctccccgccagggcagtggctggggagggggagagggagaaaaacagtgacgtgggggagggtgtgggggagcgttgctggtgaagccagatggtcgtgggggcggccggggctccagaagcctggggggaggagaaggagggagaagaagcggggaggacgcgcttagcagccaaggccccagctcctccgcccgcttctctgtgcgtgtgctgcggcccaaggctcagacccctcccatcaagcacagggcagagccaggatgcagtggtcctgtctggcctgtaccctcctcagggtcctcccacatgtcctgtctctcctgagagaccctgtgcctgtgcccacaggtgctgaggccccccgtgtggctgcgcacacctccacctgcagtttgcccctctgctcacctgagatccagggccggcagccttgccccaaggctgggggcagctcaggcagggcagccctgccggggtggggtgctgtttgcccagggctccctctgcagcccctctgggcccaggagacccttggcagccccagcagaggcctctccatggatggcctgatgtcaaaatgttgtgcagtctctgtcctgtgcctggagctctaccatcagcacccctggcacccccagtctctgtgaccccacagccaggcccaggattctgccaggctgtgcctgggcactggcataggcagggttttattcagtttttctcccaagtggcccctgtcatgcctgagaagaggcagctaaactgctggatctgggctagtgctctcagctgaggctgggggctccttgcagtcagagccaggaaaccgaagccacccatttccaaagagccttgagccccacctgagtgacccaactgcagtggatgctggcgccctcaatggcttgtggaaggacagcagatcctgcctcagcttgcacacctcccaggacaaggagttcattacctctgctgggcccactcctaactaagaagcaggcacctgtcgccctcaggccagcttcggggctgac

SEQ ID NO: 40483 - DNA, 1289 bp, Artificial sequence
  DNA replication origin
gttcggcggcagcgtttgttccagaacgccgcctcccacccagatcgcggtatatagagatatgcattttattttacttgtgtaaaaatatcggacgacgtggaataaagagctcttttcttaagctgtggcctctcaggctagggtgctgtgggcggtgagaagcaggggtgggtgctggacgggcagcctctcccccatcacaaggcccccagaggaagggagttgcctggcaccacaggtgggacagccttggccaagggcagctccaatgtcaggtgcccctggccccccagccgcacagatggagcatgcttggtggctgacgtcgttgagcctggctgatggagcacatgccaggtccatgggtctggacatagcagcccctgtggggacagttgctctcgggccccccaccccaatcaggctgcccgggcagcccccaggaggaggctgaggatgagggaccctgttcctacccctggtgggtggcaggagaggaaggccctgaaggagagttgggcgggtcaggcctggcctcaaggcccagtgggggctgtatgcaccctcacaccgctgctggtggtcacactagaccccacatgcgtgtctggggcacccccacttacagcatgcccacaccccaaacataggccgtggtgggtctgcatgtccctgcacccatgtatgcatacacgcatgcacacacagcagggcagggaacacatgtccacacacatgcaggcaccgggggctcgagagcagcacacgcatccaggcaaaaatatgcacaggcagaaatatgcacaggcacgctttcccacggcctgggccgaagaggactcagaaacaaaagggaagggccacgtggccaggaagccttcccaggaaagggccccctccccgccagggcagtggctggggagggggagagggagaaaaacagtgacgtgggggagggtgtgggggagcgttgctggtgaagccagatggtcgtgggggcggccggggctccagaagcctggggggaggagaaggagggagaagaagcggggaggacgcgcttagcagccaaggccccagctcctccgcccgcttctctgtgcgtgtgctgcggcccaaggctcagacccctcccatcaagcacagggcagagccaggatgcagtggtcctgtctggcctgtaccctcctcagggtcctcccacatgtcctgtctctcctgagagaccctgtgcctgtgcccacaggtgctgaggccccccgtgtggctgcgcacacctccacctg

SEQ ID NO: 40484 - DNA, 1527 bp, Artificial sequence
  DNA replication origin
gagggtgtccgcagtttaaacagaacacgaggccaggtgctttcctcacccagcccacccagggaggggcctccggacccccatccctgggctgccatctccctggtagccaacaaatggccctggggcagggggtttggcagaggaggcccccaggctgtggggagggggtctgaggacctatgaacctgagtctgggaggacgcacatgcccagcggtcactgcgcgtgctgggcttgctgggctctgcgtttagggcgactgcactgtctgcccaagtagagaggacccagtggggcaggggccccatgtgggtaggagggccccagggtcacagttctaggttggggaagctggcctgtggtccactccttcctcctgcccggctccaaccccagcacttagccggcctcatgtctgcagaatcctgctcttagccagctgccgtggaaggtgttagctgtcaacgcaggtgttagctgataactcaagtgttagctgataagccataaccttcccagggggattcacattttaatagactcactgctgaaggcagaaagaatcttcagcattccaaaggggtgggggctcaatggtggaatgagaggcaggaaagcttactccggagtgggtgaccccgctggtgagaccagctctggatgcggcaccccgggagggactactgcccatgtagggccttggtgaagccccaggtgtatctggccctgtaatggaggaggggttgcaggcacctggggctgggggagaacccactgggaggctatccctgctgatggcgtctgggtgggaggggtgcaggcagctggcactgcaggggttggctggggaggagtgaactcctcccagggaggagatggagcagagaatgaggccagggggcggaggcttcaggagggttcctgccaagtcaggaagtgcttgaaaggaggatgtgtggaggagggagcaggctgcctgggtggttgtgggacgcgactcctcctaagccctggacacacttgccctccacccccgccctcgggcatccaggcgcccgtttttgagatagacgtgcccagagggaccccagccccattgcagtgtttcctaggccctgtgggtggaacccccactgggaccccccggggactcctgcaatgcgggctctgtgttcactggagtcctgaggaggtacctgcagtcaccagtgtccattccaggaggccttcaagtgagtgcccctggtgacccagtgggctgctcctgggtgtggtatggggagtctgcagatgtggcttccagggtggagtgcatggctccaaggcatgttctagcccagcatcgtccatgaggcctgtgaagcagggatcccaacactgcgattcccgggggtggtggccacatcttggacccagccccaggtcctcctgagacccaatctccggggcccacctggctctagcaaaacctccagcttctccagtacccctgcccttcctgctaaccactctgtcttctgccca

SEQ ID NO: 40485 - DNA, 2623 bp, Artificial sequence
  DNA replication origin
ggagcgcgccgagcctcgtcccgcggccgggccggggccgggccgtagcggcggcgcctggatgcggacccggccgcggggagacgggcgcccgccccgaaacgactttcagtccccgacgcgccccgcccaacccctacgatgaagagggcgtccgctggaggtgagtgtccgcgctgcacccgagcccggccggcggcggggcgcggaggggggcggctcgccccctccccggagccgcagggcccgtcccgggctgccgaggcgagggaagcgtagccgggcggcagggaaagccaccgcagtgccgcgccaggctggggccgctggcgccccggccccgggagggcggagccggaggcggcaggaaaagttgccgcttcccgggaaagttgacggcttcggcagggccgagggtggcggtccgagggtccccgatgctgggccaagtcgagggcgggggccgtgggctggaagggcggggcccggcctcggagcgccccggccaccaaggggttaacgagcgggtttttgcagaaacgtgggtaccgagggtgggtgggggtgtcgggccgcctccaccccagcctcacggtctgggctcagaacctcccgtttctccgaggtcagtccacagtgggatgaatgggggcgttggcggcagtagagggcgtgggggacagggttgtcccagcgctgcctccagggcgggcggtgagaggaggcagcaacgcccgccatctgcagcccgagggacattgagaggcttggctgggggaatcaggggcggtggggcaatcagcaacccctccctagcagccctcgtgggactcccccgccccaccggctgtgaggtcccgcggtgcgggcaagggagggtgggctccatgtgagttgggcatgccccgcctggagggtgctccccaggtgcccacccaggctgccctgctgatgtccatggtgccgcaggctgcacacacgtttccttgcacgtgcacttgtctacacggactgcacacttgcacacctctggtgcacatgcaagccaacgccgccccagtgtgcacatgcacaaacactgggtgcacacacggactctgagggtgcatatctgtgtcctcgcccccgcctgcacacccacggccacacatgcatgcacgcggcatgcctgctgtggtctccacgggtggcacatgctggggcccctttcgcaataaccactcccgcacccacatgctcgtctgttgagtggggaggccaggcccacagacaggggcaagacatcctgggccccacctctgcctgcctgcctccgtgtcctgggggtccccgcctcgggcttgtgtgcgtgtgtgtaacttggtatgcatctgcacgtgtgtctgtgcgcgtgatcatgtgtgcctgcgggcacataggcatgtctctttgcctccagggtgtgggtgccccttgtgtgcctagacaggctgtggcctaatctggagcagaggccctggaatgtgtgttgggggctcgttgaataccgcaaagcccagggtgtgaggggcagggtctcccagccactccctacccaccagggctgaggcagatagatgatggtgggctggaacctgtctgggcagggaagacccatttcaggccatgaggtcaacactgtgaccaacaggccagaccctgggcacccttggtggccgctgcagcttggctgactggagcacgtgacccagcgtgactgcagaggccccgcctccagtgcctcagtttctccatggtgaggaccttcttggtgaggggttctgtggtgggctcccctacctccggtgttgtgtagggtgctgagcagatggatgccatgctgcatgatgggcaagggtggcccactagcactgtggcaagggccctgggctggggcttggattggcaggccacacctcctgctcccctggccaccaccagaggctcatctatagagtggggaccagcaggttatccttgtaggttgtgtgagggtgaaacatactagcagaggggcagctgaagcagtggggctggccagtctctttttctaagcctcagtcttcccatctataaagggggtactgttccctgttcttctctactgaggtgaggaggaagtgagctcccatgccgggggtgggaatgggtggccatcagcacctagacgccacctggcagaggggcacgtgcagggcctgccgtggcagaaccgtgacctggatttgggtcctggctcagccacctgctggcggtgtgaccttgggtgtgacaggtcgcctctctgcctcagtcttcctcacctgcaccatgggccagtggtcagggattatcggggcacttccaggctgaggctgggcggaattggcccggctttccctgtggagttctgactctggtgcttctgcctcagaatgcccacaacacctccccacacccccactcagcagagtcctcctgggacctttgcactgccagctggcccctcaccccatccatgtgcagaagggacaataaaagcccctagtcaggcaactcgggccacaggtgagtggagaggggacagggcagggatgctgcccagcttgggagaccctcccatagt

SEQ ID NO: 40486 - DNA, 1048 bp, Artificial sequence
  DNA replication origin
ctgcggctccggggagggggcgagccgcccccctccgcgccccgccgccggccgggctcgggtgcagcgcggacactcacctccagcggacgccctcttcatcgtaggggttgggcggggcgcgtcggggactgaaagtcgtttcggggcgggcgcccgtctccccgcggccgggtccgcatccaggcgccgccgctacggcccggccccggcccggccgcgggacgaggctcggcgcgctccgctccgcccggctctggctgggctcgggccgcgggtgcgcagggcgcgcagggcgcacagggcgagggcggcggcggcgcgggggttggggcgtgggcggcgcggcgggccggggcgcgcaggccgggccgcaggaggcgctcagcccgcccggtgcaccggcgccgcgcggtcccagacaaaggcggcgcattcctgaagaggcggcggcccctgcaggcggcggaggggatggcggcccgggccggagccggccggggacgcgggcccgagggtgtggcggcctaggctggcccggtccccaagcgggcaagggctttgtcccgaggcctaggaatggcctctgcctgacccactcccttcctggcctcacgaaacccatgaatcccccgccccctgcacagaagccccttgctgcagcacgatcgcccccatttttcagtaagaaacaggctcagggcttaagagagttctgggggccctcctgggcctttgtggccctctctgcaccatcctagagaagggacctaggcctgatgttacccgtaaccctgcaggggtcccccacctcttcccttctgcggaatgggggctccaaacccagaagacgctctccgaggtcacctgcttagtatccccccactctaccaagccagccccccacgggcggtgtgaggcatggggccagagaatccagtgacgcccctgcacacaccacacaggggtgcaggtgtcccttctcaatcttctgctcggggcacctaccgggcctcaccgatgagctcctaagtgcatcccggggtct

SEQ ID NO: 40487 - DNA, 1591 bp, Artificial sequence
  DNA replication origin
tgcccgttgggccctggggggtgatggctccgtggtcgcctgcccaaagagtacaccactccccatgctacccctcacccggctacaccctgaaaaatgtggcttaccaaaccctcccacatgcgcagcctgagaagtgggctgtgccttgctggtagcagacccaccggctgcctagccctgctcaactctgcctctgcacccccataactccctatcagcgctggccgacgcctaaccatcccagctagcacccaggagtgggcccagcttccagtggggagggtgctggccaacgtgctgaccgaggtggcggacacaggaaaccagcccatcccccagcgctccctctgcaggcctcagccctgctcccatgcagagacctgtggggaggtggaggcccaggtcccagcgcagagcaaccgggaacagccaggttggtggctggagagggtgctggtgccagaagcctccagggccacccctgctccccatttcaccccatgcccatcccatgccccagaatggtcacttcggctgcggcaggaggggtgggaggggctttaaacctatgagatagggtgtggggtcacaatcttcagctatagtgggctgctctgggtcactggtaattgaagagacgcctgcggagtaagcaagcaagtgtcctctcaaggcctttctgcaagcacagagcagcccgagactggagcctggtccaccccagcgctgtcctcagactgatggtcagtgccacgtgactcatctagggtctgatacatccctgtggagagagctcagttcctagcctgggggctgctgtgtgcagggaccctggagaagaatgcttgtctgggggtcaggcctcagcctcccactggctctgtgagcttcgcctgaggttccctatctgtgcaatgggtgatgacgtcttggtgtggctctgggaggacctgttgagccacctcaggggctgagctggtggcactcggcagccagcaccctctggggaggtggcagtgtgtgcacagcccaccccttcaggaggccaggggacagagtggctgggggtgtctgggccccacctcaccttctgtgtggctgggaatggcatgcactccacaatgccctcataagcctaggctgggacaagggtgatagggataaagcaggccaaagtgatgagggccacagagcggcagccagaggcatgtgggcagtgcagcctccacaccaggcagagggcccacccagcatggctccaccctgcgaagctgcctgccactgggatcagatgggagcaccagggctctgggaggtcctcacttcctctgcacaaggcaggcaggtcaccggccctgcgccctgctcatctccctcagggccacctccatggccaggggcaggcagagggcacaggggtgcccagtcaccaggtctctctgcttcatatcagtggacctgggctctgaggggggccatcaaggcatcaggctggcccactccgtccttgagtcagggtcctacagactgacaccaggtgggcctgcaagaccctcatctgcatggtcctctcatgcagggtgggcct

SEQ ID NO: 40488 - DNA, 987 bp, Artificial sequence
  DNA replication origin
agcccccaggctaggaactgagctctctccacagggatgtatcagaccctagatgagtcacgtggcactgaccatcagtctgaggacagcgctggggtggaccaggctccagtctcgggctgctctgtgcttgcagaaaggccttgagaggacacttgcttgcttactccgcaggcgtctcttcaattaccagtgacccagagcagcccactatagctgaagattgtgaccccacaccctatctcataggtttaaagcccctcccacccctcctgccgcagccgaagtgaccattctggggcatgggatgggcatggggtgaaatggggagcaggggtggccctggaggcttctggcaccagcaccctctccagccaccaacctggctgttcccggttgctctgcgctgggacctgggcctccacctccccacaggtctctgcatgggagcagggctgaggcctgcagagggagcgctgggggatgggctggtttcctgtgtccgccacctcggtcagcacgttggccagcaccctccccactggaagctgggcccactcctgggtgctagctgggatggttaggcgtcggccagcgctgatagggagttatgggggtgcagaggcagagttgagcagggctaggcagccggtgggtctgctaccagcaaggcacagcccacttctcaggctgcgcatgtgggagggtttggtaagccacatttttcagggtgtagccgggtgaggggtagcatggggagtggtgtactctttgggcaggcgaccacggagccatcaccccccagggcccaacgggcaagaaggggagcagctgacggctggtgaggggctagcagggagggcttgacaagggctggagcccctggtcaaggggcacaaccagttctatcgggtcaccttgtgggaggagccagggaccctgtgggcagagcctggccgtctgctgcccggagtctacaccagtcag

SEQ ID NO: 40489 - DNA, 772 bp, Artificial sequence
  DNA replication origin
cctcctgcacccccggtgatgctttcatccctctccagcaccattccagaggccagaaaaccatgatgtttggggtcaaacagctgggagaggcagttggaactcaggccaggcctgtctgactggacagtgcagagactgggaccatgctcccctacaagtgctgtcagtgcaccctcgatgccccccagagcttgccatgccccgacagtcccttcatggccaaagtgttccctggcacaggataccctggggtgccatgtctgcaagagctcacacccttctctccccagctgctgctaactgctgccagaggtgggagtgtggagggctcggggcctcttcaccctccctgcaccaactcagctccagaacattcccagcagtgagaagagggtggccactgtgctgcagccccaagggatgggcaaggccatgccagctggagtcatccatgtccccttggacatggtggcctcattcagagggcagcatggaggaaggtgcaatgagggtggctaccagagacagtggagatgaggcagtcaggaagcccagggacaggactggaggggacacacggccagcctgggacagggcatgaggcctttgttctgcgtgctgtggcatacggtgttggctctggccctggcccatcttttgttagtggtaggagggtgctcctttaatcagccaactctttgtttcaaattgcccctgtccttgaaaacactgcttcagggaagcgtgagacaaagccagttcagtgggg

SEQ ID NO: 40490 - DNA, 732 bp, Artificial sequence
  DNA replication origin
gccccaagggatgggcaaggccatgccagctggagtcatccatgtccccttggacatggtggcctcattcagagggcagcatggaggaaggtgcaatgagggtggctaccagagacagtggagatgaggcagtcaggaagcccagggacaggactggaggggacacacggccagcctgggacagggcatgaggcctttgttctgcgtgctgtggcatacggtgttggctctggccctggcccatcttttgttagtggtaggagggtgctcctttaatcagccaactctttgtttcaaattgcccctgtccttgaaaacactgcttcagggaagcgtgagacaaagccagttcagtggggtgcctacctggccagcagccctcatccgcaggggctgctcctggggcacgtgccagaatcagacagtcccaccgtcatgcaggtgctggggccttcagtcagcaggaccaggcagcccatgtcctggggacccttggggaggtgtgggcatttgctgagttgggctgtcatttgctagacaggcgcttggcgaaggggcccttttgtgcatggatgccctgggcaggtgtcagtcctgagtcctggagaggaaggcaagctttggagttgatgctgggtcctaggagggagcgtgtggtttcgccagcttctcaaaagtcacctgagaccctgccaagggacctccagacattcggtgcaggctcctggaggc

SEQ ID NO: 40491 - DNA, 1443 bp, Artificial sequence
  DNA replication origin
tggtgtctggtggataggcgcactcagggcagtcacagcaagtaacttatgccctagcacacaagtccctcctcctcattggtcgagtactatggggttacaatcttccaggacattgcctaagtttcattatccaccttataaggttataccccgtcgccttccccgcttaagtttcaattttccaataacgaaactttcttcccttttatgggctgaccctttttctacattctgtctgcttattgtgatcttctacgtgcatgagccgtgcggtttgttacattctcaggctggctgccagtacttagatttatcatgccttgaaaatgggccatttaaaatgttttctcatggcggtaaatcggtgagctgactgtcatacactcagtcattttgcccaaagtgtgtgtgatgtggagggctgacagccttctccattaccagtgcagtgagaggtggcacagctggtgggaccccctctctctcatggatatgagtgcgttagaggggaggtcttgggccaggagcagatcagatcaacaggattatccagaaaatggcagtcatggcgagtattggctccagatggggagggttagggtcagggtcggctcttctcaccttcctgagcgagtcaccagcgtcgacaagttactcccaacatacagggcctgggtggaggctgagtgctaggaacccaggctccaattctggtaaccaggtgcagatgctcaggagaagaatgcagcccagacaagcgtggtgtgccctccagaggagaggacgtggcatcaaagggctgtcttcatggagagcaggaacagagactttgggaagccagggggccttggcctcagccctgctggcagagggtccccaccatgtagctgaagtgccagggtgcttgtgaggactgggtgtggtccagggtgactcagggcaaggcctgggggatgcatctcaaatccacagtcaccagcctagaaactggggtcacacttcccacatgggttcccacatgtggaaatttcattcactaaataacgacacatcaaggcagcagtatggatggggcacagctgtcaaagtcaccagcaacaagtgcaagaagagaagagggagttgcagccacataggtgcccaggtgggccctgggggtcagagagggcctgccaggggtagcacccaccatgctgaccctgatgaggagaggaaggagggtgtgggatgcaggggagggaaaggtgcctgagagcagcatgcaaacagcctgggctcaggaagagccgatggcatgacaggtgctggggagaaaggcgtgataggtgtggacaggggccacaggaggagggatggtcctcaggaaggggagactggtggctatggccggctgccgaggctagcctctctccagcaaaatgagcctggattcatccactc

SEQ ID NO: 40492 - DNA, 1485 bp, Artificial sequence
  DNA replication origin
ggaaatttcattcactaaataacgacacatcaaggcagcagtatggatggggcacagctgtcaaagtcaccagcaacaagtgcaagaagagaagagggagttgcagccacataggtgcccaggtgggccctgggggtcagagagggcctgccaggggtagcacccaccatgctgaccctgatgaggagaggaaggagggtgtgggatgcaggggagggaaaggtgcctgagagcagcatgcaaacagcctgggctcaggaagagccgatggcatgacaggtgctggggagaaaggcgtgataggtgtggacaggggccacaggaggagggatggtcctcaggaaggggagactggtggctatggccggctgccgaggctagcctctctccagcaaaatgagcctggattcatccactccttttgtctctcccctttgctctgtggtgccggcaggaggaagaggagcagaaaaactgttgctccattcatcaggaagcctctctctctctcgagtggtggtgatggtgtcccccaggggcacctggcaatgtctggagacatttacggctgtcccgactgtgtatgtctgtgtgtgtgtgtactacaggcctctggttcctggaggccagggatgctgatacacaacctgcaatgcacagggcagctcccacaaggaaattattcagcctcaaatttcaacattgcagaacaggtcagggagtgcaaggtacctcctgctctttccagcaggtgcaaggtgcacagggagaagcaggtgggtgaggtgggaggaggctggagccagacccagcgtctgtggggtgcaggaatatcgtgaggtgacgaggggcccagcggtgagtgatggggaggggtgcactacggcaggccgccaggggcggttccaccaagaaagtgacatctgggaggggcattgaggcaaaggggccgcgagagggtaggtgctctagaggtggcccacgggcgggcggcactgaggccgggcctgcaggggaggcggtgtggccagcggactcttgttgggtggcaagggaagggaagaaccacagggctgcacaggttccgagggggcctagtggtccgcatttgcccttgggtgggcggtgggactgggaggacaggagaggagcgcggggcaagcccctaagaggcctgaggggtgggagggagaggacggcttcccatacgcccatttagaccagaggagaagcggacccactttgagggctggattctcagccgatccggcctcagctgtgggtccacgcggctcaaggaccagggaggaacccaggtgtgcggctgcgctgatcggcgggctccggacccacctggctggcctggggacctgggaaacccggtgtggtggggagaccgcaagcctggtcaggggtcccgctcccaatggggcgggtctcctgtgaggaaggcggagctcagggcgggtagccccggggaccggg

SEQ ID NO: 40493 - DNA, 1005 bp, Artificial sequence
  DNA replication origin
atacgcccatttagaccagaggagaagcggacccactttgagggctggattctcagccgatccggcctcagctgtgggtccacgcggctcaaggaccagggaggaacccaggtgtgcggctgcgctgatcggcgggctccggacccacctggctggcctggggacctgggaaacccggtgtggtggggagaccgcaagcctggtcaggggtcccgctcccaatggggcgggtctcctgtgaggaaggcggagctcagggcgggtagccccggggaccgggtctctcgcgggggtgtggccacggcccggtgggcggggcctgctgtggacgcacagaggtctgcagcgcgcggggcggaacctcccgaggagagggcgcggctgggagcgcggggcggggccttccgaggagagggcgagactgggagtgtgaggcagggcttcccacggaatgggggcgcggagccggtcctcccgaggagcgggcgcggctgggaaggcgggtcgggtcctctcgaggagcgggcgcggctgggagcgcggggcgcggcctcaagaggagaaggggcggtgggtcctggggcgtgccagaacccttgaggaagaagcgctggtgttctggagtatgaccaccggagccggccgggcctcgggttggggcggggcctcaggggtggggttgggacttcgggatgggttctccagaggtgagagctggggtcgtagggtggaccggcgtctgctgaggaaagggagctgcttggagcgcggggcgagggactcacgtggagaaggcgtgggccctacggcgggcggggcggggcctcaagaggagcgggtgcagatgctagggaggggcggggcccctgggatggggcggtgtctcccgaggagtgggcgcggctcggagcgtgggacttctaaggagagagcgcggctagggggcatgcggggcggggaggggcggggcgggaccaatagcgcatacttaagcggcccgggcgg

SEQ ID NO: 40494 - DNA, 1527 bp, Artificial sequence
  DNA replication origin
ggtaccggcgtcccgccatggctctgcggcgcgtcttgcccgcgctgcgcccctacattccccgcttcgcgccgctgtccacggcgccggccgccagcgagcagcccgccgcgggcccaggggccgtgccaggacgtgggtcggccagggcagtgcggccgctggtgcccgccgtggacttcggcaacgcgtaggaggcgtactgcagctggcgaacctgggagctggcgcgcagcctgctggtgctgcgcttctgcgcctggcccgcgctgctggcgcgccacgagcaggtgcgcggggtgcagccggggcgcggggcttctgcccgtcccgggagcctttacggagtttcctggcgtgaaacgggtgcctcccaagcatctcctggagcaagggaagccaggaagggaggcgtttcctgcagtccctttctgatatcgcgaattttcctacttctcgatgtctaccaactaaaaacaatggtcgttttaatatttacgatatataccacttgtgggaatacagagttatcacttggaatttaaaatggagtattcttcatgttgacacaagagaagcctggtgtagggctcatagcctggaaccccagagttcaatccccgggacccagccgcttcccagacacggccactctgagaacactgttggggaaaaatgggaagcccctcaaacgcccagctttgaactcacccatggtaactttaaaaagtgtcagggcttttggtggcggtggtggggggcaacaagcagaacactgttttagccgcatcagcctaggggtactagagatgacggttatctccaggtgaccctgggaagagtttgcaaggttccgctttttggcgccagggtatctggtggtgttgatttctcaggtgagactgtacagaggtcgggggctgcacccctggcctcaacaggaggcgggggaaggcgggggacggtgtgagatgagaagcaccgagccacacttgagcttaggtgaggcctcggcgggtgcgaggtgagggcagggatccacgaactcagagtcagatgctgttggcccgaatcccatggggagcgccaaggtcagcctaggacccgtggtggcgggagtgcggaggatggtggaggaagaaggagctgaactggacagatggagggctctgggagggcactgctgtgcttgtgcacacaaggatgtcttaaggtcaagttttggccatagagagccccggccaaggagacaggagggcgagaagggacatcccaggtagaggaactggcaaggtgagggacggcgatgtggaggctttggggagtgcccacatctaaggggcatcccaaaagaggagccagtgctggtggtgctgcaataggaggaggaggcagcagggcaggaatgccaggggagggagtggccagccacagggcaaggacgggcattctaggtggcagctgagtgggacagagactagccatgcagaagccatgcccaccttgtggccaggatgtagtgggggc

SEQ ID NO: 40495 - DNA, 1026 bp, Artificial sequence
  DNA replication origin
aagaagtgtcaggggcaagaatgctgcaggagggctggcctggagggcagggtgggactgcaggctggctgcacgggggcaggagcctgcgcttgcgtcagaggttcctgagagacttgggctctggggcagaggcctgagcaagggggcctcgctggggtgtctctgtcttagccacactcggtgtttctgggtcctgtgacccatgtgtgagcagcctgtggtgctggtggcacaggggaggaaaccgaggcagggagcctgtgggggctgctcggcaggggacaggcagctcctgtgcccactgctgtcccacacctgcatggaaacacaaaccccaccacggagccccctctcatctctacagggcctccagagcgccatgtgcaagaacttcatgggcggggtggggtggggtcaggagcctgctgtgggctggccaggcatgaacaccaagctggaggtggcggtgctgcaggtggggcagccttccccttccccactcctgtggcttgtgagggggtgggcaccgtgggggcgcacagggggcatggtgggcagtggtcggaggtggttttgggaactcacccagggcacgtggctcactctgcagctgctggggttggcctggtggggaggaggaggtcggagggactctgaacagagaggggagatgctggcaggagggctggagacccagccctgcagggcgtgggcgtgcatcagcagcggggtgggaatagacctgtctatgcagtagaaacaaaccagacatggatcctgttcttactaacgatgtaataaagccagaaacagcaccagaggccaatgggtggggggaagaataaaatgtgagcgaatggggctgatccaggccttctcacttctcaaggaaagtgtcgcaaagatgggcatcgcatccagggctgagattgaggactggttcacggcagagaccctgggagtgtctgggtgagagcagcccccaggctgagaggacacgagcatcagccatggttccagcca

SEQ ID NO: 40496 - DNA, 1830 bp, Artificial sequence
  DNA replication origin
tgcaaggcccccttccccagaaggcaggcagtgtccatctgctccaggattggtgtgtttttatcaagaatggatgttggattttggcagttcccttttcggcagctcttgagatgatcacgtggtgaatcattttctattactacagtgaattacagtcacttgaattccatcctactgggtcgtgctgtagtatcctttttatgtatgctggatttgatttgctaaaatcttaagaattttttggtctatgttcatgataaactgtggtctatagttttcatgtaatatctggtttgggtatcagggtttttgccagccttataggatgagtttcgaagtgttctctcctcttcagttttccagaagagtttgtgtagaattggcattacttcttcccctaaatgtctgggcgattgtctttttaaaattttttattgagctgtaagatgtatgtagtttactaatcccaagcgcatggctcattattccttaatgcccagactgtgccatgtgtggccagttgggggcgctccaggcacctttagatgccgccccatcattctgtgagcactttcttgctttctggttcaggtatgtgttcaggctcatcttttcttgttttctccgtgtctcagtcctggaatcggccatttttccacagagctatagttccttatagcaggatggggagttttagtaactgcctgggcccaatgctgtttgtgcttcagaaggtttgggccaggccctggttccaccagcagcaggcatgcctgcattgactttctgcttctcctgctgatttggcaggggcgactggctgctcctgcctcctttgtgttccctggtcatgtctaaggccaggccccttctgcccaggcagccagcgtggctctcttcttgccttttggttgtctatctagtggaatctggtagtggacctggcacttgtagcaatgtttgatcagtagagtgaaggagatgacatttccctgcttccctgtgttatggagctgtcttgaggggggcttttggtaaataccatcgtcgaggtgtgtacagaatgtgaagagacaggagatcggggaaggctgtaggcacagcgggagccaggctacctgcaggggagcctcaggggccctggagttccctggggactggccaccagagaagagctgcaacatcagggctcttcccaggaacagagtgttgggtttcaccttttcttttggccagggacccctccctcctggggagctgtagccatttggcacttactggtcactggcgccagctgtggggtgctgcatgttctgtttcatggtggtttatgtcccatgatcgcttcctctgtacattcccttcagaccagacagtttgcacacatctgtgtttgtgcacagtttagcaaggaccgtggagctttacttgatggctgagggtgagcccctcagagccacacaggcttatggcaccccaagctcatcccaaacttgggcctcccaggtctgcccacccttctccctctggcgctgtgcgggggctgggagctgcaaatgagggaggggctgtctaccctgaagggcagcactgagggtggagggcccgaccacacccctggtaggcagaggccccacgctcagggtcagcgaccccgctcctcctgctcctttcccatgcctttgcctgaggtggtctctgacacttgagtagatgtctcatggcctgtggccatgggggccctgaagccctcagactgcagcctccctcccgcctgcctcctccagctgccctgggtctggggctgcagctttggccccacctggc

SEQ ID NO: 40497 - DNA, 991 bp, Artificial sequence
  DNA replication origin
tctcgggactgtcgtaaaagggggcggagcgcgccgcgcgtgggacaatcgtaaaaggggcgggacgcgccgcgctcgggatgtcgtgaagctgggggagctcgtcgccgccgccggcggctagcgggcgtccgcgccatggagcgctacgcggccgccttggaggaggtggcggacggtgcccggcagcaggagcgacactaccagttgctgtcggcgctacagagcctggtgaaggagttgcccaggtacgcaggcggggcgggcggaggcctgcggaggcggcttcgtttcccgccggggctcaccgcgcccccctacccgcagctctttccagcagcgcctgtcctacaccacgctcagcgacctggccctggcgcttctcgacggcaccgtgttcgaaatcgtgcaggggctactggagatccagcacctcaccgaaaagagcctgtacaaccagcgcctgcgcctacagaacgagcaccgaggtgcgcgggggcagcgggatgaggtgccgcctcctccgggtcggcgcctccgggcagctcttggtatctgtgcagatcagctccttccttggaagtgttcggaagaggtctctaagattgacaaaatcaacgggcgcagagactgagacagcgcctttttggtgatcagtgggtccaaccagttttgttttcagttgcgcagcacccaccttcttagcagaaactccctgttcgggcttccctgtgccccacgcgcttccagacaggatggccctaggcctcggtgcctgattggcctgcaggcagactctggtggtggcgctgactgcagcagcattgcccctcagtagttggaagtctgttgacagttgtgcagcaagcgtctttcagggtcagttccctctcaggcctcgcagggcctcattccagttgcacatcaaattcctaagcactgtctcctgtggcgccctcccaaacccgaagagcttcccacttgagccagg

SEQ ID NO: 40498 - DNA, 1599 bp, Artificial sequence
  DNA replication origin
gccccgcgccccgccgcctgcttattcaggaggcgcgccccgctcctctgcggagactccaaggagggttttgctcagcccaggctcgcacctgcctgctccccgcgcgacattaaaggcgagactccgccgtctggatatcgcaggaccacggagaatcccaccggcccttgctgagtcattgcgggccgaggtccgggctccgcgccggcgcgcctgcgaggtggactgtcccggtcaccggcctccccagaggcaggggtctcgggccagagcccacaggacctgggtctaaggcaccatccgcggccgagcagtggcgctggggtctgtctgcgtcctccccgcccccggggtgagacagacaggaccgccctagagcctctgggtcaggacagtcggagccagagtccccatctgggcctccgtggcccccagcccgtgagcccagactgcgctctccccgctccacaggccagctgctgggccggggctggggggcttctggtggctggggctgaaccgtctaggaacaggctttaataggaggggctcgggtggaggaatggctcctgcaaaggccctgccagagtcaggtcaggtgggtgggcgagaggaccagtgtggccaggctgcggaagccagcacaggagacaagggcgggtgctgtgcattacagaggctgctgggggcttgtccatagagcagcagggggcacggaagggcttggggacgcagacacgatcagacttgcatttcatcaggcactctttagctgcctgctgggtggctgggctgtgtgagatgaccctgctttgaccaggttaggaattatgactggtttccagagagaacattggttagtaattggctatggggaagagggggcgttgagccaaccaactggggtccccctgaagtgccagcaaagtgtctggttttctccaggatctgtttcctcagtccctggcaggattggctcccctgcacgccatgtccttgtggtcccttccagacagaaaccaggcatgaataaagtgaataatgacaagcgctcaggccactgccgtggagggcggtccacaacccagagctggtcatgcgccgggcaccctggcctccaggtccctcagaatggcaggagctggaggtgggactcgagattgtgggagctgagtctgtagtgagtgaccaggagccagctggggctgggcttggtcactgtcacctcccccggaggtggtgagtgggatgattagctgggtgaagacgcctgcctgtttcaccagtgtccctgccctcagtcccccagtccatgaagagtgtctgtgtggagactgggaggatatagggcagccccacgtgatgatatgtctgtggccagctgggcaacactgtcgccagctccggggtctgccaggtggggtgggggctgtgagccacagcaggagcaggccaggcctgggtttggacacctgctcctctgccttgtccgggtgctgatgcaggaaggccccttctccaacccttggtgcaacgtctgacctgaaccagcttccccagcccagcaacactgctcccctaatgtggatgtcaacc

SEQ ID NO: 40499 - DNA, 1024 bp, Artificial sequence
  DNA replication origin
taggctcaggcatggcgggctgcaggtcccgagccctgccccgcggggaggcaacgaaggcccggcgagaagtcgagcacagcagctgctggcccaggtgctaagcccctcactgcccgggtccggctggcagctccgagtgcggggcccgctgagcccacgcccacccggaactcgtgctggcccgcaagcgctgcgcgcagtcccggttcccgcccgcgcctctccctccacacctctcggcaagctgagggagccggctccggccgcagccagcccaggaaggggctcccacagtgcagcggtgggctgaagggctcctcaagcgcggccagagtgggcgccaaggccgactaggcgccgagagcgagcaagggctgtgaggactgccagcacgctgtcccctctcactgggttgctattaaaaatgggcgctgaatataaaaattaaccgggcgtggtggtgcatgtctgtaagtcccagctactccggaggctgaggtgggagaatagtttgagcccgagagactgaggctacggtgagccgtgattgtgcaactgcactccagcctgggcgacagagtgagacccagtctcaaaacaaaatcaaacacgggcgctgccctgggcaggggaggtctgggcacagctgtgctgatgtgggcagtggacaggtgtcacgtgagagcctgtggccaagcctaagctgcggttaaggtgggaggctgaagggtttggagtgtgcaccaccccggaccacctctcagtaggaatgtggcaatgcacttcggtgctggattcctacttctggctgtgtgatttgcgacacgttaccccacgcacctgtaccacaacttcctcatctcccaaatgggatgacagtagttagcaaacctccctggactgctgtgagcattctgccagaaaaatgtactccaagctcttgaagtaggcctggcgtttggttggtgctcagtacatattcaatgtttctgtcgctggcgtcatcactgtgttcatggca

SEQ ID NO: 40500 - DNA, 1368 bp, Artificial sequence
  DNA replication origin
ttcccagggccaattccttgctgagcccccagattctctaaatctccaggactctccatgaaggccccatgccaggggctgggtacagaggaaagcacacagggatgtgtcccctaccgccactcttaaccaagtgctgcaatccagcccttcctgagctgctccacgtgcccctgtctgattccagtcccagtaaaccaaccgtgcaaacatcctgcaccaacccctggccagcacgtggataggcaaagcgaccccatgtgagccgtcaactactttctcagattccactaaaaccactcctcagagctcccagcacagcgctgggcagagagatccccagcaactgacccactgaattggactgggcgagacattcaatagagcacatctcgagggcacacctcgggcaacatctggactcttcacttggagctgttcccactgcccagagcttcctgaggactggccagcaggtacccgggtgaaggtctgtggaaggctgacgatccagggctggggagggaatgtgccaaccctcttcataaagaaggaagaacacacagccactcaccttggacctggcttcgggaagaccccaacccgatatatcctcgagattctctttcagggaaagagcaggatcctgagaggaaagagctggcgaaggagaaatgagtcaaggtcacggctaccaggctcacggctgagcttaaagcccacctgtcgtggcacaagtgagaatcagagaggaggcagaacctgccagcaaggccaggtggggaacgagccccagtagctagcaccaacagaaacagcatcgaggaataatctgcctgtgtctcagacactccaattcatgacgaaaagagctgctacccccaatcaagcacgtctgagtgggaacaaatgattgggcgcggggaagaaagaagcaggaggccaggagcgatggctcacgcctgtaatcccagcactttgggaggccgaggcgggcggatcgcttgagcttaagaccagcctgggaaacatggcaaaaccccgtctctactaaaaatacaaacattagccgggcgtggtggcgcgcgcctgcaatcccaactacttgggaggttgaggcgggagaatagtttgaacccgggaagcagaggttgcagtgagcggagatcaagccattgcaccactcccgcctgggtgacagagtgagattccatttaaaaaaaaaaaaaaagatgctggatgcttctgggaaactggcctgatctctctgagtgtcaatatcctcaagtgcaaatccacagacatactgactacaagagtgaagctgtacctgtcttctcgggctccggggcagggatctccatggcc

SEQ ID NO: 40501 - DNA, 874 bp, Artificial sequence
  DNA replication origin
ggaggttgaggcttcgagctatgatcatgcaaccgcaccccagcctgggcaatagagggataccctgtctcaaaaaacaaacaaacaaacaaaacccaaaaagctgtactcttcctttaggtgaagacagttgccctgtgtgctgggttggatgtgtctcctctgtcaaagggggaggtttctttctctcctgtacaccacatctggttaaacacttattcaataagaaggctttctttcttttctatctctatagcaaggttttctgagctggcaggagattttatttctaattctgtcctccccaggcttaaaagggagcagtctagtgcagcgggcagagctgcatggtggtgctgcctgtggccccaacacatgcagaagagcagggcaagtggaactggccatggcacacatggcaggtagccaggtggagagtgaacagcatgtgcagaagctcagaggtgagacagtaagatgaagacaagacacgcagaggcaggaaggctgagaggtgaccctggcaaggtggatgggttcgaggtgaccagatgcctgactcagagggcagccggggaagaaaggccttttgcacagagggtgatgtgatcatatggtgtcttgacggggggcgggggaagcagagggcggggacacagtctcgctctgttgtccaggctgcagtgcaggggtgcaatcacagctcgctgcagcctccaactcctgggctcaagtggtcctcctgccttggcctcccaaagtgctgggattagatgtgtgagtccctgtgcctggcataatggtttgtcttgaaggtggctttggtggtgtgtaaggtggttggagccagcagttagggaggccagttagggag

SEQ ID NO: 40502 - DNA, 1016 bp, Artificial sequence
  DNA replication origin
cgcacttgtaagccttctcccggctgtgccagcgccggtgcagcgtgagggaggagctctggcggaacgccttcccgcactcgccgcacacgaactcgccctccccggcgcccgccccgcgctgccggcgcacctgggggaacttttctggctcacttggcgtggaggcgttttcccctgcacacagtctcgcgggggccttggttctgccctcagtggcctggacgttcttgcgtgtgtccagcaagggtcccccctcgggaacgcgttgctgggcgaagaggggacacctgagggggaattcctctacagggacgtcccagaccatggcaggtgcgggcgcccagggcgcagcctgactcctctgcagagcacctgcctggcgcccccacgcctgcgccccgccgaggggccgctccatgatgggctcctgggccggttcttctttgcaaatgccctgctgttgagagggcaccgccttcagctcccattctgtaagatattgaaaatgattttctgtgagcaagcggaaacctggcctagaattcagatttgagaattggcctggagatgcagataagcccagaaaagagaggagaggccaccagggccaaggctggaaggtgcaggcagagagaagggagcgcccaggatgagatgggcaagcaagagcgggaagaagggagaggaagaacacggaaggagctaccagagagcaaagaccgggagaggcggagaagccaaaggaatcccggaaggaacagctacaagcaccaagggggctgagaaaggggcaagcttgggagctgttgatgaggattacactcattcacggacacgtcggctgaccgactgctctgtatcaataccatggcaggtgctcgcaatacacaggacaaatacatgttttttgtttgtttgtttgttttgagaccgagtctcgctctgtcgcccaggccggagtgcagtggcgcgatctcggctcactgcaagctccgcctcccaggttcacgcca

SEQ ID NO: 40503 - DNA, 1948 bp, Artificial sequence
  DNA replication origin
tctctagcaatataataatgttcactggaaagtgatgctagtcataattcttgttttattattattctgaaaataatagtttatggaggaaactcctgattaaagccgtgtcaggagcccgtccgaggatacaacagttgatatacctccttttaatttcacacagggtcttgctttgtcacccaggctgcagtgcagtgctgtgaatcatggctcactgcagccttgacctcctaggctcaaatgatcctcccacctcagcctcctgagtagctgggaccacagggacatgccgccacatctggctaatttttgcattttttgtagagacgaggtctcaccatgttgtccaggctggtcctagactcctgggctcaagtgatccccttgccttggcctcccacagtgttaagattacaggtgtgagccatggcacccaacgatatcccttctttttattggcaagaaagatctttccccttgtcaacaacttccaggcccatcaaggaaaacaggtggcaagactacctcaaatgactctcaacactcctcctggagtgtggcccttctggggaggtgactgactttaactagaggaggcaccctggcatgcagacctgatgggggtgataaggcaaggctcccacacctggaggaaggtggtctggatctaggagccagggaggaccagggtgctttccttgttgagtagctcagaaagcagctactgacaccaaagcacatcatgttagtttcgaggtttgctccccagggagaaattcctgccagctctggggggaaccacgcacaagagctttgccacatccagcgcgtcgatgggatccacgtccctcagtccagcatcccctgcacccagcaggctgccaggcacgtagtatgtgctgagcaggtgtttgttgaactggatggccaagggcttcccctcgctgtgcagcctctggtgctcagtgaggtgcgagctccagttgaacatctccccacatttctcacacttaaacgacttctccccggagtggattttctgatgtttaatgagacagtggttctggctgaaggctctgccgcactcgctgcacttgtagggcttctcaccggtgtggatgcgctggtgcacgatgagggacgagtggcagctgaaggccttccaacactggctgcagtcgaagggcttctcgcctgtgtggatgcgccggtgcacgatgaggtaggcgtgggagctgaaggctttgccgcactcgttgcacttgaagggcttctcgccgctgtggatgcgccggtgcacgagcaggtacgcgtggcagctgaagcccttcccgcagtcggcgcacttgaagggcttctcgcccgtgtgcgtcctctggtggagggtgaggcgcgagcggctgttgaaggccttctcgcagtcgctgcacttgaacggcttgtccccgctgtggatcttctcatgcacggtgagggatgagtggcaggtgaaggccttgccgcaggagccgcactggtagggcttctcgcccgtgtggatgcggtggtggcgtgtgaggtgtgtacgctggttgaaggccttgccgcactcgccgcaccggtagggcttctcgccggtgtgcacccgcaggtgcatgctgagcagcgagctgcagctgaaggccttctcgcaggcgctgcacttgtagggccgctcgcccgtgtggatgcgctggtgcacgttgagggacgagtggcagctgaaggccttcccgcactcgccgcagaagaagggcttctcgccggtgtggatgcgccggtgctccagaaggttggtgctccaggtgaaggccttgccgcattcatcgcacttgtaagccttctcccggctgtgccagcgccggtgcagcgtgagggaggagctctggcggaacgccttcccgcactcgccgcacacgaactcgcc

SEQ ID NO: 40504 - DNA, 1067 bp, Artificial sequence
  DNA replication origin
tcatttgtttaattgagtttagttaaaaatttgggctaagattggtggctcacatctataatcccagtgctttgggaggctgaggtgggaggatcacttgaggataggagttcaaaaccagcctggaaaacatagcaacccccatctctaaaaaaaaaaaaaaaaaaaaaaaaattaaaaatttagccaggcacggtggtggtgtgcacctgtagtcccagctactccagaggttgaggtgggaggatcccttgagcccaggagtctgaggctcaccactgtactccagcctgggtgacagagtgagaacctgtctctaaaaaatccaagaatttgtccccagtgggaagatggtttggagatgtgatcagccacatccatggatggagctgtgctgtcatttaggtaggttggattggctgtcatatgcataggtaagcgacacacccaacagttagtatgcttgaaaataggcctgttccttgggtggggctaacatgcagaggattggtaaagcctcctgagagggcggtggggtcagggctggggttaggagggcagaggtcagggctagggttaggagggcagcctgtaagagttgaaaacaagttagtgaatttgtggtggttgggctgccagggaggaagaggagtgggaagggtgggaggaaggcctttgacaggggtacagtaggaagcagggtgtagaggagtcaacctggggccagttcagttgttgtgtggacggtggacaggggtcatctatcttcgggtgaggtcattgtctccatgagtccagctgcagggctgaggtcactcacctggtaaagaagctggttggggtgagctcctgggcctccctgagtctgcagtgaccttcgcccaataatggacctcgagacataaccacagcactgtggttggacagtgccagtgaagaagccattgtcctgctgtcacattggggataccgtaattccaaagctgcctgctgcacacaccccaccagaggtattccagcggctgcttcctattaatagtctgacgtgcattgtgaggggcaaaatg

SEQ ID NO: 40505 - DNA, 1033 bp, Artificial sequence
  DNA replication origin
gtgtttctctcatgtttccgtgtatctggtggaagatgtgtgtctgcaggatgagtgtctcttttgtcggtgtatcatggattgtgtgtttgtgtgtgttgcagggaatgtgtttgtctcagtatctgagtgtgtcgggtcgtgtgcaggtgtgtgtttttttgtgtgtttgtttgtttgaaacagagtctcactctgtcgccaggctggagtgcagtggtgtgatctcagctcacctgcaacctccgcctcccgggttcaatcgattcttctgcctcagcctcctgagtggctgggattacaggcgtctgccaccacacccagctaattttttgtatttttagtggagacagggtttcaccatgttggccaggctagtcttgaactcctgatctcaagtgaaccgcctgcctcgtcctcccaaagtgctagaattacaggcgtgagccaccgtacccggccgcacgtgtattttgtatgatatatatctgcttctgactttggtgaagtgtgtgtgtcgcagggttgtgtctatcttgtggtttctatgtggcctatggtgtgtgtgctgcaatgagtctctgtcttggtgtttctgtgtctggtgatacatgttgtatgttgcagagtgagtctttttttccatttttatgtgcgtggtgtgggttgagtgtcctccatagtagtgggctggctgtgtgtgtgtcacagcgcgtctgtctctgtgagcggtgggttgtgtgtgtgtgttggagagtgagtgtttctgtctgatggagtgtcgtgtgtgtgtgtgtgttggcaggtgagtggctgtgttcctctgggcccagtgctgtgtgggcgtctgttgcagtgtgtgtgccgtctctgtgtttctgagattctgctggctttgtgtgtgcatgtctgcgtttcgggctgtgtgtctgtgttggtgtttctgagtctagaggagcgtgcatgcggcgtagggttagtgtctgcaggcctctgtgtgctgtggcctgcgtctgcttgtaaccaccaggct

SEQ ID NO: 40506 - DNA, 1430 bp, Artificial sequence
  DNA replication origin
ggctgggggaggagaaatagcaagagctgagggcttgggggttcagggaacagcagtgtggcatcctcatcgttctggggggtgggcaccgcctagacaagaatgtggtctgagcccctgcactgcccacccctcacccacacgcaggcactgccctgccctcgcggagcccggctgggcatctgccctcttggccttaaccccagcagcccgcatggcgcagtgcccaaacagagcagaggctttccagccacagggccatggctgggagggtgcccagctggctccagggaagcagtatggcccagaggcagggatcccacattccacgtgctgcctgtttgtgtcctgccagctgctctggacggccgacccagggcaggacgcagtctccactcagatggctgggccttctgagatgggtgacccctctaagatgggtgaccaaagttgacctccgtggggcatctggtcagaggatgagagtgtgcccaggacgagagccccaagttgccagcgtgagaccaatgagtgctgtgtggcggctgcagggtgatcagaagatcctggcagcaggggaagactttgagctgggcatcaaaagatgagatgcaggagaacaagaagaggcctgccgggcagaggcaggaggtgggaggagaacagacaggcaggagctgggggaacttagtgtggggacagcaggggccatggaaggtgagggtctgcggcttaggagggtcacttaggaggcctgcccgggagggtaggcgggtcaggagcagcgaggccgtagggcacagatggtcacagatagccaggcagccgggtctggcttgggggcaggggatctgccccgggcgctccctccgtctccctcaaccttccgcagtagcaggcggggctggcaggcaggagagtttccggctgaggacaaggaacccgttgaggcagacagcagggctctgtgcagcaggagaccggcttgtttgtgctggaggaggcccggctggagtaagcgcccgcggccccctggccgcagcctctgcaccccccgcaagctgccaccaacagctctgaggcccaagtttaacagcagcggccaggggaaaaggccgggatccgaggcaggcccatcgcctgtccctttcagtcagggactctgcctgatctgcccccacccaaccttcctccccgtgaccagtccagaatggggcaggccagatcggggccgcataaacttgataaacaaacgaagcctgtgggttgacacagcccacttccaccatggtcccgggagacccacgcctgggctccagggctccccgctgagataaggggtgggggagagtgcaggacaggtcgtcacataaagttacttctggggggcatctttggccgaagcctgcaaacaggaagtgatcagagca

SEQ ID NO: 40507 - DNA, 1020 bp, Artificial sequence
  DNA replication origin
aggcccaagtttaacagcagcggccaggggaaaaggccgggatccgaggcaggcccatcgcctgtccctttcagtcagggactctgcctgatctgcccccacccaaccttcctccccgtgaccagtccagaatggggcaggccagatcggggccgcataaacttgataaacaaacgaagcctgtgggttgacacagcccacttccaccatggtcccgggagacccacgcctgggctccagggctccccgctgagataaggggtgggggagagtgcaggacaggtcgtcacataaagttacttctggggggcatctttggccgaagcctgcaaacaggaagtgatcagagcatgaggggaaaggcattttattaagaaagctttggccaagcccccgccgggaggagcccatcctggggcaccggccgaggggggagcagccctgctgggggcctataaatacatctcctcaggccactagagtcgcccctggaggtcccgcggcgtgtggggcagtgggaggccatcaaaaccagctgacagctgaggggcctgggcccggggcgccagggaagggaaggggtgggacggactaagcccctgaggagcggagaccagccctcctccccaggctggggtcaaccagatgcccgggagcctggccagtggaagtagccccgggctctattgggacggccaagggagggagcctccagccagaggcaccaggccctagcgggggagaggcagcccgggcagaagtgcctctggctgcaaccaatgagaaggtagccctaaccaagtccactcctggccagtaagaggcggtctttaagcggaaccctcccatctttggccaatgagacgctgtctggtcggagcgctccataactcggccaatggggagggagtcgcccgctaagcgcctgtcaggcctcgaccaacgggatgggcccttcccgccagagcacactgctccaatccaggagcggctgcaggacctgagccaatgagacgcaac

SEQ ID NO: 40508 - DNA, 876 bp, Artificial sequence
  DNA replication origin
aggccggggccgcggccccgcgctcgggccctgggcggcgagggcgcagcgagggctgtcgcctcctcgggcagcccggggggccgcggcgttgggtcgcgggtccgggggctgccgtgttcgaccgtatgcgccgatttgtcgctgggcgtccgtttcctcttgctggggctgggcgcggcctcggagcctggcggcggtggtgagggcgcacggccagctgcagcggcgctgtgcttgccgtggatccaggacaccttaggcttggtggcggggtcaggtggcggcggtttcctgcgctcgggcgatggcgacagcgacaggcccccaatctcgccccgggcccgggccggccgggcctcgcgtcgggccacgcgcgcgtacagagcccctccgggcccctccacgctggacgccgaccgctcgctgtcggaggacgcggggaggggtatcgcctcctcggcggaggctggcgtggtcaagggcacaggggacggcgccggcgcctcggcagggacagtggggacttcggggtcccggctctccgctggtgcctctggcaagggaagagcagggcggtcacagccttcaggaatacctttaggggctccaacctccaggcgcaaaccttcacctttcctcctctacccacgcccttggcactgtgtcaccctggcatctagacgtgcctggcacagagcaccaaccacacatgtgtacttcagagcctcaggctatgcggctgactctgaactcaggctgtgcaaggagtgatgggcgcattcccgcgactgaagcccaaccttggcctggcctggcagccctgccccaacacccctccagccttgggcgcctgcatcatcgaatttgaggctg

SEQ ID NO: 40509 - DNA, 989 bp, Artificial sequence
  DNA replication origin
tcagcccaaccttttccagctccctggatgcacacacttgccttgcaccttaacacatgttgtgcccatgtttcttttctgggttcacctctacccattctccagtcctggcccagtgtcactgtacctgttgagttgcctgtgccccctgcagtccaagaatagggctggtcttggtcaccccatcaacatttgtcacagcaggggctaatgagggcaccggctggggcagagtggacccctggcagctctgcctcatccttccccagtggcccaccacgacctggataacacactcaactgcagcttcctggagccaccctcagggctggagcagccctcaccatcctggtcctctcgggcctccttctcctcgtttgacaccactgatgaaggccctgtgtactgtgtaccccatgagggtaagtaaggccctacctgggcatcactccagcccagtgaaatgttcccatggaaaagctgtgttctgggtgggacacaggagaagggcaggcagcatggagaggaaggccttggccatgctggtacctgagggttgcccacagagctgaggccatagagctggactctgctgctcagtaccggagacaggtgtggggagatgggtaggccacagcccagggttgctcctgggggaaagtaggcagagagaagtttctgggcttaggtagggggtggcagaggagacaggaggaagggatccacagagtatgggagttggatccacacacagcctttgatccacagatagcagaaaggagcctgatggtctgggattctgccctgtctcctcccttgactgtgcccccagatgccacgggcaggtgaccaactcagagcctcagaagccttatcgctctttttttttttttgagacggagtctgcctctgtcacccaggctggagtgcagtggcatgatctccagtcactgcaacctctgcctcctgggttcaagcaattctcctgc

SEQ ID NO: 40510 - DNA, 1430 bp, Artificial sequence
  DNA replication origin
ggtcactggtgcctgccacctaggtaagtggatgaggggcgtcccgttaaggaatgcagggggtgccagaaaccgcgctgaccccataaccccctacagaaaccaaccagcgcaagggcgtgatgggcgcgggcgcgctgctcgtcctgctcgtctgcctgctgctctcgctgctcggctgctgctgcgcttgccgcggcaaggaccctacgcgccggtgagcccagatactgccccgctttcgcctgggttcaggccgcaccctctgggtgccaccggacccagatccaacccttccgcgcccctgccccggacgtggccccgccccttctgtgcttggctccggccgagatctaatcgcccctgggccccgccccggccccgcccctccgctcagaccccgcccccgcagggagctttcgcttgggaggaagaaggcgccgcaccgactatgcgggcgcttcagtcgcatcagcatgaagctgccccggatcccgctccggaggcagaaactacccaaagtcgtaggtaaggatgacagcgcggggtatctgggagaaacacctctcgacgcaggaagctgctgggaaatgggtgtgagggggtccagatctcagtgaggaaatgggggaccttgagtgttgatgtgcgtgggcgcgaggaggtgcgaccagagggaaggtaagaggtgtggcagctgctgagggcgaggcaaggtaggaaggcaggagtcctaggtgcgccggctgatgtgggcatatgtcagaaacgttggccctgagagtgatcgcatcaggggtgtgtggacatctgggtcccgcaggctcccccagtctgtaggagaatgctgtatatcccggccagagctgctgggggaatgcgtggccacgggagtgccctgccccacggagaggacccaccctcctgcctacatccccagcagtacccagagatcctcctggaaagtgggcaggctggtccccacccaccaacaggataggggggtggggtgtgccgcttctctccatgctgacttgcacctgggtggaccctctcttcctctctttcccacttatttctaaagatggaggggaagggggctcagactcttgggagatgaaggaaacagctgagaaaaccccttagccaagccgggcatggtggctcatgcctgtaatctcagcactttgggaggccgaggcaggtggatcacctgaggcctggagttcaagaccagcctgaccaacatggagaaacccggtctctactaaaaatacgaaagtagccgggtgtggtggcgcatgcctataatcccagctactctggaggctgaggcaagagaatcacttgaacctgggaggcagaggttgcagggaggcagaggttgcagtgagccgagatcgcaccattgcactccagcctgggcaaca

SEQ ID NO: 40511 - DNA, 1406 bp, Artificial sequence
  DNA replication origin
gtgtggccagtgcaagggccagcagccgtgcacggtggccgagggccgctgcttgacgtgcgagcccggctggaacggaaccaagtgcgaccagccttgcgccaccggtttctatggcgagggctgcagccaccgctgtccgccatgccgcgacgggcatgcctgtaaccatgtcaccggcaagtgtacgcgctgcaacgcgggctggatcggcgaccggtgagcagccctgcctgcgtcggcccagacacgcagtcccccgccctgcctccctaacaaaggccccaatgtcgagggcgctgtggtccgtttgcctccatttctgctgacgcctcctcccctctttccaaggtgcgagaccaagtgtagcaatggcacttacggcgaggactgcgccttcgtgtgcgccgactgcggcagcggacactgcgacttccagtcggggcgctgcctgtgcagccctggcgtccacgggccccagtgagtgccccgggaccgggagggggttgggggcttgtacctgccacagaggggggtccagccgacgaggtggcctctccaccctgagctgggttatcacctcagccttggtcccttaccccagctagggagtgacagtaggctctttgggggcagtttcctgcctggatgtcggggagctcacgttcagcgcaggatctggtgaccagtccagcctgtgtcagtgggctcttaaggtgaccccgagttggtacagaaggaccagggacctccacttacagccaagggtctggttcagcagcccctcttcccacctagccgagtcagccccagcagtgggcgctgcggcgcggccaccacgggtcctatcccccaggcccccccactagtgttgtgcaacattcgtttccaaaacatccactacccaatatgtgccacgggcggggcggggcttcaatccctagacgacgaatgcagcgagagagagcccggttctgggaccctggaccctgggccctggccgcgggtgaggggtgagggtagggggcatcctaggggggcggctgtggcatgccttgaccctatgtcccggcagctgtaacgtgacgtgcccgcccggactccacggcgcggactgtgctcaggcctgcagctgccacgaggacacgtgcgacccggtcactggtgcctgccacctaggtaagtggatgaggggcgtcccgttaaggaatgcagggggtgccagaaaccgcgctgaccccataaccccctacagaaaccaaccagcgcaagggcgtgatgggcgcgggcgcgctgctcgtcctgctcgtctgcctgctgctctcgctgctcggctgctgctgcgcttgccgcggcaaggaccctacgcgccggtgagcccagatactgccccgctttcgcctggg

SEQ ID NO: 40512 - DNA, 1921 bp, Artificial sequence
  DNA replication origin
cgagagaccgcgcttaccggcggcgacagcccaagccgtagaagccggcggggcacggctcgcgacagtacttgccgcggtagcccggctcgcaggcacacgtgccgtccacagggtggcagcggccgcggaagcactggcagtagcgatcgcagcgcgcgccgaacgtacgctcgcggcactgacagcggccgctctgctgctcgcagggagacgagttgcaggcgcactggttgttgcagctgcggccccaccagcctgcgtggcacaggcaggcgccggtctgtgggtcgcagcgcgacgtggcgctgcagtagcacgcgctggcgcactgcgcgccccaccagccgggctcacagcggcacgcgccgctccgcgggtggcacgtgccgtgctggcactggcacgcatgctcgcagcgcgcgccccagcgccgcgcgtgacaagtacactggcctgtcacgtcctcgcactgcccgtgtgggtggcagctacacagctccttgcagtcggggccccagaactggcgcgggcactctgcaggggaggagcggagggggtggaaggccccggtgcttgagtaggtgcccccagccagccggaacctgcccgcgtcccgcactccagccgccacctctggggacccgccccgaaggcggatccgaccccgccccaccttggaccccgccccatctctccaggattccgccccaccgaccaataccggcccgaccccacgctcactggtgtcgcagttggcaccgaagtagccgtggcggcagcggcactcgccaggcctcacgcacacctcgttctctgagcacgtggagttgccttcgcacaccgctgtggacgagacaggccagagctgctgcgcgtcctagccccgccccctcccccgccccaggtccccgggatgacccactcaccaatcccacactcgtccccttgctgcctccagccagcgcagcacgtgggcacctgggagctgcgagcagagggaggacatctaagcccgatgcccctcccccagcccccatctgctccgggctcctccgcagcctccgcacagcctccctgcctctgcagttgcgctcctgtcctaggggggtggttaatgaggtcctgccaggcagtcgtctggcggtggaggattgccacaaacagacctcaccgccaagaactttccagcccagaaccacccaccccatctcacctaactcctttgtgtcctcctcccacagccattaggcctgagaaaagtggccttggagtcccaggaaggacagcagtgaggcagcagccagggagaagaccatgggcctcaggacctgcccaaatgtgagggtctagggcatccctccaagtggagggcccagcctaatgggtgtcatggatccagatgtcatgtgatgtgacatgatgaggacggcactaggactagctgggccacagggacacacctagatgcccagttggggttgagctccagtggggaggggcagcctctggacagggggacggggggtggcatgtagacacagtgaggtgaccacttggcagaggggcttctggagggaggtggggtgaggcccacccagccactagggaaggagcaggcacatggggagtcctccacgtgcaggaggaaagtcaaactgtggcaaaagggctcagggaccagggtggaggaaggagctattagagcatctgtttatgcctttgttgttggttttgaaacagtctcgctctgttgcccaggctggagtgcagtggcacgatctcggctcactgcaacttccacctcccaggttcaagcaattctcctgcctcaaacctctcaagtagctggaattacaggcacgtgccaccacacatggctaatttttgtatttttactagagacagggtttcgccatgt

SEQ ID NO: 40513 - DNA, 1084 bp, Artificial sequence
  DNA replication origin
gaccctgaccctgtggcagaggagacacagtccagaaaagcaagtgtgtctagacatctagcaagagctgggaggtgttgggttggggagtgctgtttcctttagggtgttctgaggagaacggctgagaaggtggtgagtgagcacaggcctgcagaagagcacggaggccctgtgggtgtctggggcaaggttcccaaggcagagggcctgtggaagtacaggaaggatccaggaggctgggcagagtccaggaggggctggcggaggagctgccagagagtgagggtgggcaggccaccgtgggctgccactgctcagaagacttgggcttttcttctgagggccatgggaccccctgggggctttgtacagagaaagggtgggatctgaccaggattggctgccaggtggcaaacacttcgcaccctggggggcagggggtggaagctggggccagttacaaaaagccagggagatggagggtggctctcacaaggctgggatagggaaggaggaagtgatcccattttagatatcgtttagaagctagagctcagcgtcttttttctcaatggatctggtgtagacaagaaagaagagtcagagatgcttctccaggtctcagcttcccagcctgaaaggacaggcagggttatctgaggcagggaagactcagggtgcaaggaggtcaagagttcaggtttgggctggttgggcatgaggcccatgaggtctccttctggtgacatcatctattgggcagttggatttgcaagtctagcattgatggggagagccctgctggagggtccaaggtgttgtcagtgttcagtgagcttcccgagggagctagtgtggacacaagagagatctgaggatggggacagaaaccagaggagaggtgtccaggcggggcagcaggagggtcgggctggtgtggggtctgaagggtgtggcaggcagagaagcttttctgcctggatttgggggagaacatggacaggtatggaccccatgagccaacttgaagatgtaagaactcacagtgggtttgaatcacagaactaatgctctacgaggg

SEQ ID NO: 40514 - DNA, 1103 bp, Artificial sequence
  DNA replication origin
agccacggacccggggcaagccgagtccaggggctcggcgccagagacaaggggctgcgagggggcagcgcggggtttccgaactctggtccggaggcgcgcagacccctccccgctgcgagccccgcctccggggcgggggccggcctggcccgccatctgcttcgcatcgatgccgccgccgcggactcccgggcctccccggccccaggaatgcagcggcggcggcgggcggggcggtgcctggagagggggagggcgcgatcgccgtggtctctgtctactcactccagccctctttcccagacaggcccgggaccaggaatgggggtccggtgccaggctctagctgtccggagcctgagagccctttgctcccgctcccctggtctgcagacctcccaggaggcgcctgctccaggaaccgagcctgggtttgggttcccatcctggtgccaccctacccagctgtgtggacctgggcaagtcatttgacctctctgggcctgtctccacctctgtaaaatgggatagtgatcacaaccccctcatggggctaagtggagatcgctgtggtcatgagtggcaagggtcgatgggaaggacagccactctgggcactgcccacctggggtctgggtcatgtctttgttgtcctcccacatcttgcaaggcttccatcagcccttccctttcctgggaggcaggaggatggggagaggagagtgcaaagccagtaaaatcctatgcacctacactgtgccaggcctgtattggtgtagggaagctgcagtggagaccctgaccctgtggcagaggagacacagtccagaaaagcaagtgtgtctagacatctagcaagagctgggaggtgttgggttggggagtgctgtttcctttagggtgttctgaggagaacggctgagaaggtggtgagtgagcacaggcctgcagaagagcacggaggccctgtgggtgtctggggcaaggttcccaaggcagagggcctgtggaagtacaggaaggatccaggaggctgggcagagtccaggaggggctggcggaggagctgccagagagtgagggtgggcaggccaccgtgg

SEQ ID NO: 40515 - DNA, 1394 bp, Artificial sequence
  DNA replication origin
gcgcaggggcggctgcttcggtagatgtctagggagcggagggaaaggcgcgggaaccggggattcctcgggcggaccctccctccaccagcgctcggcgggcctcctccaagttcgcccccaagtttgcgagcggccaaatgggggcgggggctgcgcggaggggcggtggctaggccggagggtggggtctggagcgcggggcgggcgctgccgcctggccggccgcggctggcccgggatcagggagccgatgtggaatttcctgcccggctcggcgcccctcctgccgccccccgcccggcctcgcactccgcttccggccgctctcgctgcggccgcacccgcgcccgtgcccgccccgcgcctgccccgcgcctcatggagggcgcagggccccggggggccgggccggcgcggcgccggggagccggggggccgccgtcaccgctgctgccgtcgctgctgctgctgctgctgctctggatgctgccggacaccgtggcgcctcaggaactgaaccctcgcggccgcaacgtgtgccgtgctcccgggtaggagccggcctggctgggggagggggcgagagggacgctctgggcagtggtgtggcggcgccgggcattgggagggggctaccggaaccttcctacgccaagtgtgggccccttcggctccctagccagcgcggctccgttccaggcccagcctcggccatgggccacgacagtgcatcccagggaaccctggacgagaagtcacctgaggggaggatggagtgccgtgggcacccaggggatgacacgcgttgtccgggatatcaggaaagacctggaaaaagggacccttgaccgagttgtgaagtccacggggaaaagctggggaagggcattcaagccaaaggaactgcatgtgctaaagccccgcactagtccgactggagccgggagtgggagtgaggaggaaggtcaggggaggaggagcggtgctagccggggaggtcctggagcaagccagacttggaaagacagattcgcgtcttagagcgggcgcgggtgggagggtggtgacccaggcgagcgtcgaggagccggcgctcgaagtggaccagaagcgggaggcggaaggactatgacaggcacaggggaccggaggatgtgggaaccctggcgacaaccaggtggggattctgggtgcaagaaggggccgcgcaaatgtggggcgccggctggggaagccagtgtgggacaggcaggcgacaggcccggccggtgggggggcgagtccgggagtttgcacggagggcagagaggtgagccccggacgccaggagttaggagctggggtcgggggagccggtgggctggccaaaggccacaaggtcaagggcatct

SEQ ID NO: 40516 - DNA, 1904 bp, Artificial sequence
  DNA replication origin
atgaggcgcggggcaggcgcggggcgggcacgggcgcgggtgcggccgcagcgagagcggccggaagcggagtgcgaggccgggcggggggcggcaggaggggcgccgagccgggcaggaaattccacatcggctccctgatcccgggccagccgcggccggccaggcggcagcgcccgccccgcgctccagaccccaccctccggcctagccaccgcccctccgcgcagcccccgcccccatttggccgctcgcaaacttgggggcgaacttggaggaggcccgccgagcgctggtggagggagggtccgcccgaggaatccccggttcccgcgcctttccctccgctccctagacatctaccgaagcagccgcccctgcgcgcccactgcgtaggccaggcccgggacgggaaggcggatcggggacacggacgcgactccgcaagcccacccccgctcccagcgcctcggaaccggccaagggagtggggcccgcagacagcccaggtcgaggccgaaagccaactccacagcaccccaccgcgaagtccttgtagtgctggggtgtgcggtcagctccccctgcgcactcctgcgcactcagagctcgcaaggggcggaccgagcaggatgcttgaggcctgtggtagactcggtccggaccagaggcctgggggaaggggtctccgtagggacggatgggagagatacagaggaagtagaatggccaggctgtggactgcggtaggaagtagaggtaaagacagaaggagacccccgggatggaaaccctgcagtcctagttgaggagtgaagggggctgggggagcctgggcggtggattctgctggctgtcggatttccaggagaggctggggctagagagtgggaactcctgcatcaggtaaggtgggtaacagcacagagcagaaggaaggtgtgggaagggagcaagacagagggacaggccctagggagccagcggggaagctggacttggactgggaggcagcagggtgcgggtccccggggggcaactggggcagaccgactctggaagttgggcagggagcacaaatgtcccgtgtgtagccaggtcctagtgaggatgtttgtcttttggggacttgagagctggcagaaggcctaagcagggagcgggcacctccgttctttggggagcaggccacatgcggcccacaggctcactgagggagggcaggcagactctgtccaggtgtggccagatagccccgaagggtggggctggaggagggggcttggaggaggagccactgaaaggcccaaggccatgggcatcaccaggctggcacaggcagagagtgggatggggaggagcaggcccctcactcagccatgctggtgcaggagggaggtggggtgggctgaaagagaagtggaactagtgtggacacgaatgcaactacctggggacaaataaacaggccaaccacttctgggcagctcagcctgggcacagccctgacctcagcaatgccctcccagtgctggggcccctcccacggaggatccggattgcggctcccaatagaggccagcagaggtcccagtggctgcaaggtctgtcccagcccagctcctggctttagaggcactgaccccctgggctggaggggacactcacctcagctggatggaggtcatgaataggcatatcaaattccatcacctttctccttcccccagacctgtccagggagggcaccacctggatggtgccccccaatcccccaggacctcctaaatgtcttagatctctgcccacccctgtctgccacccagagtagtctttttaatctcacatgtggctatccaccactgctctcaggatgaggaccatccccagtctcacctcacgac

SEQ ID NO: 40517 - DNA, 1006 bp, Artificial sequence
  DNA replication origin
ccaggggccagggtgcgaggcctcctcagcgcggctgctggcgcgccggcctcctggcacccgggcgggccctgttgcctgcggcaggtccgaatgcggccttcctggccgcgaccctccgcgctggagcgggcggccttgcaacaggcgggcgatttggggccggcctgacgagcctcagttccctcgatcgggcccggggactgcagccgtaggagcccagccttgccagctctcccggtttcctgagaggagccggagatcgcgctgtcagtgcaaaatcaccagagcgcgaagcgtcggctgccagttctgaccattttagatccggtgcgggccgagccgagtggatctggggcgggcagcggggcaccgccaccttccgcctgggctcctcactgggcgccctcgctccggccctccgcggggccgagtgcctccaagacggctccctgggagattcttccagagcgcaccctttggaaggctgccccgctgggaatcagcacccactccctctcctctaccgcagccgccccctttgcctttgtggccgaccttgcttcatgctgccaaggattgagtttctttgaggggatactgctcgttcgggggccctacagaaggctgagggtatctactcagtaaaatcgtaccgaactgaaagttcctctgaaatgattttgactctgccatccatcacttcataaaaattcatcttgtatccttcagtttgtagctatgtggcacattaagcttcctttcttctccccactgaaacttcgaacagtacaaaacggggaacttggcttgtgatgactaaaattggggatatgagactgggggcgggcgcggtggctcatgcctgtaatcccagcactttgggaggccaaggctggcagatcacctgaggtcaggagagactagcctggccaacatggtgaaaccccgtctctactaaaaatacaaaaattagctgggtgtggtgacacgtgcttgtaatccc

SEQ ID NO: 40518 - DNA, 1115 bp, Artificial sequence
  DNA replication origin
accatgttggccaggatggtttccatctcctgacctcgtgatccgcccgtctcggcctcccaaagtgttgggattacaggcgccagccaccaagcccggccccacctttctttttaaccatgagccatctccagccacatcctccccctaccactctctccacccttcacagtccctctcaaaaccacagtgtgggacactccaaccttatcccatcaggaggctctgtggctccaagctctgggcgcagccattacggatacgcctcggaggatgggacctgctcgaaggtgaggtggagaacaatgaatgccaagacccgcgcacggacctctgggaccaggctttaagactgggaattagatttactgcaaaatctcagtaaaggaacgggcacacaaactagcacctgttcactctggcggtgttaagcgattctccccgatatcccgcagggggcgcgctacggtcagcggcaccgaccgcggagggagcggggaaggagcaggccgcgggagggagggaatgagcgcgtgacgaagggaacaagtggaggagaggaggaaagaagggaatcaaagagggagggaggcaatgggagaagaggagagggagggagggaaagaaggggggaaatgagacagggagggaaggaatgagagagggaggagagaacgagagttaaggagggagggaaagggaatgagagagggaggggatgagagggggagacagggagggagtgaatgagtgagggaggaagggaatggtgggtaagataggaagggaaggaatgagagagtgaaggagggagggaatgagagggggggagtaagagaggagagaagagagtgaagaagggaatgaggaaaggagagggaggatatgagcggggagggagatagtgaggaagggcaggaggaagtgagtcgaggaatgagggtaggaccgaggcaaggaaagagtcaatggattcagacggggcgactctcggcaaattcgctcattcgttggttcggccccgccaagtgccaggtgccgcgctagtgcggggactcactgagccttggcgatcgctgctgtcctccgcagagcgccggagtggagccgccccc

SEQ ID NO: 40519 - DNA, 993 bp, Artificial sequence
  DNA replication origin
ctcctgcccttcctcactatctccctccccgctcatatcctccctctcctttcctcattcccttcttcactctcttctctcctctcttactccccccctctcattccctccctccttcactctctcattccttcccttcctatcttacccaccattcccttcctccctcactcattcactccctccctgtctccccctctcatcccctccctctctcattccctttccctccctccttaactctcgttctctcctccctctctcattccttccctccctgtctcatttccccccttctttccctccctccctctcctcttctcccattgcctccctccctctttgattcccttctttcctcctctcctccacttgttcccttcgtcacgcgctcattccctccctcccgcggcctgctccttccccgctccctccgcggtcggtgccgctgaccgtagcgcgccccctgcgggatatcggggagaatcgcttaacaccgccagagtgaacaggtgctagtttgtgtgcccgttcctttactgagattttgcagtaaatctaattcccagtcttaaagcctggtcccagaggtccgtgcgcgggtcttggcattcattgttctccacctcaccttcgagcaggtcccatcctccgaggcgtatccgtaatggctgcgcccagagcttggagccacagagcctcctgatgggataaggttggagtgtcccacactgtggttttgagagggactgtgaagggtggagagagtggtagggggaggatgtggctggagatggctcatggttaaaaagaaaggtggggccgggcttggtggctggcgcctgtaatcccaacactttgggaggccgagacgggcggatcacgaggtcaggagatggaaaccatcctggccaacatggtgaaaccccatctctaccaaaacacacacaaaaaaactagccggtcgtggtggcgcgcacctgtagtcccagc

SEQ ID NO: 40520 - DNA, 1352 bp, Artificial sequence
  DNA replication origin
aaggatggcaggaagccgctgtcaggaagcgatcgtcgtttctggaggagagcgtgaagagctggggtcagtggccccgctcagaggaactctagcccctcaccaccgactgcttgtttctgttagcagtttttttcatgcgcgtccgtgtgaagagaccaccaaacaggctttgtgtgagcaataaagctgtttatttcacctgggtgcaggtgggctgagtccgaaaagagagtcagcgaagggagataggggtggggtcgttttataggatttgggaaggtaatggaaaattagtcaattgttctctggtgggcagggatggatctcacaaagtacattctcaagggtggggagaattacaaagaaccttcttaagggtgggggagattacaaagtacattgatcagttagggtggggcaggaacaaatcacaatggtggaatgtcatcagttacggctgtttttacttcttttgtggatcttcagttacttcaggccatctggatgtatacgtgcaagtcacaggggatgcgatggcctggcctgggctcagaggcctgacagtttttaactgagcttattggcgtgttgtgctcgccacagatttgcctgagacacagcccctttcctgagggatggtaaaggaaccgtcacagcgcagtcttgtcagtctgtaatgtgtatactgcaggggtttcttgcgaagcggcggttaacttgagcagaccaggggcagtctagtgagtaggtgacgaataaattgagtcctagaaagacaagtaggagtgtgaatagccaccattccaagctgaggagttaggaaacatgagcatttactgcgtggagggaggatcttgtaggctgagagttctggggctcgaggagtaagagagcccaggagatgatggaatgagggtgagcaggtactagcactttagtgggggtgttgtgccaaggaattgagcctgtgtttggcatgtggcattctttggagtagtgaaatgccagtgttgggaatatgcctagagtccctgtccctggagatggatgcagggcagagaagagagaccagttaagctattaagagagtttgaacatttggagggagtagggaacctgtcctttttcatccttatattctcactgctagctcactgcctgccacattgctccgtaaaatgattgtggcatgacctagtcgggcgggagattataaaggcctgcattagacagtggtagaaactgaaagaggaagacagattccagaggagggggaacgtagacaattcttgatgactaactggatggaggggggtggggtgtggggtgaagcattgtggaaggaagga

SEQ ID NO: 40521 - DNA, 1003 bp, Artificial sequence
  DNA replication origin
aggccacagccctcgaccctcgggtggggaacttgagctctgagggccccagagctcgcacacccagtatgagctgaggcctcataaaggtgaggagtgaccttagcacctcaggcccaacttaccaggtgtgtttaaaggtccaggtgaggggacactgaagttctgtggggtccgcgccgtcactgggctctgggagggctgcggtgaggggctgggcaggaagctactgggagatggggcagggccagagctgcagccaagtgagagaaacatgtgagccggggtccaggcagggccagcctcgagggccaggtggggaggggcaccccaggccaggcctacctgacgttggagttgggctgtgagctgggctggccgggctgcggggacggctgggggggagggggcatcgactgcggggtctgcacctgctggcccggtgacggcgaggacagcatggggaggctgctctggctgacctggaagtggaggggctcagccggcgcgctgccacacgcccgcccgcctgcctccacaccacctgcccaccgcacgcataggcccatcctcccgcacagcctcaccacacacctgtgtcttcatccaaatgccacctggacatacacacaggcacactcccccagcctggcacacagcatgaggtgaccaaggggctggcggggggggcccaggcagggcagcccttgctccttggccagggacccacaggggcacaggctttgagggctgtgtcgtgggagtgtgaggaaaagggcagtctgggaggcaatgcccttggctggcactagcctggccttccctgacacgcctgcctgtcctgtgacatgctcctctgtgggtcggtgaggaccctgctctgctgaccagtgggaccgtcttcccacatgcttccacaagcccccgcagcccccaggctgactgcaccaaggacaagcctggtggctacagccatctgttgtggttaacacatgctgctgca

SEQ ID NO: 40522 - DNA, 872 bp, Artificial sequence
  DNA replication origin
cacagcagcagccaggaatagggcaaaggctgggcatgggccaagatgaagcctgggcttgaagccccagcacacaccagagtggagccttggaggcctctggccagggtccaaagagctgcctggtgcctttgttaaacccacatcatcaccaagtgcccatccatggctgggctatctgtgcccttgtggaccctccgtgggctgtgggcaaagctcaccgcttcgaggggtctgtcagaatgtccagaaggctcttcatcttactcaggtccttttttctgtctgggacagaagagggtacacactaagacacaagcctggtggtgtccccagggtgcaggcccctgccctggctgcagcctaccttcgttcttgtcgatcttgttgatcatgcggcgcaggggctcgatgtacttcgacagctgcttcagcttgtccaggtactgctgctcctcagcctggctggagccagctgggctcatgacagagctggggttcactgcaggacacaggcgggtgaggccacagccctcgaccctcgggtggggaacttgagctctgagggccccagagctcgcacacccagtatgagctgaggcctcataaaggtgaggagtgaccttagcacctcaggcccaacttaccaggtgtgtttaaaggtccaggtgaggggacactgaagttctgtggggtccgcgccgtcactgggctctgggagggctgcggtgaggggctgggcaggaagctactgggagatggggcagggccagagctgcagccaagtgagagaaacatgtgagccggggtccaggcagggccagcctcgagggccaggtggggaggggcaccccaggccaggcctacctgac

SEQ ID NO: 40523 - DNA, 1694 bp, Artificial sequence
  DNA replication origin
cctcagcggctcttgcccggcttagaggaggaagaggcgaaaggaaagacacctccctcactctggcctaaggcaccacggctcacctcactgctgtggttggtggttgctgccacggagactgaagagccaccggagtagtaggagggtggcccacagtgcaggagctgctcagtgcccggcttaaaggaggaagagaaggggaagacccctgtcccaagctggaggctggagctcttggcacctcggctggcctctctgcgattggtggctgtaatgaagactgcagccccgcctgagcattaagaaggagaaaatagtttttgggtaaatggagggagaaaagagagtggcaggtggaaggagtacagagagagtagtaaaggggggaaaacacgggggcgagcaagagggagaggaagttttgcgaaaagagagtggggagaaaagtttttgggtagatagaaggggaaaagagggtggcaagcaggagccataaaagatggtggggaaaagagtgggggaaaagtttttgggtagatggagggggaaaagagggtgacaagcaggaggggggaaggagggttgggaaaacgacggaaaaatagttttggggggcagatggagggtgaaaagagggtggcgtgtgggagaggggcgggagtggggaaaagaggttgttgagcaggagcggggagaaggctttgtgaaaagatggtgaggggggaaagacaagaaaaaggtttttgggtagatggagggggaaaagagggtggtgagtaggagggggcaagagtggtgagcgagggagacaaggttttccaaaaagaccatggaggaaaatgtttttgggtagatggagggggaaaagagggtgacaagcgggagaaggaaaaggggtggtgagagggagggagagaaggttctgcgaaaagaaggaagacagaaaagaaagatggtgcagaaacaaaaaacgtgggtaaaaagcttttgggcagatggaggggaaaaagtggcaagtgggaggagaagagagggtggcgagagggaggtagggaagaggattgggaaaaagatgatggggaaaatagttttggggtagatggagggcaaaaagagggtggcaagcaggctaggggaaagaagagggcgagcgggaaggaggaagggctttgtgaaaagacagtggggaaaaatttggggggtagatggaggggggaagagggtggcgagccgaagtggggagaaggctttatgaaaagacagtggggaaacgtttttggatagatggaaaagagcgtagcaaggaggggaaaaaagacgatggggaaacagtttttgggtagatggagggggcaaagagggtggtgagtagcaggagtaggaaaaaggctttgggaaaagatggagggaaatgtttttgggatgatggaggagcaaaaggctaatgagagcggaagggggaaaaagagggtgggtaaaaactgtggggaagtttttgggtagatggggaaaagagtggtgagtgggagagtagagaaggtgttgtgaaaagacggtggggaaaaaatgatggggaagaagttttggggtagatggaggaagaaaaaggatggcgagagggaggggtccgaaggcggtcaggaaaagaaggcagggaaataatgatgggggagaaagcttttgggtagatc

SEQ ID NO: 40524 - DNA, 1288 bp, Artificial sequence
  DNA replication origin
ctccccagcccactggtctgacctgctcccgcaggggaccaggcacaactctgagaagtcagaggccctggggaggtggggtcctcgttgccttggtgatattgcaggcggtccctgctgtgggcctgggagctggtcccctggcaccaccctggctccgggggcctcccagcagtgtggggcgctgacaccaatcaccacttcatgcgacttcctcggcccctcctgtctctactgcctgggcctctggcagagtcacacccgccatggccagctctgagctctgtctgctcggccatctgtcctgctgccactttgtcctgcaggaacctaggcccagagctgtgagggggaggccagagcatgcccagggcctccactggggatgtgtcccgttcctttgagtggtgacatccaggtggcagctgggggctcctgactgtagcaggtggtagggctgggctggctcagcacactactgaccatggctgccagggagcaggccggggaggccgaggcagagctggggccacaggcaccagccaggcagcatcctttggggcatgggtgagtggcgagctgtggagtgctgccaggaggctgggattccaggccagggacggggacagcccgctggtggagtccgaatgccaggcagaggggatgcacacctgcccatgctcctgccttgcaagagggcgtctgcctgggatcagagcctggagcgtgtgggaggagagttgtggggtcccggcatgggcagggtggcaggtgggtcccgcgtggttgggattgggcacgaggaggccttgtaactgttgctggatcagctgggtcaggggccgcacaccagtgacctgggggtgggggtgcccctgggtgggagctggtggtgctgaggtggccgaggacttgtccactcccaagggaaggtgctggtgggagggggtgccacctccgcagccaccaccctcgatgctgacctgggttgcactggcatctcattgggcgtggggactccgagactccaaaatcgggtggagacatttggggacacagctgcctgaattcctcatggccaagggggtgggcaaaggctgcagggaggaagagtgtctgctgtcctggccagtgcaccaggaacggctttctaacccgggcagggaggcgtgaagcattcagaatgtagggggcacacagttcccagtgtgcacctaggggtgaccaggaggaggagaggtgccagggcctcccctacccctgccccaggggcactctgtaggcggga

SEQ ID NO: 40525 - DNA, 1430 bp, Artificial sequence
  DNA replication origin
ggccggggccgcccccttggggaccctgcgggcctcctcgggcgctggaagctgcacctgacggagctcgccgacttccagtacagccagcgcgagctggacaccatcgaggtcttccccactaagagcgcccacggcaaccgcgtctcctgcatgtatgttcgctgcgtgcctggtgccaggtacacggtcttcttctcgcacggcaacgcggtggacctgggccagatgagcagcttctatactgggctgaactcccgcctccactgcaacatcatctacgactactccggctacggtgccagcgcgggcaggccttccgagtggaacctctatgccgacatcgacgccgcctggcaggccctgcgcaccaggtgagggcgaccctgggggcagctcagcctgggcacacccaagaggggaccaagccgggggccggggggcgggcttccctgggaggaagttgggcggccctgcaggaggggagccacagtggatgcacagggccagagagccggacaggcgagcttgggtgtgcaggtgccgcctccacatggctgaggtgtggccaggcggtcctcccacaccctggcctgtggagccaggctccctgggaacccctggcctgaggacgggaaggggctgagcttatcacaggggcgtggatgccacccggcagtcgggagtgggtggtggtctgggggtctgtgcacgtgtggctgggagcccatctgcggaggcagcacttggggccaagtgaggcgaggctgctgcatccaggtcccgaggcctggcccatgaggccctgtggctgcggagcttggccatcctggggcagggcctgcagggtaaggtgcagacccccagcacacacccgaggtctgggccagcctcgattccagatccagccctcctagtcatccaggtccccagccctgcgcttgcctgggcccttcaccggtgtttgagcaccgcccgggccagtgctgctttggacgaggagacccgggtgggcctctggtggcctttcctgctcgccatccactggggctgtctcgtcctggccctccccagcccactggtctgacctgctcccgcaggggaccaggcacaactctgagaagtcagaggccctggggaggtggggtcctcgttgccttggtgatattgcaggcggtccctgctgtgggcctgggagctggtcccctggcaccaccctggctccgggggcctcccagcagtgtggggcgctgacaccaatcaccacttcatgcgacttcctcggcccctcctgtctctactgcctgggcctctggcagagtcacacccgccatggccagctctgagctctgtctgctcggccatctgtcctgctgccactttgtcctgcaggaacctaggcccagagctgtgagggggaggccagagca

SEQ ID NO: 40526 - DNA, 803 bp, Artificial sequence
  DNA replication origin
cggatgcacgggcgggcggtcgggagccatggagcgcggccctggggcccgggggcgcgggccggggtggccttcccacggcacgacatggagacctgtggttgcgaggctccctggggcggcttggaccgcgatggggctgggccctggcctcctaatggggctgccgtctggggctctcacccctgcccgcgactcggagcacccccacccctcccctgcccggccaggccgggcggcgttgttggcgggggccccggtggaggcccggcccgggaggcgcctgccatgaacgggctgtcgctgagtgagctctgctgccttttctgctacccgccctgccccggccgcatcgctgccaagctcgccttcctgccgccggaggccacctactccctggtgcctgagcccgggcctggtggggccggggcctggtggggccggggccgcccccttggggaccctgcgggcctcctcgggcgctggaagctgcacctgacggagctcgccgacttccagtacagccagcgcgagctggacaccatcgaggtcttccccactaagagcgcccacggcaaccgcgtctcctgcatgtatgttcgctgcgtgcctggtgccaggtacacggtcttcttctcgcacggcaacgcggtggacctgggccagatgagcagcttctatactgggctgaactcccgcctccactgcaacatcatctacgactactccggctacggtgccagcgcgggcaggccttccgagtggaacctctatgccgacatcgacgccgcctggcaggccct

SEQ ID NO: 40527 - DNA, 910 bp, Artificial sequence
  DNA replication origin
ctctacctggcgggcgcgcgagggtcggtcccgcaggcagcgccgcgaggtgcttcgcagagtaccaggctgatccgcccgggcccgcatctctgctctaggcccttgggaacgggtgatccacccagcggacccaggtgggggactcggccaggacttcccagtcctcaatcatgagcctgcggctggtccttcctggcgactgcgggatcctgagcgacccagtccgccttgtagcgccaacctcagtttccctctgcaggctgctgcggaggcgaagccaggaagcgctgcttctgcaaggggaggtgcgcgaggcggcgcgggagcgcgcgcagcgggtgcgcagaagactggaggaggcggagcgccacaaggaggacttggtgaggaagagtcctggaatggggctggacccagggtggggtggggcagggcgggcggaagggggcaggatccgggggtggggtgaggtaggaccggcggtgaggccggcaccgccccaggaccctgtccgcaggagcagcacagcaggcagctgcagggcagtgggaggagctgtcgagtcaggtacgtgcaggagatgggagggcctgtctcttggttcctctcggaagtcctgcccttgccctcgctctcattgcctccccgtccctgtctcccctgacactcgttcctccagaagcccggtaaaccccgtccttacgagccccgcccctagctcttctactacggaggggaactgcagagccagaagagcacggagcagcaactcgcagcccaattggtgacgctgcaggtgcttgagcgggaccctgaggtctttagtaggggcggagcagcagcgtgagcggggccgtgaccacctgggggtgtggcttaaggcaggccctgaaggcgtgggcggggc

SEQ ID NO: 40528 - DNA, 945 bp, Artificial sequence
  DNA replication origin
cctgtctcttggttcctctcggaagtcctgcccttgccctcgctctcattgcctccccgtccctgtctcccctgacactcgttcctccagaagcccggtaaaccccgtccttacgagccccgcccctagctcttctactacggaggggaactgcagagccagaagagcacggagcagcaactcgcagcccaattggtgacgctgcaggtgcttgagcgggaccctgaggtctttagtaggggcggagcagcagcgtgagcggggccgtgaccacctgggggtgtggcttaaggcaggccctgaaggcgtgggcggggcggggatgtgggcggggcataatcgcctgggggcggggccctgagggctagatacgggcggagcgcggagggggcggggccatgaccagctggggcgttgcttacgactggtcctgaggacgtgggcggggtcatgatcgcctgggggcgggcactgagggccgggggcggggcccggaggcgcagcgggttgccggcctgcggacctcctgacattccctgggtccttctcaagaatgaactggagctggcggagaccaaatgcgccttgcaggaggagaagctgcagcaggtgagggcagaagcgggttctgttggaggagggtaggctttcgagtgtggatggggaagggcctgtcgccccgcccccgccgagtctaacccgggtgtccacacccaggacgcgctgcagacagcggaggcctgggccatattccaggagcagaccgtagtcctgcaggtgcggccccactcagacgccaaggtgcctcccgcctctcctcccccagacctggggcggtaagtctcccaacccaccgccaggacgcctccccgaggcctcagtccgcactctcacccgctccaggaggtgcaggtgaaggtgatggaggctgcggaggagctggac

SEQ ID NO: 40529 - DNA, 1890 bp, Artificial sequence
  DNA replication origin
cgtcgcgcgcaggtggccccgccctcggagccgaccatcgcgcaggtcggctggggggggcccacatccggcgcgcgcaaccgcagcctactgtccatcccctctctcccctgcagcggtgggcccgccccgcagccacgccctatctagtgtcagcaactgagaggtcacgtggcgggaaagccggatgcacctacgcctgcgccctgaggtcgggcgctcgcgggccaggagcggggagccggcgggcagcgccgcggctcgtgaggtgatggcggcggccccggcccggggaggcggaggcggaggcggaggcggcggcggctgctccggctccggctccagcgcctcgcggggcttctatttcaacacggtcctgtcactggcccgctccctggcggtgcagagaccagcatccttggagaaggtaacgtcggcgggctgggccgcgggctgacaggaggaggggctggggtgacgaagcgtggaggcgggacgagggtctgtgggaggccgaggctgggctcgccggcagcctgtgcgggagggggcgcctgagcggagggatctagcgggggaaggaggccctagtgggaggggctggtgaagagagagggaccgtgggggaagggtcggcggggcctgcagggccgctgcaggtgggtggttgtgggatgggggtgggggatgtgagctgctggcccagggagcatcttgtgacatcgcggaggtggaggctggatcgtgggcggctgtgcggagcagtgggatgagccgaggaccaggggtcaagacctggggttctgcttccgatttcacctgctttttattccgcgaccttgggaagatggctttcttgtaaaatggggatgcttttatctgctttgccggcttcaccggactgtggtgaccaggagacgaaacactgtcttgaaagtgctttgtgactgtaaaccaactgcgcagtgttattctacgaggctgggggcgttaggttgggtaaaagattgtgcgtttgcagaagggacagtggcagggaaaggagagtgaactgtcagtgggcagagaagtgaacttggaattgcttcagaagagaaaggtgaagtcatgccagagcaatcctcatcttgggagaaaggtgaaaggcaactcagtggtgtgccttgagatctggaaagagacagattttagagtgggacctgaatttgttccctgcactggcacttacttaccatgtcctcttgggtaaatttaactcttagagcctctgtatccttatctgtaaaatgaggttgttcttgagaattaaatgagttctagcataaagcatcttgcacaggtcaaggcacagagtgggtgagcagtaaatgtcaactttctttgcccacccgtgtgcgatgagactcagcacagtgtttagctctgaaaggatggaattattttcccactcaactttttggcacatggagagaggatgttttccgacaagataagacagtggtgaccggagaccagcctgctgcagttgggagtggttttgtggctgtctgctgatggatgaagctgaaaggctgttttaggcacttttggcagagtgacctggtccttggccttgtcggttctcatatttgattttatcatgcaccttcggggtgagaaggtcccggcagattggtgctaacctgacttctagctaaagagggagtacaatgcaatggaaaggacatgagtttggaaaatggaacctctgaatttaaatcctgtatcacttgctttcactagtgtgactctagacaggtcagttcccttctctgatactttgctatcttctgtcaaatacaaggtagtacttcataggagtattgtgaagagcaacaaaaaggcacgtgg

SEQ ID NO: 40530 - DNA, 1195 bp, Artificial sequence
  DNA replication origin
gtctccactacaaatacaaaaaaaattagccgggtgtggcggcgcacctgtagtcccagctactcgggaggctgaggcaggagaatcgtctgaatcccggaggcggaagttgcagtgagcccagatcatgccactgtacccaagcaagggcgacagagcgagattccatctcaaaaaaaaaaaaaaaagaaaaagaaaaagaccctccaggatctcggtctgttgcccatgctggagtgcagcagcacgatctcagctaactgcaacctctgcctcccgggtacaagcgattctcctacctcagcctcctgagtagctgcgactacaggcgcaccgccacacccggctagtttttttttttttttaattttagtggagacagggtttcaccatgttgcccaggcgggtctcgaactcctgagctcaggcgatccgacgcctaggcctcccaaagtgctgggattacaggcgtgagtcactgcgctcggccagaataattgttattgaaggtactactctctgaaatctaaggatgggaagaactgatgaagatgagttggagcaacaaactcttaacccgcacactatttgtctaggatttgggaagtaaaggtaagaccctggactcaatcaaacccaggctttggtcaactaggcagctgtctgggctgaagggacttcaatacctctattggttggttaggtggagatgtcaatgatgcgggaagaactcgtggaccacctgccctgatgcttcagggtatcacctgacactcgcaggcacatagtcctctctttctggctcactccggaaggaatggccaaaaccctgtgccagattttgcacaggaaataatgtcgaagaaacggactctccatttcccaaacctaggacctgctgttcagaatttttactcacctggacagaaaataatctggcgtttccccgtgagctaggcgtaagaaaaaaaaaatcaacgaagcagactaatagctaaggaagatttctggggtaaactgccctcttcaagtactccagatgcacatacctttacatagttaacagattgttaccaccatcgagtcactaaggtgcaagaatctatgctaggcaacttgagaattctcaaaagattgtgagcaaaacatttctcgtctccgtttgacagcacagagaccggcgagtccacaccag

SEQ ID NO: 40531 - DNA, 1678 bp, Artificial sequence
  DNA replication origin
ctggaacgcgggagcgggcgcgaccagcgcccaccctgatcgtcgcgacggtgctcctgattggctgcgctgtgtgacgtaacgggagggccccggcggccgccgggagccggggcccagcgcgtgcgcagacggagcgcgctgagcggagggggaggtggctgccgcttctcccgcgtccgccattttgttgctgtggctattgggaacaagctgggcaaaagcaccccggaggcgcgacgctccttcgagttcggtgcctcgtgtgacggcgggggtcggtgaagacccgtcgagctgcggcgccggcgcgttccaggccgggagtcactggaggcacccctgggacgccgagcagcccgagaaccccggggtggcctccgctgcggctcgggtttgcctgccccgaccccccggctctgccgtgcattcccgggcggctctctccgtgtggcggccccggagcaggcgggcggcgtcggaggatgctgcgggcccggagccgagaggaaagtgctggcccagccctctgagcgctcctcgaggtgtgcgagaggcccttcctcggccccaaagccgtctgccgggctaaggcgtgcagagcaggcgaggacagccgccgcccctaccgccgcagagtccccggtccaacaccatgtcctccgccaggttcgactcctcggaccgctccgcctggtatatggggccggtgtctcgccaggaggcgcagacccggctccagggccagcgccacggtatgttcctcgtccgcgattcttccacctgccctggggactatgtgctgtcggtgtccgagaactcgcgggtctcccactacatcatcaactcgctgcccaaccgccgttttaagatcggggaccaggaatttgaccatttgccggccctgctggagttttacaagatccactacctggacaccaccaccctcatcgagcctgcgcccaggtacgcgagagccctccccgaccgcggaggaaggtcgagaaccgggtctgtcgaagagtgcttgtataggggggtggggcgcgcttgaacccatattccccgcattctgaaccaaattattttccagaaggccttcctaacagaaagctagtgtcaggatctgggtcactggataagaggatgcgttttttttttttccctctcacgaggctgtttctcaatgtgaagaggatgcgttttgaatgtttaacggtggttgcatagttaaaatgcacgctttttgcctttcgtgactttctctgggtgtaatactgatgcagggatttgttggtttttctaaaaacctcttttttttttttttttttgagacggagtctcgctgtgtcgccaggctggagtgcagtggtgcgatctcggctcactgcaacctccgcctcccgggttcaagcgattctcctgccttagcctcccgagtagctgggactactggctcacgccaccacacccagctaatttttgtatttttagtagagacggtgtttcaccatgttggcctggatggtctcgatctcttgccctcgtgatccgcctgcctcggtctcccaaaatgctgggattacaggcgtgagccaccacacccggccaaaaaccgtttttaagccatagacttctttgagaatctgaagatagccgagcactcaccaccccaccc

SEQ ID NO: 40532 - DNA, 1349 bp, Artificial sequence
  DNA replication origin
tgagcctaggagttccagactgcagtgagttatgactgtgcctgcgaatagccactgcactccagcacggtcgacatagtgacacctattgagacatagtaggatctcaattttttttttttttttttttgagacagtgtcttctgcagtggtgtattctcggctcactgcaacctccacctcccaggtttaagcgattctcctgcctcagcctccccagtagctgggactacaggcttgcgccaccatgcctagctactttttgtgtttttagtagagagcaggtttcaccatgttgaccaggctgctcttgaactcctgacctcaggggatccgcccaccttggcctcccaaagtgctgggattacaggcatgagccaccacctggccagcatctcaatttttaataaataactaaaaaataacttgtttgaacaggtatatcttggccagcaatgctggactgggttcctttgaggtgagggaaactcttggacatgggacctagtgggggcctctgcttgcctccctgctgggttaacagtacagctggcccagccagtcttgaaaccttaccctgcaacaaaaacttgacacctccaggctggtaattctggaggtgtcttctctgccaagtcggtgactccccaacccgctattatggctggactctgctcttgcagtcttagtgtacaccctggttcttcaagggcagcaagcaggactattccggtagcaaccagagctggagctcagggccccgcactggaaagctggggcagcttaggtggtaactagtgtgctgaggatgaggggcgctatggagcccaggcgggtttaggaagcattcttggcttcctggaggaggggaaatactggtaattcaggctgaaggagctggatggggccaggggcagtgactcacgcctgtaatcccagaactttggaaggcctgagacgggagggtcgcttgagcccagaagttcgagaccagcctgggaaacatggcaagacctcgtctcaaaaaagccacgcgtggtatgcgcctgtgctcccagctgcttgggaggctgaggctggaggatcgcttgagccctggaggtcgagactgctgtgagccgtgattgcaccactggactccagccttggtggcagtgagaccctgtccccaaagaactgggtgatctcgaccctccacatcgctggctctccacgggcgctgcacagtggagacccaggatctgattgcataggactgggcactggagtttaagttctccaggggggtttaatatgcaacgaagttgggaaccactaccagtgaaccccttcattctgtgcggctccag

SEQ ID NO: 40533 - DNA, 867 bp, Artificial sequence
  DNA replication origin
ggggcgggtgtggagggcggcccaactctcgtggcccctggtgcttccgggagctccgtcctcgctctcggatcccaaggaagaacttgacctttccctgacatcctccagtgcccatggcttctggcgtccacggatggcggggaggggaggggggcgcattcagcgactgcagagactgggggctgtgggccggggcagctgcggggcggagggtggcgtgtggtggggttgggtggcgtggggttgcagaaggcggggcatggggcccaacggccggctgcgccgcccttctccgtatggctcttcggagccgttgcatttgccctctcagggcttcctgggctctcggccctaagtaacctgtgtcccagagtccctgagggaggcgcaggatcactgagctctgccctccctaagatggaagcaggaccgtgtggaggagggacggccgcatgggatggccagggtgggggccccaagaggacagcctccgcccgctcgcccgcccgccaaggaaagccctgggggaacacactttcaggctaaggggtctgaggaagagaagactaacaagggggaagccctcgagatgcccaacagtcaagtccgggaaggacggagtagataaccagtaactgcctagagggtgggagccaagaagaggaggggcctggacagggctgcaaggaggaagacacaggcccccatgccagccttctggaaacagcggtttgcagaccacctgagctcaccaagacagctctgaagaatttagggaattatgctttggcttctgggttgaaggaaaaaaatagctataggatgcagcattcaaaagacccgtaggcagggcgcggtggctca

SEQ ID NO: 40534 - DNA, 1557 bp, Artificial sequence
  DNA replication origin
ggggccgttgtgggacgagagaaggacgaggtgagcttcggaccccggccagtgcctctggccccgcttgccaacccccagcccctaacgtgccgggccggggtccgagacttgggagcgcaagcgctggcccccggcgccggggcgaagaggcggggcggcgggcggggaccggggttccggggaccagggtccccggggcgggcgctcacctgggctcggcgcgggcctgggctcgggaaccgcttggggccgcgggcgcgggggggcggggaggcgcgggcggggcgtgtctggcgctgcgtttgcactgcggccggggagcccgcgggcccagcaccgccccgccgggccggagcaggtggggggcggccgggggacaggggcaggccgaggccctcggcgtccggaccggagtcgcggggcgtagggaggcagccaggggccgctctggccgggggcgccccgggcccgagtctgggtctccggggatcctcgcgacctcccagggatgcccagctggggcgcgggcagggtcttttttccttttctttctttccaaagtctcagaaccatctgtgggcggggtgggggaacttgaatcactctgagaaacctccacaagaaagaaaaccccaatcaaaccttgctgcccacagctcccttcactggttgggggagttcaggttccccggtgtcctaggttcctcccggccctctctccacacataccagggtctgttttcaattatattttattacattttctttttctcacctgtcatttaccagaactccttgggtctccagaaatcacagtgcaccctgatgttgtgcctcctcctccaggaggccctccctgatcagcctcccctctattagggctgattattctggttcctaacacttgggtgtttcattgtccttaatgtgtgcatctctgcgttgtaggtagaccttgtctttcaagcaggctggagcacagaggctgtgtgggttcctccccggtctgggccttgctctcctctcctgtaaggaggacaataatgacagcagtaaagtcccctgtgccaggcccagccagccttcccaggccatcctctgggactatttatgccccaccccacccagggggcaagttcgagcccccaccaccaccaccctcctacaattttacagataggaaatgcagcccagggagtcctggtctcgttcagggtcaggaacaggccctgcatgggtcacactgggggcaggtggtggggtgaccaggcccagagggcacatgtggctcagttcaggcaagtcctctcagctcatgtgttgcttccacagtgggaccgttgccactgccacaggagagtcccatcacagggcagatggcagtgcttggggctggtgccctcagtctccaaccagcctgcccccatttcatacacgtggtgatcttgctgccccacccaccttcagaatctcctctagccaggaagacagtgtgcctcatagtaactacagctgtgattttgcatgcatttatttccttacccatcacaacag

SEQ ID NO: 40535 - DNA, 1511 bp, Artificial sequence
  DNA replication origin
gcgactccggtccggacgccgagggcctcggcctgcccctgtcccccggccgccccccacctgctccggcccggcggggcggtgctgggcccgcgggctccccggccgcagtgcaaacgcagcgccagacacgccccgcccgcgcctccccgcccccccgcgcccgcggccccaagcggttcccgagcccaggcccgcgccgagcccaggtgagcgcccgccccggggaccctggtccccggaaccccggtccccgcccgccgccccgcctcttcgccccggcgccgggggccagcgcttgcgctcccaagtctcggaccccggcccggcacgttaggggctgggggttggcaagcggggccagaggcactggccggggtccgaagctcacctcgtccttctctcgtcccacaacggccccttcccggctcgccgcggggccccactgtgtgccagtcccccttctcgggctgcaaggtctggcgggggcaacgggacggagccggcgaggctgctggcatcggcttcccagagagagggaactgcacgtgcagaggcggggagagtggacagaggcttgccctgagctccgtgggggaggggagagcgcggagcccccacactcgaaggcaggactgggatcagatgccacccctaggacgcctggaagccactgggagtccgatctgggcaggagcccttgggatgaggcagtgggggcaggtggcgagaggtggaggagtggggagaggaccctgcccagcctgcaccctgggggcgccaggagccctgggagggtcaggtggagcaggggccgctctgtgagatgggagtaatccagtcccgcctcacaggtcctggggtccctgggacagacacagactcctgctgggtggttagcactgggctctgctagaacttttctgcagtgggcagctcatgggcaaggaatagcactcgggcgctctgcactctgggggtccctcctgccctgcccctggcaaggacctttgcctttgagtggggtgactgggctccaagccgatctagcacacagtaggccgaaggcacaggggccccacccagtctccttcctggcccaggccctgggggattcaggtccctgggtactcgggaagggacagcacagcctgggcaggtccccagtggcaagaccaggtctgaccttttctgggatctgtggcccatcaggtgaggcctgaggtcagccaggaaggaagcgggcagggctgaaccagggctgaaaccaggacccaggaagggacagcctagtgcccagggaaggggcaggtggggcaggtggcagttgagttttacagaccttctttgatgacaagtgggggaaagagccaaggcacgccccagtggctgtgggagccaccgcctcctcccctgtaatgggcacctcgaggaccgacaggcgcaggggccaggcaccaagggtccctctccaacctggccttttgtttccaccccttgctctcaggcac

SEQ ID NO: 40536 - DNA, 1212 bp, Artificial sequence
  DNA replication origin
tgcccagaaaggccaagaaggcagcccgagaccacacaggggatcagaggaggcaaagagagccaggatctgcccactacaccctcacagcaactctaagaggtcagggtggccaggccctctcttttgcagagagaaaaacagaggctcagaggggtaacttgcatgccctaggtcacagagtggctgagcgtgtccccagctccccccttccctggccctgggggcatagccccttccccaaccctgcaacaggaggaaccctgactttccttttccaagaagggtcctgctgttattcccaccaccaacactcaaagccccaaagaaaaaggggcacccactggagcaggggccagctgggggaactgctccaggccccctaccccctcctggcggcagcgtattaacattccgagcgggttcttggatagcctgacctacttcggaggcctaccgagtgcagagggggaggggggggagacgggggaggaggaggcggggagggaggagaaaggatggagacaagaagacaggaggtacctggtttgggtttggagaagcagccgcccatggcgagtggcctgaggatggccggcaggcaggagcacagatggggagctgtcggaggcctagggcgccccccatggggctggaccccctgcaggccttagagacgctggagccgccatcctgctggagctgctctaggacctgcaggggagactggagccatcaggaccggggcgtgtgggcaggtagagacacagagggacggagagagacagtgggagcttcggaaagagtcttacatttgagctgggaaccatggcgtgagcctgatcccagagcgtggggccctggaggtcacctcccctttgaagccctccaagctcagctccctcactcctccagtggagttcctctgcccgaacctcggccgcccatcgtccagccccgcggctgccttgcccaggaaatcctccctgatttctactgcctcctcgtgccccccttcccctctccaaatcccacagcctgagagctctgggaccctccattctcccgggagaccactatgcctaggctcaaagagggggtcaccttggggaagccaaagcccttctcatccttggtcttctccctcctacaatgggggtgacatcaggctccccctagcccagccccaccctggctagcactccggacacc

SEQ ID NO: 40537 - DNA, 865 bp, Artificial sequence
  DNA replication origin
tgccaggcagggctgagcctcctggcaccccgaggagctggcctctgcacccagcttgagggatgggggaggaagttggctgaggtggggggctcaaggcgctgccttgcccacagtggagctcaagatcgaggtggtgctgcctgagaaggagcgaggcaaggaggagctgtcggccagtgggaagggcagcccccgggcctaccagggcaatggcacggcccgccacttccacacggaggagcgcctgtccacccctcacccctaccccagccctcaggattgcgtggaggctgctgtctgccacgtcaaggacctcgagaatggccagtgggttctgggcttgcctgggagcggggatcaggggtcccaaggtgggagggtgagggggccatagccgggggtcggggttggcctgaaggggctatgaccagctgctgccctggtcactgcctttgtggcttctaccggtctgggcctgctccccagaaggctggacactgggaggagctgccaggaggttgtgcctggtgtctggcctgacctctgagtgctgcggttccccaggatgcgggaagtggagctgggctgggggaaggtgttgctggtgaaggacaatggggagttccacgccctgggccataagtgtccgcactacggcgcacccctggtgaaaggtgagctgtcaggtgggaggcgtgagggggaccttccaggccccatgccagcttggctcctccccagaccccaggatcttcatctattagtgaagtctcctgggctgtggggaggggcccgcagttgccggggcactgagatccttgggaagcaacccctgctggtgggcgcagcctaacacctcccc

SEQ ID NO: 40538 - DNA, 1068 bp, Artificial sequence
  DNA replication origin
gggaggagctgccaggaggttgtgcctggtgtctggcctgacctctgagtgctgcggttccccaggatgcgggaagtggagctgggctgggggaaggtgttgctggtgaaggacaatggggagttccacgccctgggccataagtgtccgcactacggcgcacccctggtgaaaggtgagctgtcaggtgggaggcgtgagggggaccttccaggccccatgccagcttggctcctccccagaccccaggatcttcatctattagtgaagtctcctgggctgtggggaggggcccgcagttgccggggcactgagatccttgggaagcaacccctgctggtgggcgcagcctaacacctccccttcccaggcgttctgtcccgtggtcgggtgcgctgcccctggcacggcgcctgcttcaacatcagcactggggacctggaggacttccctggcctggacagtctacacaagttccaggtggggccaggagtgcgatggggtgggaacctgggggtgtggggttcggggctggtcctgagcaatgcagcccttgcaggtgaagattgagaaggagaaggtgtacgtccgggccagcaagcaggtgaggggatagctcggggctcaggcagaagggaggagccgggagggcatcttggcccagagaatgccatgtgcaaagccctgtggtgggaggagcttggcacgtgtcactggagcagagtgaggggttgcggtagggatgaggctgggctggagcgccaggacctgcctgccaggatgatggcatgcagaggatggcagtgaccctccaccctcctggcacccacaggccctacagctgcagcgaaggaccaaggtgatggccaagtgtatctctccaagtgctgggtacagcagtagcaccaatgtgctcattgtgggtgcaggttggtagtggggtcatgaggggcagggtgggagatgggattggtgagaagtggttcctggcccacgggcccctcccctcaggtgcagctggcctggtgtgtgcagagacactgcggcaggagggcttctccgaccgga

SEQ ID NO: 40539 - DNA, 1262 bp, Artificial sequence
  DNA replication origin
cggagccacgcgcagacccagggcatgccgggaactgcgagccggccgcgggtcttcgggctgcgtgggcctgggaggcgccgggaagagcagtcgcgacggggctagggacgacacactgcattcactggaagggacaacgcagcgccagtacatagcctgaaacgctccccagaaggtcccacgctcgccgcgcggtcgacaaccgcatcctgcgctcgcccgcggtgtctcggcaagcggtaggcttgtcgggaagagctggagggcgcaagtgcggcgctggccggacgtgccgcaccgtcagcgcagggctcgccgggaaatgtggtttctccagccggcccggggcggtggccgcaagttgggcttacagcgcggccgatccggcgtggacccgggatggctggaccgggcagcacgggggggcagatcggggctgcggccctggcaggcggcgcgcggtccaaggtagccccgagcgtggacttcgaccatagctgctcggacagtgtcgagtacctgacgctcaacttcgggcccttcgaaacagtgcatcgctggcggcgcctcccgccctgcgacgagttcgtgggtgcccggtacggtgggcttcatggggtcctgaggacaggaagggcgatctgcgagggtcccagggcgggtccaggggcgaagccggggggtggtgtcctggggtaggatctggtaatgaggtggatggtgctgtacaggacgctgttcagggcaggggagagggttccgagggagtcccagagcccgatgtcccgggacagggtactggaactaagttgtgtttgtggatattgggctggggtcccaggtgctctgaggtggggtgaggagtccagagagtcctggagccgtgtcaggggtcctcacttgcaggatgattggtgttatcttagaagatgatggatcttagcagttgagaggtgatacctaacttccgtggcagctctcctgcttagtcccattccttgggtgccccccaggagggtcctgtccttaccgccctccactcctttctttccaggcgcagcaagcacacagtggtggcctataaagatgccatttatgtatttggtggagacaatgggtgagtgagtctcagcatcagtgtttggaccaggtagggagaagtactgtggtcagggactgggcctgtccagctccattactgtcctttcagatgctagctggtgcctctaagcttcagtttccccatctgtgagattcct

SEQ ID NO: 40540 - DNA, 1175 bp, Artificial sequence
  DNA replication origin
gcaccccacctccgacagcactgagacccggagcaggccgtcctggcatttgagggcttaggctgggaggattttgagtgcctggtggattttgagtgccactctgtctgggggtttcttgggagggggatggggaaagaggaggatggacagatggaggtgagggccactgggtggagccccgtggctaccagagtagcttggatgaggatcctcagccaggagttgccctgcggagctgagttggtgggcgggtgggcggtgcccaggctcaggcccagccctggttcttgcccaggccaaaggccttttcctccttattttagaaagttggctttgctctctttttctgatcacaaaagtagcatatgctggtttcccaaaacttcagcatcatagaaactcctaacgatgcagtgatggtggcatctgggatatctgtgtcctctccccacccaggagggacactgagtgaggagctggcactgccacactgccctgatgtcatgcatgagagtacttgttctgtctgggccgggcagggggcctggcacagcagggatttgaggcagtggctgccaccccacacagaagttcccgcctcatggccgcacaagtctcctaccctgtgtgggggtggggctcctccctgcagccatcccttccagccaggactaggcccaccctgaccaccagacccaaggggtcctcactggtctgtcctaatacaggttgaatgacatgtggacaattggcctccaggaccgagagctcacctgctgggaggaggtgaggggcgtggggagccagggcgcaggtagaggaggtgaggggcacggggagccagggcgcaggtggaggaggtgaggggcatggggagacagggtgcaggtggagggaggtgggaggcagggggagccaggctgggggtcgaggctgctttcttccccttgcaaagcccagcctcgacctgagcctcgctctcctccctggtgacctgcgggccttcacgaccagttcctcactgtggctgcacagtgattcgaggtttggtgctttggatgggcagagtgccacgtgtgtgaggatgtggttttgctttaacgcaccctttatttcagtgcagtgagggccgtctgctatccagtgtcctgctccctggagctccccctggg

SEQ ID NO: 40541 - DNA, 1973 bp, Artificial sequence
  DNA replication origin
tggagggaggacggtcagttccctcgaatccttctgaatatgaagaacgcctcttgcacctggtggccatggtaaccatccttgtgagctctgcaaacagcaggaggttacagcccggagcagggatgtgcggtgcccctggcaggtccccaggatatggctacagcttagcaagataaggcctggcgaggaggcccctggctaggcctccctctgaacgtgaaggacgtccccttcctcgtgaatagcttggtcagtgccaccagtaacagacgtggcctgcatagatctcaaataatggcagaagaccagaggggcctgcaggtcctgagaggtctggcccatgctgcccctggctgctggccagcccttgatccctgcaatggggctgcaggagagggcacaaggagtgtgagctgcaggtacagggggtttgggaagggacttgggagcttccctggaggccacgggtgcgtgggaggaagggcagggagccccaggatgagggaaattgtcaagggcctggggctcagcatggagccagatggcatagccctgccaggccaggatctgttctgaagtcttcagctaacttagcaaaagagaggacttgctgggaggtactgggaagcctgggaggtggaaggtgctggggcagcatcaggatgtggggtacaggcagctcccaggatggggactcagctgtggggatgctctgactgggcagcgtgaacacagtgacctgcaatggtctctgcacaactttactccccagagagcaggactgcctgggcgggtcagatgccaccctcctgcccatcactgctgcctgctccatggggagaggggggagctctggcaggaccctgcggtgggccacatggagccaggcagggctggtgcccgtgctggatggggtgagaggtgctcagcgcaggtgtctaggccctccctctggaccctgggctagtcaccgtaagggatgcagggggacctcccagtgaaggcctgctgtggggaggccccgagggtgagcaggagcccctgtcccagcattgattcactgttgtgtacccccaggtggacacgcatcccaactgaacacctgctccggggctccccaccacccccgcagcggcgctacgggcataccatggtggcctttgaccgccacctctatgtgtttgggggtgcggccgacaacacgctgcccaacgagctgcactgctatgacgtggacttccagacctgggaggtcgtccagcccagctccgacagcgaggtgagggtgcccaggggtgtcctgacctgccagctggacaccagtagctcctaccctgctcccacccagctcctcacagctttggggccccctggggttccagacagctaccaggagcaaggccaggacacctgggcctcagccctggacacctgccccggcctccagccccagcttcaccccacagcctgcaggtagttaacgcttcacaccccatcatggctgcatggggctgctgtgctgcagacctttcctgggaagcccacggccatgcagctcttccttctttcagaacccactctcaaggccaggatggtgggggtctctgggcacctacctggcccttgccaactggtctcatgcccatgtgtctcccctcttcaggttggtggggctgaagtgcccgagcgagcctgtgcttccgaggaggtgcccaccctgacctatgaggagcgggttggcttcaagaagtcccgagatgtgtttggcctggactttggcaccacctcagccaagcagcccacccagcctgcctcggaggtacaggctgggatcctcattaagactccatcaccccctgaaacaggtcctgtgatcaacacctctcacacatggggagactgaggccccgagaaatacttgcttggggtcacaccacaaagggggtacagggccaagggccctcaccctg

SEQ ID NO: 40542 - DNA, 1896 bp, Artificial sequence
  DNA replication origin
tgcagctcttccttctttcagaacccactctcaaggccaggatggtgggggtctctgggcacctacctggcccttgccaactggtctcatgcccatgtgtctcccctcttcaggttggtggggctgaagtgcccgagcgagcctgtgcttccgaggaggtgcccaccctgacctatgaggagcgggttggcttcaagaagtcccgagatgtgtttggcctggactttggcaccacctcagccaagcagcccacccagcctgcctcggaggtacaggctgggatcctcattaagactccatcaccccctgaaacaggtcctgtgatcaacacctctcacacatggggagactgaggccccgagaaatacttgcttggggtcacaccacaaagggggtacagggccaagggccctcaccctgctggccaggctgcagctttctggggtgggtgccacacactggcccaagtgccctgaccactctgagggtctccatggcccgtcatgccccactcgcctacatgggtaccaggtcccacctgtgtctgtacccaggggccctcatcccttggggaccctgccccctggcccttcatggccatgaggtgccgcatccttgccttacctggctgcaccagccgcactgtggaggctctgctcccccaccattccaccctgccttcttgtcccccagctgcccagtgggaggctcttccacgcggctgctgtcatctcggacgccatgtacatcttcgggggcacggtggacaacaacatccgcagcggggagatgtacaggttccaggtgtggggcctgtgggcctgtagagccggctgggtggacggatcccccgtgatgagaaactgaggccaagttggggggcagggcttatccaggccattgccagggccacacctggcaggatggaagccttgggaggagccctgtgggctgagggtgggctgaggtggcactaaagtgggcagccttcgtgcagtggggcaggcagatggtgctggggctcacggcagagtcagtggagggagccgggccaagctgggctcagcaccagagcctcacaggcatcatagcctggcccagggcagagccagggccgacagtggcttgcgttgacagccccttcccaggcctggaggagcaggtggtcagggcagggactcacagccacagtgaggtcagggccagcttcctggaggaggttgggatgtgctggtgggggccagtgtgaggacgcaggtccaggcagagtggagacggcagagctctgctgaggcctggggcccagccgaaggcaagagaggcaggggagccctttcctgctgtggagccggccgtggacagttgcaggtgctgaggctggagccaggctgtattttcagggtggggtagcggctgcttcctctcctcagccaggcccacctgcctcctgggccctgagggtcagcatgggccaggtggggacctcagggtcggcctgcacagccacactggggccaccctgctgtctgcaacatctagtctcactgggcccctcttgcagttctcctgttaccctaaatgcacgctgcacgaggactacgggcggctgtgggagagccgccagttctgcgacgtggagttcgtgctgggtgaggtgggtgcctgtcctcgcaccctgctctgcctgctgtgcctgggcagtgggaatttcgcccctcagaaaaacagctgctggcctggtggtgctgaccttggctggctgggtctctgttctctggggcgagggtcctgtgccctctgccagtgcatcattctttgtgcagaaggaggagtgcgtgcagggccacgtagccattgtcacagcgcggagccgctggcttcgcaggaagatcacgc

SEQ ID NO: 40543 - DNA, 1008 bp, Artificial sequence
  DNA replication origin
ggggtcagcgcaatcagggttgggtggggtgtgctcaggcttaggccccctccctgcccaccactgtgagcccctcgcccagcctggggccctggcttgactctgcctgcctgcctgtgcctgtctgccccaggagcactgcctgaacttcgtggtaaaggagtcccacttcaaccaggtgatcatgatgaaggagttcgagcgcctctcctctccactgatagtggagattgtgcggcggaagcagcagccgccccctcgcactcccttggaccagccagtggacattggtagggagccccgttccccttccctgggggctgggagggatggtgttcatctgcggtaggagattgggagccatggagagcacctgccaggccctcggggtgggggtgggtgccatgggaccccagagtgctctcctgggtacagggaggaaacagatgaaggcagaagcccccgacccatggggcttgccacagtgggctgtgtcctggtgacctgggatttcctgagccaatttctgggggtggacatggggcacctctttcgggctaggatgtcaggtctgatggcccagggtcacggtgatcagtctctggacttctctttgcttgtaatgtcacaggccccttcattcccccagctctccctggggcttgtgctgaccccggttgctggctcttggtgatgtctgcaggcaccagaggccatgcagtgggcctggagggggcttgatcatgaggtcagcgagggggtacagcaagctgggtggaagatgagacgctgggtggtgggctgtgcgtggggcatagtgcttgagtcggccagggcgccgagggaggacagaatgtggctgatggtacctcagggcgagtgaggccttctgcctgggtgaagttttgttcagggcagcaacatgggcagatatgcaggaaggtagtgccgtggggccccaaggccagaatcccaggctgtacctgctcagggaccctcctaccccca

SEQ ID NO: 40544 - DNA, 1178 bp, Artificial sequence
  DNA replication origin
ctgagccagacagcaggccctccgtctagaatccgctttattatggcacctggtgggtctggtgggatctgagggaggaagaggctgcagtcttgctgggcagcccctcggtcagtccagcagcccctcaggccatgctgctgctcagctgcatggcaaagtcctgcacatgctccttcagagtctggcgggcatctgcctgtgcccgcttctcccgtgcccgctcctgctgcagcttggtcagtctcaaccgcagccgctgctcccgccgcttgcaggcctgcagctggcgctgggccttgtcaagggcatcaagggctgcctcggctcgccgcttccagagtaaggcgctgcccacctggtagctgtgttcattctggatgtaggctccggcgggtgggggcaggcgcagcatatacgctgagggggagactggccgtggttcgagaggggagggctgccgctctggtgaaggctgggcgctgcagcctgcttcatctgcctgggcacccaaggggcccagtaggtctgaaaaggggctgctaaggccaggctccagcctcccagctggggaggccggcaaagtggcaggtgctgaggcctcttccacaggaaagcaggtgacatcagcaggtggaggtggagaaaatggagttgtgggccctcggccctcggagcagctggtaagggggaagagagagactgatgggctaggctgagggcttgccagacccccctccaccagcccacctgatccacccttaacacccaaacccgatccacaggttctgtgtagcaagaaccctgtccagcgagactgctggcagacacccctagggcccagtccctcagcctaggggtgggagtggggcatcccccacccatatcacataccgcttcctgcatcgtctgagccggctgacttcagcggggccaggtgggtaactgtgtcctttggtcttggttgtccggcgcaacttggagaaagactcaaatatggtggggactgccccctcctttagcctgtgatatccactgcggggaaaagcaacccagatgagctggagagcaagtgctgcctccccaggccaatctgcccccagcagcagcgccgtgggatgctggaaggcatcgtgcaaacaatacgtctggggaacgccaagttacagctacaccaa

SEQ ID NO: 40545 - DNA, 723 bp, Artificial sequence
  DNA replication origin
aggccctcctctcacagcactgataacagctgtccgtctccaccctcccaccacctccactcccaccccaggaagtgaggccagagggcagggacagagctgctgctgttctctgtgtgccagggcccagcaaagggaatgtagggagggtgggaggtgcagggcagctgggattaggggttgagggctgggtgttggaggctggatctggatcctgctttagtggaagtgtccctttaacagcaactggcctggcctggctcgggccctgctttgcctcctgttcagctgcggctgcagctgccatgctgactcatgtgcccgcagctagcaggagctggcagcatgggctccccaggggctacgacaggctgggggcttctggattataagacggagaagtatgtgatgaccaggaactggcgggtgggcgccctgcagaggctgctgcagtttgggatcgtggtctatgtggtagggtaagagagaagagcttttggccaggctggaggggcaagggaagaggtggggggtggggcttggtcctgctgggttgaagttgagggttgggctgtttaggggctggagtggaagggggcagattgggacggggttggggagagctaggcgatacaagacaggagagcaagaacaagctgtgtgtttgtcctgtgtgtccacttgcctccttcccaggcccccacccaggccccacccaggggg

SEQ ID NO: 40546 - DNA, 746 bp, Artificial sequence
  DNA replication origin
tgactcatgtgcccgcagctagcaggagctggcagcatgggctccccaggggctacgacaggctgggggcttctggattataagacggagaagtatgtgatgaccaggaactggcgggtgggcgccctgcagaggctgctgcagtttgggatcgtggtctatgtggtagggtaagagagaagagcttttggccaggctggaggggcaagggaagaggtggggggtggggcttggtcctgctgggttgaagttgagggttgggctgtttaggggctggagtggaagggggcagattgggacggggttggggagagctaggcgatacaagacaggagagcaagaacaagctgtgtgtttgtcctgtgtgtccacttgcctccttcccaggcccccacccaggccccacccagggggcacatgacatagtccttaacatctgtgagagctggagcactaggcccccagagagaccaccagctgtatctcgggtcaggagagtctgtaagggggaagctggatctagtcaggctgggggtgggtgctggctagtgaaggtgattgtctgagggcattggctctctgatgcatggctggagcttctgtctcattcagggggtctggagtgggaagtggggccagagaggaggtggggccttcgatgttgggccgggagcctgtagggtgtggggggagaactgagcatgtagggctcagctccgcccctgtcactacacgctggggacaca

SEQ ID NO: 40547 - DNA, 1435 bp, Artificial sequence
  DNA replication origin
cccttccaaagtttctgaagaaactttttttgaagtgaagagtttctaataattagcactttccttgccccattatgcaactagtaaaacagccccagttgaaggtgcattccccaagaatctgaggacaaggtcccccttgctcttttccctgccaccctgcccaggaagagtctctcaccgcagatggagccagctgccacgatgaagccagcccacctgtagccccgctggtagaaggcatctgcaagcgctgagtcggggtccaggctgtgccagggcaccatgagggttagcacggtggagacaaggatgtaggcaccagctgcaatggcaagcgagatggcgatggccagaggcacagaccgccgtgggttctgggcctcctcactggaggcggcaatgacgtcgaagcccacgaaagcatagaagcaggaggcagtgccggccatgacgccggagaagccgaagggtgcaaagccgccttcgtcagcgctccagttgtgaggctgggccaggatgaagcccaggatgacaatgaagagaatgacaagcaggctgatggccgagaaggtgtgattgagccaggaggacacgcgggctccacaggagacaaaggcagaggccaggaggatgatgccagcagccaggaagtccgggtagtggcccaggaggggcacctgccaagaacccacgtgggtctcagtgaagttgcggatgctgtggctgaacatagagtccaggtagccactccaggcacgggccacggcggcgccaccgatgatgtattcgaggagaacattccagccgatgaggaaggcccacagctcgcccatggatacgtaggtgaacaggtaggcagagcccgtgcgtggcacacgtgccccaaattctgcatagcatagggctgccagcagggaggccacagcggccacaccgaaggacaagagcacagcagggccagccacctccttggccacggcacctgtgagcacgtagagacccgagcccaccatgccacccacgcccagaagagtcaggtccagcgtggacaggcagcgccgcagtgacgtctccatggtggagtcctccagcggcttcaggcggttcagcttctggcataagcgtgccaggctagcaatggtgggcagcccccgggccatggcaggtggccgagaagagcaccgagccagctactggaacctgctagggccagaggggaatgacaggatgcgtagccggggcctgaccagccttccatccctcctggtctgaccacccccagtcctctctctgtccctgacctggggacctggacaccctcaccaggggcctgctggagagctggaatggggcaggtgtcagaacctgtgggcaggaggtcacaggaagcctggaggccctgtctgcatcccaggcagcaaaggaggcctgg

SEQ ID NO: 40548 - DNA, 1476 bp, Artificial sequence
  DNA replication origin
tgtctttgttgagtttagtgtcagggtaatcctggccttgcagaatgagttagaaagtttttgtttcctggtggtttgtcttcactgcatcactgtggggttgctctgtgtagctgtctcactcagtagtgagggaaatatctctggaaatgtacaatttactgcatcagccctgcttagtctcacatatccgttgtatgttggtgcctgtggcagagggtgtggtgtcacaccttctccaggtagataaaaagtcaacactccaaaacactggacaccagcaataaggcagtcattggtaaggcctttggggagctcccattacaaatctgcctaaccctctggcctgaagtgcctagacttttgtggtgacatttcaggacaagggacgtctgctcaggcaacacagggatggggtaaggaagctaccatcccaccggaagtgggagccatctgagaagttcctcaagacaataccagccaaatattagaaggtattggcattctggccgaggcagaatgttccaaattggcaccatcttgtctgggagtccatcatcctgtcaccagcccaataggctggataggctgcagatgctcctaagattccattccacaaaccacatgtaagcctgaacacatgtctagtatagcgttctggggaggccaggagccatggttcatgaatgtaatcacagccttttgggaggccaagagttcgagaccagcccgggcagcatagtgagacccagtctctaaaaaaattaaaattaaaaaattagccaggtgtattgttgcatagctgcctgcctggggcgtggggcactggaatgcagtactcaggacacagtggctgtcgctgataaacacaagtggggatctgctattggggtcccatagggccctcccggcctgccagaggtgcctaggctaggaagggctgccactggggtctgaggagctctactcccccacaggagggctgcaggctggtcccagaagctgcttgcttccttgcaggacgtggtagctgcaggctcaaaacagccagaatgcattccctcaattcgcagaactctctcaaaaggctgcagtctcttccattgtaagagtagaggtcagggaccgccccaggccactctgccagacccatgtcttcatctaactcactgtgcctgaagctcacatgacggtgctgtggggcctgtctggggcccagctgggtggggttcatgtactggggtgagggatcaagaagggtgtccgctgcagtagaaagaaggtgggctgcggactttcagacgtggcccttaacctccccgaactgacctaggctagtcagtcagccggcggtctgaccttctccatctgtgactgagtcacagtcacagggcttccctagaccccggtgagctccggtaacgaccttgcgaggtcgggcagagtgggcagggtgaaatatctgggtgtgtggca

SEQ ID NO: 40549 - DNA, 974 bp, Artificial sequence
  DNA replication origin
cttctcacagcactgataacagctgtccttccccatcctctcaccacgtccactcccaccggaggaagtgaggccagagggcagggacagagctgctgttttctgtgtgccaccagggcccagcaaagagaatgtagggagggtgggaggtgcagggcagctggggttaggggctgaaggctgggtgttggaggctggatcctgctttagtggaagtgtccctttaacagcggctggcgtggcctggctcgggccctgctttgcctcctgttcagctgcggctgcagctgccatgctgactcatgtgcccgcagctagcaggagctggcagcatgggctccccaggggccacagcagactaggggcttctggattataaaacggagaagtatgtgatgaccaggaactggtgggggggcgccctgcagaggctgctgcagtttgggatcgtcgtctatgtggtagggtaagagagaagagcttttggccaggctggaggggcaagggaagaggtcgggggtggggcttggtcctgctgggttgaagttgagggttgggctgtttaggggctggaggggaaggggccataatgggacggggtgggaggtaggcaatacaagacaggagagcaagaacaagctgtgtgtttgtcctgtgtgtccacctgcctgcttcccagtccctccccacggccccacccagggggcacaagacattgtccttaacatctgtgagagctggagcactaggcccccagagagaccaccagctatatctccggtcaggggagtctataagctcggagctgggtctactgaggctgggggtgggtgctggctagtgaaggtgattgtctgagggcactggctctctgatgcatggctggagcttctgtctcgttcagggagtctacagtgggaagtggggccagagaggatgctggactgggagcctgtagggtgtggggagagaac

SEQ ID NO: 40550 - DNA, 635 bp, Artificial sequence
  DNA replication origin
cttctgcctgtgtcagtcatgccctaccctccacatctgggagacagatgggattgaggctgtgacaggtggcgttaagggttgtggatcctgcaggctcctaacccgctggggggtcagggagagctgggggtggggggagaccttcacagagcctaaaaggagaagcaggtgtcacttaaaacaggtgggaaggggagggctttccagctggaggatgtggagtgggctgagccctggagcatgagccaggatagtggccagtgtgtttgctctgtctgtcccagggcgcccgggctctggcttcctcattgagctccaatccatatgtcaagcggctggaccttcgagacaatgggctctgtggggcaggtgcagaggccctggcaggtgccctgagcaaaagcagcagcatccatggtaggtgctgggtctggggcaggtgggcaggcgtgtcctccttttcctcagggatgtgcctccatcgttgaaagctgggccgtgtcacctggggcctgctggtgttgctggtggatagaagaggggcctcatcacaggagggggcatgtggggtggagttagaccctctgctgtgcagccgatgcctgatagaagtcctttcctcacccacccca

SEQ ID NO: 40551 - DNA, 1032 bp, Artificial sequence
  DNA replication origin
cctccagtcccctggcaaatgccacagctcctgggccccggaggtgattccagctcacgttaagctcggtgagtcctgtgttttctgccagggctggtccaagtgtctccccttcagaaacaccaagagagaccttctgactcactctcttcactccttcaaaagatcacactgatgcccactgcgtgccgagcctctgctgggcaggagggtcacagacatgaaactaatgtgggcctgcggtgcccttaaggaactcacatttcatgggggagatacaaatgcaaatgtatgggatgtgagctattcatttagactaaaagggggaggcgtgagaacagagtggtggccagcctgtcttgggggaagtcaggaaagaggacagaggagataactcaggactgaggaattccccaggggtgtgtgcatgcacagtggggaggagacacaggaaactgcaaatggcaggggcacctgtggaaatgcacacaggcttatgcacagtggggaggagacacaggaaactgcaaatggcagaggcacctgtggaaatgcacgcaggcttggagctgggcctggggagggggaagccagtgaggtgaggaaggagtaatgggcacttgagagatgctgaggggccttgtgtgccaagccaaggggcttaggcagcacatacaagtggcaaggagtcagggagggccttaggaagtgatgaggctggattagcatttcagcaagtggcaggtgtccaggatagactgggctgggtgggggcagaggcaagaggctgggggaccagatggaaggctggtgccataggctaggcaagaggcaacagggctggcacagctgtggtagagaggagatgggggtggtagagaaaggaaggtgaaagccaggcagtggtgtgagcctgtggtcccagcgactcaggaggctgaggcagaaggatttcttggcgccaggagttcaagaccagcctgggcaaaatagcgagacctagagatgaaggcggagcaacatggccgaaca

SEQ ID NO: 40552 - DNA, 1539 bp, Artificial sequence
  DNA replication origin
ggcgtgacaaacaccttgcctcttagaagctgtcccctaccccgacaggaagtctggaggctgaaacagaggctcccgccttctccgagcctcctgggcagcaccacacagatgccgtgtgctggtcccgtggccacactccagcactcagcccctttgcccgcctcactcctgagttggggccaccttccaggtgtcaccaggtgtgatgaaaccaggggcccagagccaggggcctgtgagagcccaaggggctctggtcgcacctcctgtacgctcctccccacagcgcccacctcactgccaaccagagctcaggcccaagggagggtgaggaggggctgagggacaggctggggtaggggtgcacggactgcaggctgagatgagcaattgaagggcaggtttccacggggaggaagaaactgggaacagagtccttgtcattctaagggatgttgccattcacccagggattctgggtgccgggcccggctgtctgtcagtgcagagggtgtggcagtgaagtgagatggtcccactcgttccaatgagaggtggcgagaaaaaccgccaatgatggaggtaggaggaggcttctgagcaggagagcagtaagggttacacagggcgggacaggaggggtcagcagagccccgaaggtgtgagctggggtggtgggagggggtgggcgaggcagagtgctgtccaggcgctggtgggcccagggcaggaggagggaggtggcaggacatagtcaagatgtattcgggggccagacgcagtggctcatgcctgtaatcccagcaatttgggagaccaaggcgagcggatggcctgagatccagaattagagaccagcctggccaacatggcaaaaccccatttctacaaaaaaaaaaaaaaaaaaaaaaaaaaattagccaggtgttgtggcatatgcctataatcccagccactcgggaggctgaggcatgagaatcacttgaacctgggaggcagaggttgcagtgaggtgagatcacgccactgcactccagcctgggagacagagtgagactccatctcaaaaaaaaaaaaaaaaaaaaaagatgtatgcgggggtcgtggtgctgggaacacgggcataaaggggccaggaggatcaggggtgccgtgtgggtgaacgggggctccgagagaagtgagaggatacccaaaacacgaggactggagcggcctggcatgctgggcccctcagggtctttgctcttcaagggctctgtcctgcaggctgggtggcagaaggccaggatatgagggcacagaggccctggggggatgccccgtggggatagagggaaacctggggagaaggtggaggggagtggggcagaggtggggccacaccaggagtgtgctgcggagtgagaggcagagcccgcagatgggataccgagagctctctgagacccgcgtgttgcagcatccaaacacacggagctccagctgccccagtaatggcagaatctggggtggagaacataagagggggttgtc

SEQ ID NO: 40553 - DNA, 1839 bp, Artificial sequence
  DNA replication origin
acataaaaaacccacagtctgaggccagcctggggctttcagacctgggcgggatctgcccaggccacctgtccttctgctttgggccgctgtctcttggcagatggcctgacacctgggggtggcccaaggatgcctcagaaaatcttgattcccactctacagatggcctgattagccagaggtttccaggccgtctgtccgcctccaggagatggactgggacctttagacatcggtggagaacaggatgctctgtcccttgctgtccagggcagggatggcctccagccgcaagaagtacagcagcacctcgacctgccctcgcggagtggggaagaggagagtggctcggaagggggcgcacagctgctggtgggaggtctttggggcccaagatcccaagtccacctcaggtgctagaaacccctgctggtgtcatgaaccccttacagtgagacgggggtggggtggggtcctgacaaggcatgacttgttgggtggggggtggttatttattttagagatgcacagggccttgctctgtcccccaggctggagtacagtggctccatcatggatcactgcagcctctaactcctgggctcaagcaatcctcctgtgtcagcctcccagatacctaggattacagatatgtgccccaatgcctgcctaatttttctttgtattttttctggagatggggtttgctacattgcccagactggtctcaaacacctgggttcagttgtcctgcctcggcctcccaaagtgctgggattacaggcatgagccaccacactcgaacacttggggtggttttaagcccccagcaaggtgcaccagcaggaccaggaggtggcctaggcaccccctatcactcccatccatgcaaacctaggcaagtccctgtctctgaatctcagccaccaccacatacaatgcaagtcggaagatgggcaggactgggggtggggcaggcagaggccacctctgtcaggctggggttgcatgggctggaggctgtcttcccatacctgggacatgacctccaaggaccagctgtcagtcatggtgatgggctggctggggttggcagggagcttgctctccttctcggagggccggagcagcgtggggccaaacaccgtgccaaggttgtgcagggacatcttattgactgcctccttctctgccatcctgtagaggaccgaagcagagggtgctgtttcaacgccaccaccaggagagaggcagaggggctgtgccgtgctagagtcctcagggagggagtgacctcgaccctggctgtgctgcaagctgactccagccttggtacttctgggtctcagtggcccaggacaaggggccagctctgggctgatggggaggtcttcctgatgtgcttgggagggaagggggggcggtccaaatgcactgctggccacggccaaagctctgagctctttgttaaggccacagtgcagagggaggagggtggcaaagaggagaggcaggggcgggggtggcagtggtgctagtccttagaagcagtgagttactgcagacaggggtcgggggaaaaggtccttggtgctgggggtctggtgggagcagaggggcaccccacggcctggagacctggagtcctgggcagccacaagagagctgggctacctttccaggtggtctagaaggaaaaggaaggtgagcaggttggcctccggcagggacgacagcaggttgagcatgcagctcttctttgcaactgggtctgaaagagctgcaggaggcagtgggtcactcccctgggttacgacaagccggagacctctcccg

SEQ ID NO: 40554 - DNA, 779 bp, Artificial sequence
  DNA replication origin
agcgggcggcgagggctccgtggggcaggtggacggggatcagctcctggggctgctccgttccccaggcgggtgtcgtggctctggcctccatgcaactccaggtctgcgcgccccgcgctgctggagccccagtcaaaagtctatttaaaaagcagagagaggatgcttccctctgagtggagcgatgaagacctgatccctgggccatttgggaacactagctgcctttcatcacagtcaacctggactcagagaatgtcaagagcttgttggttgggtcaagaatgaatctaggcatgacgtcatagtttatagtcatccttttaaacctgcaaagaagcatttgcaggtttaaagttatttaaagttattgcaggttcttccctcagacgcagcacggttcctgagatgacgtcagcgctgctcgctgaaagcaccaggcaaggaggcaaaacaaaggaaatcctaaagagcaggcgagagaacagtggaactggcagagagaggcactggtgcggatggagagggcagcaataaaaactgggggacacttagaggcaaaggtatggcaggtgacaaaaaagatgagctgaagctcaggagagacccaggcagcgatgcccaaatgaccggctgaggaatcacctcactgctgctgatgcccttgacagcgatgtctgaggctggcgtgagtgctccatgctcagagatacctagaacccagctacaatggccttatcagactgaaacaagaacaccaagatattccaagggag

SEQ ID NO: 40555 - DNA, 917 bp, Artificial sequence
  DNA replication origin
ttggcgatgccctgggcggcgtcctcgctggcgatgccgtgggcggcgtcctcgctggcgatgccgtgggcggcgtcctcgctggcgatgccgtgggcggcgtcctcgttggcgatgccgtgggcggcatcctcgttggcgatgcccttgtcggcggcctcgttagcgatgccctgggcggcgtcctctttggcgatgccctgggcggcgccctcgttggcgatgccctgggcggcgtcctccttggcgatgccctgggcggcgtcctcgttggcgatgccctgggcggcgtcctcgttggcgatgccctgggcggcgtcctcgttggcgatgccgtggacggcgtactccttggcgatgccctggatggtgtcctcgttggcgatgccctgggcggcgtcctcgctggcgatgccctgggcggcgtcctcgctggcgatgccgtgggcggcgtcctcgctggcgatgccgtgggcggcgtactcgttggcgatgccgtgggcggcatcctcgttggcgatgcccttgtcggcggcctcgttagcgatgtcgtgtacagtatcctcgttagcgatgtcgtgtgtggcgtcctcgttagtgatgtcgtgtacggtgtcctcatggggagctagaaaaacacagagttaaggtcagtgccctggtggtggagactgtgaatcacccaggggcttgcttggtgtgatgcatggaggtggctgatcacagcatgggtcaagctgatgctgggacatcctcccaggtggacctgcactagtgaagctaagggatgtggctcagaacactttctgcagtgggaatcagtttccaggttcaggtatgcattatctggtgaagtggggaaatataaaaaataaaaattgacaaattcatgaaaagccttccatgagtgcaagtgt

SEQ ID NO: 40556 - DNA, 1373 bp, Artificial sequence
  DNA replication origin
gggtggccacataaaaaacccacagtctgaggccagcctggggctttcagacctgggcgggatctgcccaggccacctgtccttctgctttgggccgctgtctcttggcagatggcctgacacctgggggtggcccaaggatgcctcagaaaatcttgattcccactctacagatggcctgattagccagaggtttccaggccgtctgtccgcctccaggagatggactgggacctttagacatcggtggagaacaggatgctctgtcccttgctgtccagggcagggatggcctccagccgcaagaagtacagcagcacctcgacctgccctcgcggagtggggaagaggagagtggctcggaagggggcgcacagctgctggtgggaggtctttggggcccaagatcccaagtccacctcaggtgctagaaacccctgctggtgtcatgaaccccttacagtgagacgggggtggggtggggtcctgacaaggcatgacttgttgggtggggggtggttatttattttagagatgcacagggccttgctctgtcccccaggctggagtacagtggctccatcatggatcactgcagcctctaactcctgggctcaagcaatcctcctgtgtcagcctcccagatacctaggattacagatatgtgccccaatgcctgcctaatttttctttgtattttttctggagatggggtttgctacattgcccagactggtctcaaacacctgggttcagttgtcctgcctcggcctcccaaagtgctgggattacaggcatgagccaccacactcgaacacttggggtggttttaagcccccagcaaggtgcaccagcaggaccaggaggtggcctaggcaccccctatcactcccatccatgcaaacctaggcaagtccctgtctctgaatctcagccaccaccacatacaatgcaagtcggaagatgggcaggactgggggtggggcaggcagaggccacctctgtcaggctggggttgcatgggctggaggctgtcttcccatacctgggacatgacctccaaggaccagctgtcagtcatggtgatgggctggctggggttggcagggagcttgctctccttctcggagggccggagcagcgtggggccaaacaccgtgccaaggttgtgcagggacatcttattgactgcctccttctctgccatcctgtagaggaccgaagcagagggtgctgtttcaacgccaccaccaggagagaggcagaggggctgtgccgtgctagagtcctcagggagggagtgacctcgaccctggctgtgctgcaagctgactccagccttggtacttctgggtctcagtggcccaggacaa

SEQ ID NO: 40557 - DNA, 1039 bp, Artificial sequence
  DNA replication origin
ctctgaatctcagccaccaccacatacaatgcaagtcggaagatgggcaggactgggggtggggcaggcagaggccacctctgtcaggctggggttgcatgggctggaggctgtcttcccatacctgggacatgacctccaaggaccagctgtcagtcatggtgatgggctggctggggttggcagggagcttgctctccttctcggagggccggagcagcgtggggccaaacaccgtgccaaggttgtgcagggacatcttattgactgcctccttctctgccatcctgtagaggaccgaagcagagggtgctgtttcaacgccaccaccaggagagaggcagaggggctgtgccgtgctagagtcctcagggagggagtgacctcgaccctggctgtgctgcaagctgactccagccttggtacttctgggtctcagtggcccaggacaaggggccagctctgggctgatggggaggtcttcctgatgtgcttgggagggaagggggggcggtccaaatgcactgctggccacggccaaagctctgagctctttgttaaggccacagtgcagagggaggagggtggcaaagaggagaggcaggggcgggggtggcagtggtgctagtccttagaagcagtgagttactgcagacaggggtcgggggaaaaggtccttggtgctgggggtctggtgggagcagaggggcaccccacggcctggagacctggagtcctgggcagccacaagagagctgggctacctttccaggtggtctagaaggaaaaggaaggtgagcaggttggcctccggcagggacgacagcaggttgagcatgcagctcttctttgcaactgggtctgaaagagctgcaggaggcagtgggtcactcccctgggttacgacaagccggagacctctcccgaggtggtcacatggagcgccagggacacgagtccttgcgcagtttaggcttgtcatcatcgtcacacccacagcgctggccgccagtgaggaccctgtgaggggcacctgtgt

SEQ ID NO: 40558 - DNA, 1001 bp, Artificial sequence
  DNA replication origin
agtgagccgagatcatggacactgccctccagcctgggcgacagagcgagactctgtctcaaaaaaaaaagttcacagggaaaggtaagtatatagtcacattcataacactgtaatattgcagtggtggtgtgtaaatcacttttcactgtagtataaaagttaaaatgtaaaagtattaggcggcccgggcgcggggcagctgctgcggggaggcggggaggcggggggcctggccggacacccctgcgccccctccccgcacccgggcggagggcggcctcttccccctccccctcccccaccacccccggcagccgcctcccccaggacgcaggaggcgggcggaggccgggtccgcgcagcgggcgacttgccgcatgggccgggtcgaggtgggggggcggtttcgggggctgggaagctggggtgccggggacaggagggtgggggagctggggaaaggagggctggggggccggggacaggagggccatgcaggcagtggcaagcgggcggcgagggctccgtggggcaggtggacggggatcagcgcctggggctgctccgttccccaggcgggtgtcgtggctctggcctccatgcaactccaggtctgcgcgccccgcgctgctggagccccagtcaaaagtctatttaaaaagcagagagaggatgcttccctctgagtggagcgatgaagacctgatccctgggccatttgggaacactagctgcctttcatcacagtcaacctggactcagagaatgtcaagagcttgttggttgggtcaagaatgaatctaggcatgacgtcatagtttatagtcatccttttaaacctgcaaagaagcatttgcaggtttaaagttatttcacgggtactgcttgccaatctttggaggatgtgaagcctgcagagaaataaagtgtcgcccctctgcgcgtcgctccccatctgctagaatgtttctcatgaatgctcctccagtggttgctct

SEQ ID NO: 40559 - DNA, 1047 bp, Artificial sequence
  DNA replication origin
gcttcgagcggagctggacgctctgcgcgcgctgctgccgccgccgccgccgtccccgcctgcccgccgcgagccccgcgccgtcccccgcgccacgccccgcggcccgaccctgctgcggacgctcggcaccgtgagcgccctggtcgccgcctccaggcccgcagacgacgccccggacggcccagcagaatgcggagcgcaccgagccccggtcaggaagaaccacaagaagatgccagtgccgcctggggccccgcaaggtggcggggactgagggcggccgcacaagggcagcctaggcgaggtgcggaaggcgtcgcgctggctactctggtacccccaggacggggcaagtgagcagatcggtccccctcgtgtagcgtggctctgagtcagaagggtgcccgggtgccgccagttagggctccggtactggagggagggggtgggcgcgggacgggcggagggtgggccacgtgcgtctggggagtgcggctgggagccggggtccttgcgagagactgagtccggctagagaacagggtggagcccctttggaccttagagctgggcctttgggccttgggtctgggtcagcctttgggccagggctgggtcagcctccaggggaacagccgagactcctcttccttggggtgactgcaggttctttttctttcaaggtctcagtgacgaggcagggtctccacgcactggaatagtgtcaaaccacacacaagggcacagaacccagggacacagggcggctgagacacgcagctggtgatggccctcaggacggtgtcaaccagtatgtaatcacattccacacggcaccaattggacagcggcctccggtcagcctcactctgactgcaaccccctctcactggacagcatcacctggacacagagcctcacctagtctgtgtcccgtggacacaactttgctttggacagtgacaccaagaatactcacccctttacttagccagaccacaggcagccaccgggacacaaacatctctccagagtcaccctcca

SEQ ID NO: 40560 - DNA, 900 bp, Artificial sequence
  DNA replication origin
ctgagcacacggagccgcggctgtgcgcgccggtcctctcgcccgcgcccgccgccccggcccccgcacgctccaccagcttcagcagccgcggcacctcggaccgcgaagccgcttcggcccggagctggccgagcaggcgagccagccggcccggggctcgggcgtcttcctggcccggcccattggattgcggccccgggtcccgccggcggcccgtgacgcgccgcagcacctcgctggctctgtacgcactacgcgcctgggcccacgggcggccgggcgtcgccatccgccctgctgcctccaccgccgccagcgcccgggatggccgggagccccaggctgcagcctagccatcgctggggcccaggcgacgcaccgtggagggggcccgcgggacggctttgggaacgaccaaagccctgggggttccggcctggggcgcagggaaccctggcagggctgggtcccgggcagcccggttccccggggaccctgcgggaacaacgacgttgtgggcaggtcctcacaaagggcatggcccagtttctgggcataggtgacatggagcatcgccagccaaagaccaggcaccacccgctagacacgagtcaggaactgagctcacattttacactagaagctactgtctccatcatagtcaagggaaggccaggagtggtcatggaccccacagcccttttcaatggctcagggcgacgtccttccatgtagtccaggccattatctcctcaccctgtcccctagtccacacagctggaggaatccatccaggtggcatctccagccccaagctgctggtccttccatgcgagctcttcagggtctcccttactctccaaggtggcccgcctagggcctctggaaatccctggc

SEQ ID NO: 40561 - DNA, 1090 bp, Artificial sequence
  DNA replication origin
cccctggaagctgtgtccccgggtccactggggtctggcccctgcagatcagtgcatgtgtgcatgtgttggggggggggattgaggggaccgctaatactgtcctcaagcagctgctgaggagaagactgggtccctctagtcatgttcatccactcaatcactccctgcagctcgtctctctggaaggtgcaggaggaggtgagaattgggcactctgtcaacccctcagactcccccattcctgctgagtcacccgtcctctgggacctccagcagctggctctgctgatccctagagcctcattagccattctctccctccccccagtcattaaaacactgccaacaagagcgccctgggttcttttccccagccctactggagacgggctgtgtgacccaggggctctgccctctctgagccaagtcttcacctgtgaaatgaagagatctctgaggtccccaggaggagtgacagggaggcctggatggtggagaaggtgtaggagagagtccagatttgcagaaagagctgttagttttgtgatctctgcctggaggtctatggacaggctggaagagaacctgagccattgcaatgagtccagattagggcttgttcctgcagaggctacagatgtgggggctggtacttatggcagagggtcccaaagtcatgggcatagagaagacaggttggcaggagcaagggcagaatgggagcggggtcctggggaccctgttgggccctgaagaggactgcagaggtgttggtgaggggtggacaggcaggtgtgtcagcacaaccctgagcccctgagctcaagtgcagggatggccgtgaagcaggtgatggggaccctggcttgagcttcatcggtagcggggctggggtggacaccggggactggcggagaggagatggggtgggggctggtcaaagcagtgtgtccctcagggagcgtggcagagcggggcgcgcacacaggtctgctctccagttcctccgggaagttcctcaaattcagccagctccagctgcccctggcacagaggagctgactgaggctccagtgcagggcctgct

SEQ ID NO: 40562 - DNA, 1130 bp, Artificial sequence
  DNA replication origin
tcgcgctcccggtgcagcagctgctgcagctgccgctgctcggcctccttccagcgcagcagctgccggatctcggcctcgcgttcccgctgcatctcctcttgcagctgccgcaactcccggctgcgctgtgcctcccacttggagcgcagacggtcagccagctgccgccgctcccgctcggcctcctcacgcagctggcgctcccgggcagcgaagcgccgccgttccgcccgccagcctgcccgctccgcctccagctccgcccgtagcttctccagctcccgcctctggttctccagcactgccgccgccgggctggagcagcccggcttcttgggcgacgcgcccaaggggctgggcgagtccttggccattgcggccgcggcccggctggtctccagacttcgcctggcaggcctcagctcgccaacggccgccgccgaccgcccggcgcgccccttccggcgccccctgggggtctccgcgtgccccttccgcctcttggcatgttcccccgcctcctgccgcggatgtctggcccaggcgcctctccacctggcaaggccagggctggactcccacacccctgctcaaactggcccatgtcccttccaggatgcacgggggcttttccggtccctacacttttcctgctactagcaccaagtcccttgtgaccctccccaggcaccctcccaggcactgtgcagtcccaagcaggccgcggtgccccgagggaagtctgggctgctgctcctgtacttggagaaaggggcagggtgtgtgtgttaaggccacccatggggtgtgggcatacctggtcgtgggttcaggtggtgtatttgggtcaggtggctggaaaatgcagcaggataggcctcaacttggctagacctggactccccaggacccttcagccccctaacagccctgatcacccaactggtcatccaccttttgaggaaaggatgtgcctgatacacatttgtgttactgcgcagagtcggctcagaggaggtgtaagcgaaaagaccctccccagcaaggtggcatagggacccagggccagataggcatgggggcactgcccaaactggccatctggcctgtctacctcccacatccag

SEQ ID NO: 40563 - DNA, 1124 bp, Artificial sequence
  DNA replication origin
gcctcgggccaagcgccaccgttgccctgctgaagcatcaactgcctctgcaggcgcagcacttcccgctgggactcgcgctgcaggcggtctaagtctctgacgttgagccactgggtgcaggggccgccccttccagtatgcaggtcgctgcagggacccgaggcgacacgcgcctgcaggaggtggcactcctgccgcagctcttcgatctgcttgtccttggccagcggcgcgctcgcctgctccgacaggtcccgagcgcgctggcgggcaaagacttggcacagctccaggccggcgcaactctcgccgggtataggcgcgctcacggcccggaggttggtctcctgcagctcgcgggcgcggtcagctaggcgccgcgcgagcccggtcagctccgcgcgctttaccttgagccgcttcaccttctcgtctgcctggtaggggcagcctgcacgccgcagctgcttgttctcctcttgcagggtataacagcggcgcgccagcacccacaacgccttggccagcagccagttcagctttatcagctcgtggtggcccaggcccgggggtgagggagtcaggacttcgcagggctggctctcagagccttctcctccccgcgggttgctgagtttcctgtgggctgacggtggtggtggcggcgggagtggcgatggtggcggcgagagcctccgggagccaggggtggaggtgtctggtgaggagggccgctcctcggatttggaggccttggggaggctccgggtgctgtcaagcgagcgggaacacgcaggtgcgaagcaatcaagggagctggcgtgcgtggagagcaggccgtctggggagctggagcacgcagaggacaccaggcctagcgagcgggagcgcacaccgacttcagcactcaggctgtctagagatccgagttggcaggcgggtttgggggcgtggcaagagccgctggaggtctggggcagcggttcttccaaggaatgcacagcttgggggtccggtgatcccgacaaagccgggtgcccgcggaagtgcgccaggatgtacttgaggaagagctggcgctccacctccagcgccgcctgcagatagcggatgcgcgccgc

SEQ ID NO: 40564 - DNA, 1605 bp, Artificial sequence
  DNA replication origin
ctctgtaggtggatgggtcgccacaagtgtagctaaagggtggagtctctggccatcggtgacacatgaagaagtcctcggggatctgagcaggcactgaatccagggactcaccacagagtgacatggttctcactgagaccttctgccacgtgaggggcacctgtagctgggagaattccaatacggtgctcccagcagtggcatcggcgacctcacaaaccttaagcccatctgcatacacagcataaccggtgacctggactccattggaggacccagctgagtcaatggtcacagggagccagctgaccaccaggacacctggcgaggcatggcgctccaccagcacctccagcggtgggtagggaggtcctgccaagagtgtgtcgaaggtgacggtggaggacatagttccccaatacacctgcagcaagtcccatggcagccgcacctccacccgcacccggtagtgcgtgccggggcacaggccctggaaggtgtagcagctcacgcccgctggggtcagggcatgctctcggtcatcaagatataccacatgggggtggcggtggctgctgtagacccaggtgatgttggctgatgtggctgtgacattctgcaggtgtagctgcatgggagccatacggagcacccctttggtccccagaaggggtctggagaggccctgcttccccatgctctgcagcaagcccagctggcaggcttccgtcttggtatccaggatctctgttgctacttctgtcttggagcccaccctgaccatctggcacagccctctgtccaccattccctgggctttcccagataataagctgtcttcctccagagcttcatcctgccccgctgggagttgactggggccaagatcaggggatttggcaggcaggcagcctgggatgtagctgtccggaatctgctccacgaagttggagggcaccagcccccgccggccatcgtcaagctccccctcatagaagccatcctcatccatgtccccgaagatatatatgtagtccccagctgtgaggggcagctcaccctcagggtgatcattgggcccctcaaatgggttgtagttatactgagccatgaagatcttgagcttgggggcagcaggagccgccgagccccccatttccagggccagggacacgctgtcaggctccaggtcatccacctcactggctgtgtccctgtccagagtaggggaggacggcacggtggcccacatcgacccctcagaggaggagtttgactgggagctggttttcttggacagaggttggctggcagggactgtctctgaaacttgggggacactggctgactccccaagggcaactgggctctcctcgagggaggcttcccttttctcctgtatgtctctgttgggctgtgacactgcgtagtcttcaggccgtgcgtggaacttgggccttctgctacctttaacttgggactccggcatttgactggtctcccagggctgttcaggagggtgaccaggccgacactggagcgcctgtatctccttccaggaaggatggaggtcacacagggccttctgcgggtcgcgttgca

SEQ ID NO: 40565 - DNA, 1535 bp, Artificial sequence
  DNA replication origin
ccgggctttgtgggccagatgcccggaggggcgcgggcggtggggcacccggggcacaaagcccaccgggccgcgccaggcccaggcggcgcgggtctgcggagcgggggtcggcgggcgagcgggcgccggctctttgtgccttttcattagcaatctaatccgaacagcgtcgggcgagctgcgctgcctgacaggcgggagggctcccattatgcaaacggccctgcgcccgcgttcgccccctcgctagaggattttgcgatttccaggactgcggtcctgcaccgtctgcggtctcctctcctcttgcctcctccccgcgggaagactggccacggcaggggcaggggcgggcctggaggggccgctcccagagggccgggctctgcggctggtgggctcgctgccctgcccccagacctctcctgtaggcagccgcttggcaggaagagagatgggcttgggggagggggtcggctttcagggggaagggaccggctggctgagggagggggctgaggggccccagcttgtcactctctgtttatcttccaagatggttcatattcacacaggcctgggtgtgtgcgtggttggggggggtgggggggaatgcctctccctggggggcagtgacttgctgagaggagggaatgaggccagataatgctcccaacggccccacccagaactgcctgggactgcctgtgtaagggagcccagtgctgagccggatgggttggagcggtgttaaagttatttatccatgtcttctcctgtcccccgcacccctagtcttttctagtaggagttgccaagcacatctggaaagctgtgttccccgaccccccactcccccaacagcaggaggggtgtaacccagggaagccacccctctgacatatgtgctggggggaggggcagagccttgcccctaggaatcctgtggcggtgggttgttgactgatgtgggattgctgtgtctcttgtgctgtcggagagctggcaggtagtggaggggccttgggagctcctaggctgaacttggggctgtcctccaaggatccaggatggagggatggagctgggtcactcaaacctaaggcctttctgggtctagcatttattgcttcctggcttctggcttggcttcttttcgtccattctcatctgccagtgtctggactccctgggccttcaggcaggcattttcaggagcacaggccatgtggttggtctggagccctgtgtcaaggagagtgtgcgtgcttggtggagcagggttgctggagtagtgtgaaaaaaagcagatgagctggcctctggagacaaagctgtgtggcaagactgctggtttagtgggctctgaacaccaagaacagggccgggagtctgatacttgggggctgaactgagtcctgtggcgcaggattgttgcctggaagtgaacgttccgtcttgtgccattgagactgtgaagatctctgggtcccacaggacgagcagtagacttggaaggctgggaagaggct

SEQ ID NO: 40566 - DNA, 857 bp, Artificial sequence
  DNA replication origin
ggggaacgcccctctacctggcgggcgcgcgagggtcggtcccgcaggcagcgccgcgaggtgcttcgcagagtaccaggctgatccgcccaggcccgcatctctgctctaggcccttgggaacgggtgatccacccagcggacccaggtgggggactcggccaggacttcccagtcctcaatcatgagcctgcggctggtccttcctggcgactgcgggatcctgagcgacccagtccgccttgtagcgccaacctcagtttccctctgcagcctgctgcggaggcgaagccaggcagcgcagcctctgcaaggggaggcgcgcgaggcggcgcgggagcgcgcggagcgggtgcgcagaagactggaggaggcggagcgccacaaggagtacttggtgaggaagagtcctggaatggggctggacccagggtggggtggggcagggcgggcggaagggggcaggatccgggggtggggtgaggtaggaccggcggagaggtcggcaccgccccaggaccccgtccgcaggagcagcacagcaggcagctgcaggagcagtgggaggagctgtcgagtcaggtacgtgcaggagatgggagggcctgtctcttggttcctctcggaagtcctgcccttgtcctcgcccttgttgcctccccgtccctgtctcccctgacacccgttcctccagaagcccggtaaaccccgcccttacaagccccgcccctagctcttctactacggaggggaactgcagagccagaagagcacggagcagcaactcgcagcccaattggtgacgctgcaggtgcttgagcgggaccctgaggtgtttagtaggggcggagcagcag

SEQ ID NO: 40567 - DNA, 946 bp, Artificial sequence
  DNA replication origin
ctcggaagtcctgcccttgtcctcgcccttgttgcctccccgtccctgtctcccctgacacccgttcctccagaagcccggtaaaccccgcccttacaagccccgcccctagctcttctactacggaggggaactgcagagccagaagagcacggagcagcaactcgcagcccaattggtgacgctgcaggtgcttgagcgggaccctgaggtgtttagtaggggcggagcagcagcatgagctgggccgtgaccacctgggggtgtggcttaaggcaggccctgaaggcgtgggcggggcggggaatgtgggcggagcacaatcgcatgggggcggggctctgagggctagaataggggcggagcgcggagggggcgtggccatgaccagctggggcgttgcttacgactggtcctgaggacgcgggcggggtcatgatcgcctgggggcgggcactgagggccgggggcggggcccggaggcgcagcgggttgccggcctgcggacctcctgacattccctgggtccttctcaagaatgaactggagctggcggagaccaaatgcgccttgcaggaggagaagctgcagcaggtgagggcagaagcgggttctgttggaggagggtaggctttcgagtgtggatggggaagggcctgtcgccccgacgccgccgagtctaacccgggtgtccacacccaggacgcgctgcagacagcggaggcctgggccatattccaggagcagaccgtagtcctgcaggtgcggccccactcagacgccaaggtgcctcccgcctctcctcccccagacctggggcggtaagtctcccaacccaccgccaggacgcctccccgaggcctcagtccgcactctcacccgctccaggaggtgcaggtgaaggtgatggaggctgcggaggagctggacgcctggcagagtggcc

SEQ ID NO: 40568 - DNA, 1331 bp, Artificial sequence
  DNA replication origin
gggtcggcgggcgagcgggcgccggctctttgtgccttttcattagcaatctaatccgaacagcgtcgggcgagctgcgctgcctgacaggcgggagggctcccattatgcaaacggccctgcgcccgcggccgccccctcgctagaggattttgcgatttccaggactgcggtcctgcaccgtctgcggtctcctctcttgcctcctccccgcgggaagactggccacggcaggggcaggggcgggcctggaggggccgctcccagagggccgggctctgcggctggtgggctcgctgccctgcccccagacctctcctgtaggcagccgcttggcaggaagagagatgggcttgggggagggggtcggctttcagggggaagggaccggctggctgagggagggggctgaggggccccagcttgtcactctctgtttatcttccaagatggttcatattcacacaggcctgggtgtgtgcgtggttgggggggggggggaatgcctctccctggggggcagtgacttgctgagaggagggaatgaggccagataatgctcccaacggccccacccagaactgcctgggactgcctgtgtaagggagcccagtgctgagccggatgggttggagcggtgttaaagttatttatccatgtcttctcctgtcccccgcacccctagtcttttctagtaggagttgccaagcacatctggaaagctgtgttccccgaccccccactcccccaacagcaggaggggtgtaacccagggaagccacccctctgacatatgtgctggggggaggggcagagccttgcccctaggaatcctgtggcggtgggttgttgactgatgtgggattgctgtgtctcttgtgctgtcggagagctggcaggtagtggaggggccttgggagctcctaggctgaacttggggctgtcctccaaggatccaggatggagggatggagctgggtcactcaaacctaaggcctttctgggtctagcatttattgcttcctggcttctggcttggcttcttttcgtccattctcatctgccagtgtctggactccctgggccttcaggcaggcattttcaggagcacaggccatgtggttggtctggagccctgtgtcaaggagagtgtgcgtgcttggtggagcagggttgctggagtagtgtgaaaaaaagcagatgagctggcctctggagacaaagctgtgtggcaagactgctggtttagtgggctctgaacaccaagaacagggccgggagtctgatacttgggggctgaactgagtcctgtggcccaggattgttgcctg

SEQ ID NO: 40569 - DNA, 1585 bp, Artificial sequence
  DNA replication origin
ggtcgccacaagtgtagctaaagggtggagtctctggccatcggtgacacatgaagaagtcctcggggatctgagcaggcactgaatccagggactcaccacagagtgacatggttctcactgagaccttctgccacgtgaggggcacctgtagctgggagaattccaatacggtgctcccagcagtggcatcggcgacctcacaaaccttaagcccatctgcatacacagcataaccggtgacctggactccattggaggacccagctgagtcaatggtcacagggagccagctgaccaccaggacacctggcgaggcatggcgctccaccagcacatccagcggtgggtagggaggtcctgccaagagtgtgtcgaaggtgacggtggaggacatagttccccaatacacctgcagcaagtcccatggcagccgcacctccacccgcacccggtagtgcgtgccggggcacaggccctggaaggtgtagcagctcacgcccgctggggtcagggcatgctctcggtcatcaagatataccacatgggggtggcggtggctgctgtagacccaggtgatgttggctgatgtggctgtgacattctgcaggtgtagctgcatgggagccatacggagcacccctttggtccccagaaggggtctggagaggccctgcttccccatgctctgcagcaagcccagctggcaggcttccgtcttggtatccaggatctctgttgctacttctgtcttggagcccaccctgaccatctggcacagccctctgtccaccattccctgggctttcccagataataagctgtcttcctccagagcttcatcctgccccgctgggagttgactggggccaagatcaggggatttggcaggcaggcagcctgggatgtagctgtccggaatctgctccacgaagttggagggcaccagcccccgccggccatcgtcaagctccccctcatagaagccatcctcatccatgtccccgaagatatatatgtagtccccagctgtgaggggcagctcaccctcagggtgatcattgggcccctcaaatgggttgtagttatactgagccatgaagatcttgagcttgggggcagcaggagccgccgagccccccatttccagggccagggacacgctgtcaggctccaggtcatccacctcactggctgtgtccctgtccagagtaggggaggacggcacggtggcccacatcgacccctcagaggaggagtttgactgggagctggttttcttggacagaggttggctggcagggactgtctctgaaacttgggggacactggctgactccccaagggcaactgggctctcctcgagggaggcttcccttttctcctgtatgtctctgttgggctgtgacactgcgtagtcttcaggccgtgcgtggaacttgggccttctgctacctttaacttgggactccggcatttgactggtctcccagggctgttcaggagggtgaccaggccgacactggagcgcctgtatctccttccaggaaggatggaggtcacacagggccttctgcgggtcgcg

SEQ ID NO: 40570 - DNA, 1122 bp, Artificial sequence
  DNA replication origin
gccaagcgccaccgttgccctgctgaagcatcaactgcctctgcaggcgcagcacttcccgctgggactcgcgctgcaggcggtctaagtctctgacgttgagccactgggtgcaggggccgccccttccagtatgcaggtcgctgcagggacccgaggcgacacgcgcctgcaggaggtggcactcctgccgcagctcttcgatctgcttgtccttggccagcggcgcgctcgcctgctccgacaggtcccgagcgcgctggcgggcaaagacttggcacagctccaggccggcgcaactctcgccgggtataggcgcgctcacggcccggaggttggtctcctgcagctcgcgggcgcggtcagctaggcgccgcgcgagcccggtcagctccgcgcgctttaccttgagccgcttcaccttctcgtctgcctggtaggggcagcctgcacgccgcagctgcttgttctcctcttgcagggtataacagcggcgcgccagcacccacaacgccttggccagcagccagttcagctttatcagctcgtggtggcccaggcccgggggtgagggagtcaggacttcgcagggctggctctcagagccttctcctccccgcgggttgctgagtttcctgtgggctgacggtggtggtggcggcgggagtggcgatggtggcggcgagagcctccgggagccaggggtggaggtgtctggtgaggagggccgctcctcggatttggaggccttggggaggctccgggtgctgtcaagcgagcgggaacacgcaggtgcgaagcaatcaagggagctggcgtgcgtggagagcaggccgtctggggagctggagcacgcagaggacaccaggcctagcgagcgggagcgcacaccgacttcagcactcaggctgtctagagatccgagttggcaggcgggtttgggggcgtggcaagagccgctggaggtctggggcagcggttcttccaaggaatgcacagcttgggggtccggtgatcccgacaaagccgggtgcccgcggaagtgcgccaggatgtacttgaggaagagctggcgctccacctccagcgccgcctgcagatagcggatgcgcgccgcctgct

SEQ ID NO: 40571 - DNA, 1123 bp, Artificial sequence
  DNA replication origin
atcgcgctcccggtgcagcagctgctgcagctgccgctgctcggcctccttccagcgcagcagctgccggatctcggcctcgcgttcccgctgcatctcctcttgcagctgccgcaactcccggctgcgctgtgcctcccacttggagcgcagacggtcagccagctgccgccgctcccgctcggcctcctcacgcagctggcgctcccgggcagcgaagcgccgccgttccgcccgccagcctgcccgctccgcctccagctccgcccgtagcttctccagctcccgcctctggttctccagcactgccgccgccgggctggagcagcccggcttcttgggcgacgcgcccaaggggctgggcgagtccttggccattgcggccgcggcccggctggtctccagacttcgcctggcaggcctcagctcgccaacggccgccgccgaccgcccggcgcgccccttccggcgccccctgggggtctccgcgtgccccttccgcctcttggcatgttcccccgcctcctgccgcggatgtctggcccaggcgcctctccacctggcaaggccagggctggactcccacacccctgctcaaactggcccatgtcccttccaggatgcacgggggcttttccggtccctacacttttcctgcttctagcaccaagtcccttgtgaccctccccaggcaccctcccaggcactgtgcagtcccaagcaggccgcggtgccccgagggaagtctgggctgctgctcctgtacttggagaaaggggcagggtgtgtgtgttaaggccacccatggggtgtgggcatacctggtcgtgggttcaggtggtgtatttgggtcaggtggctggaaaatgcagcaggataggcctcaacttggctagacctggactccccaggacccttcagccccctaacagccctgatcacccaactggtcatccaccttttgaggaaaggatgtgcctgatacacatttgtgttactgcgcagagtcggctcagaggaggtgtaagcgaaaagaccctccccagcaaggtggcatagggacccagggccagataggcatgggggcactgcccaaactggccatctggcctgtctacctccc

SEQ ID NO: 40572 - DNA, 1693 bp, Artificial sequence
  DNA replication origin
cggcgctcgggccttccccgaaggcgcccggtttggagcctcccaaccgggctctcacattaacgacgccctcagatcggaccgcggcctccgcgacagggggacgcggccaagctccgggcggagagtggcgtgaacgccccgggccgggctgaggggccgacagcggctcccagcgcggccttgcgctcccgcccaggctgcggcctaggccagccccgttagcaccttgagcctgcgcgcggcccagggaaccgacgaggccgtgtagggcaggaagccagacggcagcgccctgagaagccgccgcctgcctcggggatccggagcctaggacgccgccccacgcccggccgctgccagagaatggcttttaccttcatcagcctcctgctggccgccatcttggatttggtgctgctccttccccagaatgcatcgcggccggccgggcggctggagcccccgcacttcctggagcgggggaggggccgcggggcggggcacaggagcagagcggagcacctactgtgtgcttcccactgtgctggggggcgcgtggaggaacgcaagtgaaccgcacagactgggcctcagcgtttacggatcgtccaatcagatggcagttacaaccagtgcctggcacatagtaggagcataataaatactgattgcataaaatagttgaccaggcgcgggggctcacgcctgtaatcccagcactttgggagaccgaggcgggtggatcacgcggtcacgagttcgagaccagcctggccaacgtggtgaaactcggtctctactaaaaatacaaaaaattagccaggcgtggtggcgggcgcctgtaatctctgctactcaggaggctgaggcaggagaatcgcttgaacccgggaggcagaggttgcagtgagccgagatcttgccactacactccagcctgggtgacagaggaagactccgtcttgggggaaaaaaaaaaagttgaataaccaaggttacttcacactgccaagctctgtgaagaaaactgggtgataggaaagtgactgtggggacatactttgagaggtcaaggaagccaaattgaggaaatggccctactaagtgccagacctctctctagtgctttattttctttaacccttgaaaccatcctctgggatacgttagcattaacatcctcatttcacaataaacagaagcacagaagaagccagtgacttgcccaaggtcacacggccagctaggagcagagccaggctcctgtcacaggtgggctgctggctccaaagccaatgctgggacctggaaaatgggaaggaacagctgggaggactggaggagaatgtttcaagcagaggaagcagcactggcgaagaccatgaggctgtctcagtgtccagaatggagtaaaaggattatagggtgggagggaggcaggggacagaccatggagggtcttgtagaaaggggaggagttggtttctattccatgtgctgtgagaggtctttgatagatatgagtattgactccatggtcagatgattttttttttttttgagacagagtcttgatctgtcacccaggctggagtacagtggcacgataacagctcactgccgcctcgacctcctaggctcaagggatcctcctgcttcgcctcccaattaactgggactacaggcacgt

SEQ ID NO: 40573 - DNA, 759 bp, Artificial sequence
  DNA replication origin
atccaagatggcggccagcaggaggctgatgaaggtaaaagccattctctggcagcggccgggcgtggggcggcgtcctaggctccggatccccgaggcaggcggcggcttctcagggcgctgccgtctggcttcctgccctacacggcctcgtcggttccctgggccgcgcgcaggctcaaggtgctaacggggctggcctaggccgcagcctgggcgggagcgcaaggccgcgctgggagccgctgtcggcccctcagcccggcccggggcgttcacgccactctccgcccggagcttggccgcgtccccctgtcgcggaggccgcggtccgatctgagggcgtcgttaatgtgagagcccggttgggaggctccaaaccgggcgccttcggggaaggcccgagcgccggagcccctgcccggagcccgcgccgcggaaccgccccgccctgggccgcagcgcgccgggcttgcagctccgcttggcccggccgcagctcgggagtctgggaggttcgggctaggaaagagagaaggaggccaggcggccaaagttaggtcagtttgttggtgggtcgtttggaattgcgctgggtcctagcaaactgtcgccttgtgactgcagagtcacacagcgggtaagttccaactccaggaaggcctgaggtcggccccgatcgcggcgcggttctgcttccctctcctccactcagtcatcccgatctcccctccctgataaagtgccatttttgggggg

SEQ ID NO: 40574 - DNA, 1075 bp, Artificial sequence
  DNA replication origin
tccccgccccgtctcctaccatagctgcctctgtccctccgcactggctgttcacctggctagctgtgtccgtttctcaacccggaagcgagtctggcgtcgaccgctgccgccaccccagttaccccctcccaccccgccgtcccttccctagcctacctagcccttggccatggcccggcctggtcccacctctgatgtcccgccccccacaggtggacagacgccttcgtgggcctgagcacttgcggccggcacatgtccgctcaccgcgtgtccggggccctggcgcgggtcctggaaggtaccctagcgggccacaccctgacagccgagctgatggcgcaccccggctaccccagtgtgcctcccaccggcggctgcggtgaaggccccgacgctttctcttgctcttgggagcggctgcatgagctgcgcgtcctcaccgcgcccacgctgcgggcccagcttgcccaggatggcgtgcagctttgcgccctcgacgacctggactccaagaggccaggggaggaggtcccctgtgagcccactctggaacccttcctggaaccctccctactctgaccccctacagacaaccaagcactaatccccttagtaccaagaaaggggagccaggatttagtcctggcccagcccagagctgggacctggagcacgatctgttgacttccctgggtaggacactgccacctctgggctcaggtcctcatgcctccaaatggcatctagagtttgagcagccttcttggctgcaggcaggcctagcctgtggcagcgggctagggcccgcagagcatttggtgcccctccatgttgcaatgcaaacaccttcaccactggggcagtggggagagatggctatattaataaaataacgtgtgtctttcaaacttgggtggtttatcagctgtgcccaggagaccctcagagaaacaagcacggacaaagagcagctccctcttggctcaaaccactccaggaaatggcccattctccattctggttttgttcatgctgcaattttctttattcctttttagggtgggagtgg

SEQ ID NO: 40575 - DNA, 1059 bp, Artificial sequence
  DNA replication origin
cctgcagctgcgggcccaggttctgaggggagagactcattactgagtgcccaggagtccaggatcaaggggcgtcgtgaaaacgtgcctgcagggtcctaggatcctgagccggtgtccagggactcaccggctgcgaggagccgcgtcttcaccaactgttcacgctcactctccgcggctcggagactcagccgcccttccctgggcactcattggtaagtcctcggaagcgtggaccaatcaaaaccctcctcgtgtctccagtccccgcccagctacggctctcgcgaaccgggggcgggccctccccgcgctgacccagtggcagtgcaagcggagtgccgcgcgggccgactattggctgccgcaagcgggcgctgtcagaaccggattgggccgcggcggggacggaagcggcccctgggcccgaggggctggagccgggccggggcgatgtggagcgcgggccgcggcggggctgcctggccggtgctgttggggctgctgctggcgctgttagtgccgggcggtggtgccgccaagaccggtgcggagctcgtgacctgcgggtcggtgctgaagctgctcaatacgcaccaccgcgtgcggctgcactcgcacgacatcaaatacggatccggtgcgtggggccagcgactgggagagcgcggggaaccggggctcggggttgggagtgtggagacagggtggtcatgggggtctgtgggccgtctggaagccgggcggcgggggctctagagtcgttgggaggtcgaggggccaaagctttgagggtgtcgaggatattgagggtggggacggtcgtcggggaactgcgggcccaaagactgagggggtgtcaggcgggggctgggggtgagcccttggggtcccctgggacatgttctggtcccagggcgagggtccggggttccgcgattgacggagaccctgggtgtgtggggtgtcactcctcaggcagcggccagcaatcggtgaccggcgtagaggcgtcggacgacgccaatagctactggcggatccgcggcggctcgg

SEQ ID NO: 40576 - DNA, 1073 bp, Artificial sequence
  DNA replication origin
ttccgcgattgacggagaccctgggtgtgtggggtgtcactcctcaggcagcggccagcaatcggtgaccggcgtagaggcgtcggacgacgccaatagctactggcggatccgcggcggctcggagggcgggtgcccgcgcgggtccccggtgcgctgcgggcaggcggtgaggctcacgcatgtgcttacgggcaagaacctgcacacgcaccacttcccgtcgccgctgtccaacaaccaggtgagcccctcccggagcccccagagagactcctggcctgtgtgaggggccagagacagagccctgggttccaatccgagcctcagcttcttcgtgaaatggaaatttcacttcagagatggttactgagcgccccctcgggggacacagagtaactccgccaggatcctgccctcaggtgctcccggcccggcagggagaacgacgggagagagatccggagagatacgcctggatagctcttcctctggtggcaagtgggacccaggaggggaatccacacagccttgagggtggggaataggaaactccactggggaggaggaactcaggctagatctgaaaggatgattaggagtcctacaagccacaaaggggaaagagagacttcccaggccagcagaagagattgtgccaatgcatggaggtcattggaattcaggggattggaatggaacagtgggtgcccttggggagctggtggaagaaaatgtttgagatagatagacagcttgactgttagcctgaggggctgaattttaggctgaaggtaggtcagaggggttaggactgggaaaatgtggaggaggaggccttagctccgtggggaccagtggtctctgcacagacagatgcaatggtgtgtgcatgtgtctgaagagcccatgctggggagggagtgctagaggttgcgggggcgggtcatggtgtcaccttttgcagctgtgggagctgaggctccaggaagggtagggaagaacccgaggctcggtgtactaggtgcgaatgccgccttctgtggtgaccactgtcttctcatcctttgcac

SEQ ID NO: 40577 - DNA, 884 bp, Artificial sequence
  DNA replication origin
gctggtggaagaaaatgtttgagatagatagacagcttgactgttagcctgaggggctgaattttaggctgaaggtaggtcagaggggttaggactgggaaaatgtggaggaggaggccttagctccgtggggaccagtggtctctgcacagacagatgcaatggtgtgtgcatgtgtctgaagagcccatgctggggagggagtgctagaggttgcgggggcgggtcatggtgtcaccttttgcagctgtgggagctgaggctccaggaagggtagggaagaacccgaggctcggtgtactaggtgcgaatgccgccttctgtggtgaccactgtcttctcatcctttgcacctataggaggtgagtgcctttggggaagacggcgagggcgacgacctggacctatggacagtgcgctgctctggacagcactgggagcgtgaggctgctgtgcgcttccagcatgtgggcacctctgtgttcctgtcagtcacgggtgagcagtatggaagccccatccgtgggcagcatgaggtccacggcatgcccagtgccaacacgcacaatacgtggaaggccatggaaggcatcttcatcaagcctagtgtggagccctctgcaggtcacgatgaactctgagtgtgtggatggatgggtggatggagggtggcaggtggggcgtctgcagggccactcttggcagagactttgggtttgtaggggtcctcaagtgcctttgtgattaaagaatgttggtctatgattgcgtttcactgtgagcctgaggatgaccaggaggtgccagcccaggcccagttgatcatttcttcctcagtgcaaaacctgtctccagcccagcctgactgctgaatctgtccaaac

SEQ ID NO: 40578 - DNA, 1335 bp, Artificial sequence
  DNA replication origin
tgtcctgtatgaaaaaaggcacatcctggccaggcacggtggctcacgcctgtaatcccagctctttgggaggccgagggcggggggatcacctgaggtctggagttcaagaccagcctggccaatatggagaaaccctgcctctactaaaaatacaaaaattagctgggtatgatggtgtatgcctgtagtcccagctagtacggaggctgacgcaggagagtctcttgaacctgggaggcggaggttgcagtgagctgagatcgcgctattgcactccagcctggcgacaaagtgagactccgacaagaaagagagagagagagagggagggagggagggagagagagagagagagagagagagagagagagagagagagagaaagaaagaaaaaaagaaagaaaaaaaggcacatactatagattttaaagtttcattttgtaagtcacaccagggcaggaagtagaatagagatttgagcccaagtgtacctgacaagtctctctgcctgcactcctagacaagatgatcaggacagacctcattcttctttggttgtccccaggcaggaggaaataaatgtcacttcctatgttggaagagctgaggggtggtggtttagcagtaagagatgaaaaatctgattaaacgtctcaggcacactatggatctcagggctgatggaggacaaggaggggacaagggaggacgcagtccagggtgcacccccttgttagtggctggggtcagtggctgaccaagtaggaggggagaggggtaagaaaagtagctttcagggagaagaagctgtgcgtgaatgtggacatgttcagcatgagatgcccaagaatcgtccccagtggtcatttggatgtgggtctggagctgaagggtgagacacagtgggtgtgtttttcagtcagttatgggttctaatcaggaacaagaagtgtgtaagatcgtcccagatgagacggtgaagccaggaccttcagaaacgcattcgaggggcaagaggaaaaggacagcgaggtggagcaggaggaacaggacactgaggaggggccggagatgcagcgagtacagagcaaacaagtggctgtaaaggggaggagagcgcagaatctggggaggccaatggagagtgaaggagagggaggagggtgaaaagtccgaactagaggggttaggggcagagtgaagttctcggggcgttgcctggatgaggcccgggaggctacagacagcgaggaggggcgcccgtcggaggggactaggggcctgccgagaggtggggaccttaaagaagttgctgaccaaccacgtcctcgg

SEQ ID NO: 40579 - DNA, 1499 bp, Artificial sequence
  DNA replication origin
gtaggctagagagtccgcacctgcgccgcggccgtggggagagagggtgcgtcccggcagtcccgcacgacgggccccgcctcccctggtgaccccacgctccggcctcggggggagtggcggtcggcgcgccgagaccctcgggagccccgcccagacgcctgctccgcttccaggccacccgggctctccagccgcgctcgctcgtagagatcctagacaagttcgacagcgaggtcccgcagagcaagacctgccagcagatctccgaggaggacttggagaggcaggcggacacctacactgggcgcgcgctgcgcctcctcttccgcagccccgtccgcaacccgtcgctggcggagagggtggtacaattggaacagcgcgggctctcttttttccggatgcggccgcggggcatgggaccggctgggcgggaactgtcactacccgggtccgccgtcccctaggaaagagctccgacgattggagctttgggggccggggatgggggtggggtggagaggtcgccgtcggcctagctggggctgcagggtaggatctatcagaaagccgaggctgcacagcctggggagtggagcgggcaggcgtctcacgccccggacctccccctgccctgcctctcctactcttgttgcaggcgaagttcttctgtgttgtgcaggcggagctgaaccattgcaacagcatgggcgccctggagatgcacgagcaggtggagcagctgaagcagagcatccaccgcgtgcacctctactcccggggcgaggatcaacctctccccgtgctgggccctgggcgggggtctgagcccagtgcagccaggccgagggctaggtgaccacctccattcttccggttggatttgccctccttggatcaggttttatccagagcaggaaggggcctgggcagtctggacctgggaggagaggcgctgcccctagctagattctttagttaggagactgacttcagctctgctacttccttcctggctgtgtgatcctgagcaagttgggccacctttccgagagagagagccctcactgctcaccttggtgagtgttttggagtggtggatgaaggcctgtaggtagggctggctcaagcaaccaagcaaacctgaatcaattaaaaaaaaaaaaaaaaaaggccgggtgcggtggctcacgcctgtaatcccagcactttgggacaaggccgaggcgggcggatcacaagattaggagttcgagaccagcctgaccaacatggtgaaaccaccgtctctactaaaaatacaaaaattagccaggcgtggtggtgcgtgcctgtaatcccagctacttaggagcctgaggcaggagaattgcttgaacgcaggaggcggaggttgcagtgagctgagacagcgccactgcactccagcctgggcaacagagtgagactccgtctcgaaaaaaaaaaaaaaaagttgagagagtcctggcaccgac

SEQ ID NO: 40580 - DNA, 850 bp, Artificial sequence
  DNA replication origin
tcccagccgcctgccttggcctcccaaagtgccgagattgcagcctctgcccggccgccaccctgtctgggatgtgaggagcgtctctgcccagccacccatcgtctgggatgtgaggagcgcctctgcctggctgcaaccccatctgggaggtgaggagtgtctctgcctggccgccccgtctgagaagtgaggagcccctccgcccggcagccgccccgtctgagaagcgaggagcccctctgcccggcagccgccctgtctaggaagtgaggagcgtctccgcccggcagccgccccgtccgggagggaggtggggggcagcccccgcccggccagccgccccgtccaagagggaggtggggggcagcccccgcctggccgccgccccgtccgggaggtaggggcgcctctgcccggccgccccttctgggaagtgaggagcccctctgcccggctgccaccccatctgggaggtgtacccaacagctcattgagaacaggccatgatgacgatggtggttttgtcgaatagaaaagggggaaatgtggggaaaagatacagaaatcagattgttgctgtgtctgtgtagaaacaagtagacataggagactccattttgttctgtactaagaaaaattctgccttgggatgctgttgatctatgaccttacccccaaccctgtgctctctgaaacatgtgcggtgttcactcagggttaaatggattaagggcggtgcaagatgtgctttgttaaacagatgcttgaaggcagcatgctagttaagagtcatcaccactccctaatctcaagtacccagggacacaaacactgcagaaggccgcag

SEQ ID NO: 40581 - DNA, 1162 bp, Artificial sequence
  DNA replication origin
gtaaggtcatagatcaacagcatcccaaggcagaatttttcttagtacagaacaaaatggagtctcctatgtctacttgtttctacacagacacagcaacaatctgatttctgtatcttttccccacatttcccccttttctattcgacaaaaccaccatcgtcatcatggcctgttctcaatgagctgttgggtacacctcccagatggggtggcagccgggcagaggggctcctcacttcccagaaggggcggccgggcagaggcgcccctacctcccggacggggcggcggccaggcgggggctgccccccacctccctcttggacggggcggctggccgggcgggggctgccccccacctccctcccggacggggcggctgccgggcggagacgctcctcacttcctagacagggcggctgccgggcagaggggctcctcgcttctcagacggggcggctgccgggcggaggggctcctcacttctcagacggggcggccaggcagagacactcctcacctcccagatggggttgcagccaggcagaggcgctcctcacatcccagacgatgggtggctgggcagagacgctcctcacatcccagacagggtggcggccgggcagaggctgcaatctcggcactttgggaggccaaggcaggcggctgggaggtggaggttgtagctagccgagatcacgccactgcactccagcctgggcaacattgagcactgagtgaacgagactccgtctgcaatcccggcacctcgggaggccgaggctggcaggtcactcgcggttaggagctggagaccagcctggccaacacagcgaaaccccgtctccacccaaaaaatacgaaaaccagtcaggcgtggcggcgcgcgcctgcaatcccaggcactcggcaggctgaggcaggagaatcacgcagggaggttgcagtgagccgagatggcagcagtacagtccagctttggctcggcatcagagggagaccctggggagcgggagcgggagagggagagggagggacagcaaatatttattgagtgcctgccatgtgcagagagcacaacaggctgtgtctctcctgaatgagaggagcatgcattctggtgggggagaacaccagagagcagctcagcagggtgtgc

SEQ ID NO: 40582 - DNA, 938 bp, Artificial sequence
  DNA replication origin
gactccgtctgcaatcccggcacctcgggaggccgaggctggcaggtcactcgcggttaggagctggagaccagcctggccaacacagcgaaaccccgtctccacccaaaaaatacgaaaaccagtcaggcgtggcggcgcgcgcctgcaatcccaggcactcggcaggctgaggcaggagaatcacgcagggaggttgcagtgagccgagatggcagcagtacagtccagctttggctcggcatcagagggagaccctggggagcgggagcgggagagggagagggagggacagcaaatatttattgagtgcctgccatgtgcagagagcacaacaggctgtgtctctcctgaatgagaggagcatgcattctggtgggggagaacaccagagagcagctcagcagggtgtgccagaggctgcttgtgtgtgtagagcacagcagggggaggggagagggccgccctgacccgctgcagggagggagagccgtgtgggcatcgggggagtgcagggccaggctgatggcacagccagtgcaaagaccctgaggtgggcgcacgctcaagggtgtctgtgcccagctgggagtccaatgtggctggaacagcgtgtgctagcggtggaagcaggggatgtggtgacagaggtcaggggtggggatggtgtgcagagcagtcctgtggggcctgggagccacaggaggacttgggcttccgctccaagatgagagccactgagggaggaatgaggtccagcctttttttttcttttaaaactttgacctggcagtcagcttcttttgttgtgtttccttttttcttttgaaatgaggtctctgtcacccaggctggaatgcagtggcacagtctcagctcactgcaacctctgcctcctgggctcaagagatcctcccacctcagcctcccaagtagct

SEQ ID NO: 40583 - DNA, 1235 bp, Artificial sequence
  DNA replication origin
gccccgcggcacgtgggctcctgcccgtcccggccgggtgcgagctggcggagctccttggcccggagcgcgcggggcgggggcgcgcggggcaggcgggacgcggggcggaacggaggcaggatgggggcggggcgctggcgacatggcgcgctgattggccggcgccgcgctccaaggctgttaacggcgtctgggccgggctacggctccaaaacaaagggcaggcggcccgcggggcggcggcgggaggatgcctcgcgccctgcctaggcgttaacggcctcagcgcgtcccgggccgcgccgggaacgcctgagagccgagcccgcgctgaccggggcccgggccggatgggcgctgcgggccggggcgcggaccgcggagcggccgtgagtacgggcgggcctggctgcagctgcgcgggcggttactttgtggccacccaaggatactgtggctgcgggcgggcccgggaagcacctgttgggcgtccgggcgggcgggggcgcgagcagggcgggcctgtgacttttttgttccgttttggattttgatttgttgatattgggctcactccgttttggcacagacaacaacgcctaatctttgattcccccgccgtttcttctctccacctcccccgctgtccctcttctcccgccccgccgtgaaaagatagggaaaatggacaagatccctgatttttggattttccttccttaaaaaatacagcctcaactgggcaaggaaatgagggcaaaagaggtctcctaggaatgtttatcagaaaggcggaaaagcttttcaagtagccacataaagatcatgactaaaatggagcgtcctcggtatttaccacttgtggcataggtttcgttaacagagattgcaaaagcctgagcttcagagatctaaacagggtccgcctcccccatgcttggctctgattgacatctttgatgtccaaattatgtgctgaattctaaggatggaaaaaaggctgagattctattttaggcagataatgaacatggaagacatcaatttccccgccccacgctttttctgttccgttgcatttcttcttcctctatctaaaacatacccaccttaacctgatgtttcctttgctaagaatgttattcttcccacccaccagcccctgacactcctaattccctactcaggtcccaagactaggtttaccaccactggggagactttccaggcac

SEQ ID NO: 40584 - DNA, 2088 bp, Artificial sequence
  DNA replication origin
cagagagcacggggttgggggtaaggtcatagatcaacagcatcccaaggcggaagaatttttcccagtacagaacaaaatggagtctcccatgtccacctccctccacacagacacagtaacaatctgatctctctcctctccccacatttcccccctctattcgacaaaaccgccattgtcatcatggcccgctctcaatgagctgccgggcacacctcccagacggggtggcggcccggcagaggggctcctcacttcccagacggggcggccgggcggaggcgccccccaccgacggggcagctgccgggcggggggtgccccccacctcctggacggggcggctggccgggcgggggctgccccccacctcccagacgggctggctgccgggcggagacgctcctcacttcccagacggggcggctgccgggcggaggggctccttacttctcagacggggcggctgggcagagacgctcctcacctcccagatggggtggcggccgggcagagacgctcctcagttcccagacggggtcgcggccgggtagaggcgctcctcacatcccagacggggcggcggggcagaggcgctccccacatcccagacgatgggcggctgggcagagacgctcctcacttcccagactgggcggccaggcagaggggctcttcacatcccagacaatgggcggccaggcagagacgctcctcacttcccagacggggtggcagccaggcagaggctgcaatctcggcactttaggaggccaaggcaggtggctgggaggtggaggttgtagcgagccaagatcacgccactgcactccagcctgggcaacattgagcactgagtgagcgagactccgtctgcaatcccggcacctcgggaagccgaggcaggcagatcactcgcggttaggagctggagaccagccgatccaacatggcgaaaccccgtctccaaaaaatacaaaaaccagtcaggcgtggcggcgcgcgcctgcaatcccaggcactcggcaggctgaggcaggagaaacaggcaggaaggttgcagcgagcggagatcacggcggtacggtccagcttcggcaacagagggagaccgtggaaagcgggagaaggagagagggagagggagaaggagagggagagggagtggtgtgtttggcgggggtggggggactctttgtgtggaaggtgacagacttgcacgtttgcttacatatactagagttagaactgtgcttgggtaggtactttgagatcattggaataaagatagcatgtgaaaacagaataattatgaaaacgtcttcttttatacagcactttgtactttttaaattgctttcactgctgtcacatcaaacctcttcacacttctgtaggacagataaagcacaattatttctctgttacgcagatggggaaacagacctaggcagggatatagtgacctgcccacaggtctaacagcatttgagtgataattagaactaaagtggaggaatttttatttgagaagttgagcagtgagagtcaaaatcttcttaggagctgtaggtttttgtaccaatggagagatctctttttctgttggatatgattgacaatgttagaagagatattcactggaggaaggccccgcagaaggaatgaggaacagacctctggcctgtattgtgcctccattgtctctggtgtagttgtgcatattgtgagattacagatgggaaagaaagagatcttcaccctcagctcaagagaagaaagtaagggtgctgtaggaacagatgtcacagtaaaagcatgccaatctaagtgtgctcaagggattttatgctagttggccttaggttctggtaagagataaggtggggcatctgccaagagtacataagggatcaggggcttggaaagtgtgaagaaagtttgagatagctgttgtgtgcttaaaattaactaaagatgaataaaaagactggcccctttcattgagagtggggactttgttctctgctgtatccccagcacctagtatacacattgcacatagtaggtactcagtaaatattt

SEQ ID NO: 40585 - DNA, 856 bp, Artificial sequence
  DNA replication origin
tgtctgggatgtgaagagcccctctgcctggccgcccagtctgggaagtgaggagcgtctctgcccagccgcccatcgtctgggatgtggggagcgcctctgccccgccgccccgtctgggatgtgaggagcgcctctacccggccgcgaccccgtctgggaactgaggagcgtctctgcccggccgccaccccatctgggaggtgaggagcgtctctgcccagccgccccgtctgagaagtaaggagcccctccgcccggcagccgccccgtctgggaagtgaggagcgtctccgcccggcagccagcccgtctgggaggtggggggcagcccccgcccggccagccgccccgtccaggaggtggggggcaccccccgcccggcagctgccccgtcggtggggggcgcctccgcccggccgccccgtctgggaagtgaggagcccctctgccgggccgccaccccgtctgggaggtgtgcccggcagctcattgagagcgggccatgatgacaatggcggttttgtcgaatagaggggggaaatgtggggagaggagagagatcagattgttactgtgtctgtgtggagggaggtggacatgggagactccattttgttctgtactgggaaaaattcttccgccttgggatgctgttgatctatgaccttacccccaaccccgtgctctctgaaacatgtgctgtgtccactcagggttaaatggattaagggcagtacaagatgtgctttgttaaacagatgcttgaaggcagcatgctagttaagagtcatcaccactccctaatctcaagtacccagggacacgaacactgaggaaggccgcagggtcctcc

SEQ ID NO: 40586 - DNA, 1150 bp, Artificial sequence
  DNA replication origin
ctcttcagctctcccgctcggcgtcttccttcctcctcccggtcagcgtcggcggctgcaccggcggcggcgcagtccctgcgggaggggcgacaagagctgagcggcggccgccgagcgtcgagctcagcgcggcggaggcggcggcggcccggcagccaacatggcggcggcggcggcggcgggcgcgggcccggagatggtccgcgggcaggtgttcgacgtggggccgcgctacaccaacctctcgtacatcggcgagggcgcctacggcatggtgtggtgagtgtccgcgaccggccacgcccggcccccccaccgcccggggccgcagcggacgcagcctcggcctcgcccgcgcctcggcctcaggcgccgcggcgacctcgaacccggacttcaccgcggtccgcgcgccagggctcgggcgcggccccgggccggttgaggtttaggtgttgttgctcgcggttcccgggccttcggtcgctcgggaaggggctcagggagtggcgcggggggcgtaggccggtactagtggacccttggccccgggcgcagcgcggcctttaaagtctggaccctcgggaaggcaacggaagggtccccacccctcaatttgctagtatcatggccttcttttggactttcgattgtaaaactgtgaattccatcagatgcttgtcggtgttggcggcggtggctgctgaggtcctgaaagcgttttgcctccgcgtgtgtgcagaacaccgaaataatcgtttttctctcttcgcctctgtttgcagccaacggctttcattaaatatcctcagcggtgctaatggtggtctccgcgcaggctttctaaaatggattactgacgccagtgttggtggcatatttccgtcttgaagtttttacttctaagtggattttaatatcgtactgctggcgtttcaggaaggataaactaacattactctcttgatttgttaaagatccgtttagagttgggcctaatttgactttttttttagcccccaagtgagctcttttaccagcataaatgctcccagatgttttagcccaattgctatggactcctgttaatgatttagtggtcattatgtatgcagccttaatggagttcttgcagaatcacacgtag

SEQ ID NO: 40587 - DNA, 1216 bp, Artificial sequence
  DNA replication origin
cccgggcggtgggggggccgggcgtggccggtcgcggacactcaccacaccatgccgtaggcgccctcgccgatgtacgagaggttggtgtagcgcggccccacgtcgaacacctgcccgcggaccatctccgggcccgcgcccgccgccgccgccgccgccatgttggctgccgggccgccgccgcctccgccgcgctgagctcgacgctcggcggccgccgctcagctcttgtcgcccctcccgcagggactgcgccgccgccggtgcagccgccgacgctgaccgggaggaggaaggaagacgccgagcgggagagctgaagagccgacagccactcggaccgattgcctgcctgcctgccagactgacgggcgggccggcgggcgggcggagggaggggcgcgcgccgaggagggtgccggggcggggacaagaagtgtgcatgcggattggttcctcgcggctgggggcggggccgcgcgggccggcggaagcggcgggcttcgggaggggcactgcgacggcgttgactgagggggcgccactaggcgcggtcacgtgcattcgcggtgcattcgcgggggcgtcggtgcgggtcgcgtctcttaagacacccagggagacagacgtggggcagaactcatgggctgaagtgagagatggctggggcccaggcgagcgaccgagcagggtccgaacagagccagcgagggaccccgggctgtgcttgaggcccgacgacgcgccatatcccggcagcgccgcagctcaggcctctgcgaatctgtggtccacacgctgataaacttagaggcctctgcactggggcagaaaccgaaaggcatgacccagaccgagaaagatatttgcatactgagaaagtgtgaaacacaattgtcgagactaaaaggagacactgagaggatacgccaatcaggttagttcagatgtttgttgagcacactccatgttcctggggatccacccttatagaagttaccttttagagagaggagacagacaaatacgtgtaatgctcaagttgtgataagtacgatgaagaagtacaaagcagaagggagggcgcggtgtctcacgcctatcatcccagcactttgggaggccgaggcgggcggatcacttgaggtcaggagtttgagaccaggtctctactaaaaatacaaaaattaagtccgggcgaggtggctcacgc

SEQ ID NO: 40588 - DNA, 972 bp, Artificial sequence
  DNA replication origin
gaaaccgaaaggcatgacccagaccgagaaagatatttgcatactgagaaagtgtgaaacacaattgtcgagactaaaaggagacactgagaggatacgccaatcaggttagttcagatgtttgttgagcacactccatgttcctggggatccacccttatagaagttaccttttagagagaggagacagacaaatacgtgtaatgctcaagttgtgataagtacgatgaagaagtacaaagcagaagggagggcgcggtgtctcacgcctatcatcccagcactttgggaggccgaggcgggcggatcacttgaggtcaggagtttgagaccaggtctctactaaaaatacaaaaattaagtccgggcgaggtggctcacgcctgtaatcctagcactttgggaggccgaggcgggcggatcacgaggtcaggagttcaagaccagcctggccaacatggcgaaaccctgtctctactaaaaatacaaaaattagccgggcgcagtggtgggcgcctgtcatcccagctacttgggaggctgaggcaggaggacaaagcagagagtaagggattagggggtggtgggtcgaaacacatgagagatacatttgcgttcagagacagaccgagattggtacagataggcagaaatgctgacagagcaggtaatgaaatagaaatgcaaagatagagtcactaaaaccaaaacatcgaggtttagagaaaaagagacacaccaggttaagaaacagtcacaaacaacagaggttgaaaaaataaaaattagagtcctgaagcaggtggataccaaggaaagctaagacaacgagacggacaatgacccaggcactgcttctgaaccttttcccctgccatgtttggagggagaaggaagagcggcagaccctatatcctctttgttcaactcttccaagtttaaaaccatcaactcttgacttctagacatcaa

SEQ ID NO: 40589 - DNA, 1000 bp, Artificial sequence
  DNA replication origin
tctgggaagtgaggagcgtctccgcccggcagccaccccgtccgggagggaggtgggggggtcagccccccgcctggccagccgccccatccgggaggtgaggggcgcctctgcccggccgcccctactgggaagtgaggagcccctctgcctggccagctgccccatccgggagggaggtgggggggtcagccccccgcctggccagccgccccgtccgggagggagggagggggtcagccccccacccggccagccgccccgtccgggaggtgaggggcgcctctgcccggccgcccctactgggaagtgaggagcccctctgcccggccagccgccccgtccgggagggaggtgggggggtcagccccccgcccggccagccgccccgtccgggagggaggtgggggggtcagccccccgcccggccagccgccccgtccgggaggtgaggggcgcctctgcccggccgcccctactgggaagtgaggagcccctctgcccggccaccaccccgtctgagaggtgtacccaacagcccattgagaacgggccatgatgacaatggcagttttgtggaatagaaaggggggaaaggtggggaaaagattgagaaatcggatggttgccatgtctgtgtagaaagaggtagacatgggagacttttcattttgttctgtactaagaaaaattcttctgccttgggatcctgttgatctgtgaccttacccccaaccctgtgctctctgaaacatgtgctgtgtccactcagggttaaatggattaagggcggtgcaagatgtgctttgttaaacagacgcttgaaagcagcatgctcgttaagagtcatcaccactccctaatctcaagtacccagggacacaaacactgcggaaggccgcggggtcctctgcctaggaaaaccagagacctttgttcacttgtttatctgctgaccttccctccactattgtcctgtgaccctgccaaatccccctct

SEQ ID NO: 40590 - DNA, 1254 bp, Artificial sequence
  DNA replication origin
gcccctcacctcccggacggggcggctggccgggcggggggctgacccccccacctccctcccggacggggcggctggccgggcggggggctgacccccccacctccctcccggacggggcggctggccgggcagaggggctcctcacttcccagtaggggcggccgggcagaggcgcccctcacctcccggacggggcggctggccgggtggggggctgaccccctccctccctcccggacggggcggctggccaggcggggggctgacccccccacctccctcccggatggggcagctggccaggcagaggggctcctcacttcccagtaggggcggccgggcagaggcgcccctcacctcccggatggggcggctggccaggcggggggctgacccccccacctccctcccggacggggtggctgccgggcggagacgctcctcacttcccagacggggtggctgccgggcggaggggctcctcacttctcagacgggacggctgctgggcggaggggctcctcacttctcagacagggcggttgccaggcagagggtctcctcacttctcagaccgggcggccgggcagagacgctcctcacatcctggacggggcgacagggcagaggcgctccccacatctcagacgatggacggccgggcagagacgctcctcacttcctagatgagatggcggccgggaagaggcactcctcacttcctagatgggatggtggctgggcagagacgctcctcactttccagactgggcagccaggcagaggggctcctcatatcccagacgatgggcggccaggcagagacgctcctcacttcccagacggggtggcggccgggcagaggctgcaatctcggcactttgggaggccaaggcaggctgctgggaggtggatgttgtagcgagccgagatcacgccactgcactccagcctgggcaccattgagcactgagtgaacgagactccgtctgcaatcccggcacctcgggaggccgaggctggcggatcactcgcggttaagagctggagaccagcccggccaacacagcgaaaccccgtctccacccaaaaaatacgaaaaccagtcaggcctggcggcgcgcgcctgcaatcgcaggcactcggtaggctgaggcaggagaatcaggcagggaggttgcagtgagccgagatggcagcagtacagtccagcttcggctcggcatcagagggagaccgtggaaagagggg

SEQ ID NO: 40591 - DNA, 1198 bp, Artificial sequence
  DNA replication origin
ctcctacttgtgagtaaatgtgaaccatagcaataaatttagtctatccccagaaccttcagtagcaagcacccctattcctacgttatttgtatgtgtccactttaaataaattacctttcaattctgcctctaaaagaagagaagggttttgtgttttgttaatttaccacccttcaccccttgcattccaaatccctcactgatcagacatttaacttggtgctgggacctttccctctgcccaccccattctcttttgtgttttttatctttaggcttccagaaggcttgttccaagttagcaattcctgataaggacagccctcttgtgggctgtgagctccctgcatctcttacttcccactctcttcatcctgcacctcaggcccctgccacagccgcccttttagcaaagtttgtaggcagagtctgtggctattctaagactgatgattctagaagattctccttgccttcttcgttcagttttcagaacctggaagtcctcatgaaggtgatgggctgtgaaactgttccccaaattctccaccctagaactcggggtgttcctcagagtctcatgtccgtttgtcaccataaaagaatgcagtttttctccctggcttagtaactgtgtaggatttcttttttatttttttctggatccaatctcatccactactgcgtaggactcgctgaataaagtttcccagcctgagtgttagacaaagcccaaggtggagtccccgctgtggggagggtttggaggggtcaggcacccgagaggaagggggcaggagagagaagggtccatgctgagtgggtgctggcagggaggcccaggtgtggggcctggaggtgaatccccggggcgacgcaaagaacatggaagggggggcgctggagagctgtttgggtataggcaaggcaggcaggctggggaggcgactatggagattcggagttaggagagaagaggagccagagccaccctgggaggaggctgtgaggcaccatgtgcctctttccagtgagagagaagccggtgagggagtgaaggcacaggctttgcgatccctctttggccctgtcttccttctgacacctcaggcgagggactaaccctctccaaaccttgggattctcatctgtgaaatgggggcttgtcctggctcctggggtgttaggggcaact

SEQ ID NO: 40592 - DNA, 1053 bp, Artificial sequence
  DNA replication origin
ccggaggggtggaatcagagggctggggaggcaaggaggccgagacgaggctcacatgggtgcaccgaaagggtgcgggggtgcagtgcggggggccgaggagcaagaggggccgctgcggacatgaggaacccgaggctgggagttggggggctggggagccaagggggcagaactggggggcaggcgggggtgtggccgagccgagggcctggtagggaccgagggctatgaggcagaatcgggtgctgagggggacgcgccccattttccgagatttggcctctccccaccccccaggagcctctgggccggcacgttgccccatatccccccagtccctgcaccttcaggggcccagtctgcctgatggcccccggctccgcggcctcccaagcgtccgtgaagcgagcgtcagctgcacaagtgctcgggctgcagctgcttcagccacaggtctgtgagccagagcctcaggcgcggaggccgggcacattgccgctgggttcggtcaggcaagcccctgaacctgtctgtacaacaggaagaactggctccggctgcagggatttcggcacagcgcttgacacacagtgaggcccactgcatggtggcgggctccttcgaagccttccaccctgcgggacagagtcacacatgtcgtggtggcattccccgggacaagttctctgggcccagctgagctctcaccacgggggatagaaagtggggccggccagcactctgaggccatctccagtctcttctgttgtcaaatttcgctcttttcctcctgcacgcgaggtggaaataccaaaggcattgggcatccagagaccttgattgagttcgctttgccctttcacctgtgtgagaccttaaatgggtgcttgccctcctataacctatttcttcatctgcagtgtagcctgacagtatgtacttctcagcgtagttgtgagaggtaaacaaaacgaatgcatttctgaaagccatgaacctctacacaagttcatttgtggaattcctttaagataccccctgaaggccggg

SEQ ID NO: 40593 - DNA, 1030 bp, Artificial sequence
  DNA replication origin
cccactgaggctaagtggacttctgacctccagaacggaaagataacaaaagcctcaacgtttgtggaaacaaacaactcataatgagcctgggactgtgcctccttcccggacggatgagcctgcctgggcagtctgggtttgcatccctgctctgtcacttaccagctattgacggcagaagttgcttaatttctgggcgctgtgacctagggattgctttccccatccagccgcccacccaaagctgcagaagagaagcaagaggctggtgactggggcggctccggagcccaggtggagccgcagttcgcctaccactaaagggccgcagtcaccgtccacgtagccgccagggggcagcagaggtccggccccgccagcctggaggcccgactgcgcctgcgcggcgcccgcggcgcccgcggcggccagggacgggaagtgggcggggccggccggcagcagcttgcgggacacggagccgcgaggagacagctgaggcccgcggagaccaggggtgaggaggccgggggggacgggattagagggctgacggggctgggacgagggtcaggcgagcgcccaaggcgcacaggggtgaaatgggaccgaggaaccggaggggtggaatcagagggctggggaggcaaggaggccgagacgaggctcacatgggtgcaccgaaagggtgcgggggtgcagtgcggggggccgaggagcaagaggggccgctgcggacatgaggaacccgaggctgggagttggggggctggggagccaagggggcagaactggggggcaggcgggggtgtggccgagccgagggcctggtagggaccgagggctatgaggcagaatcgggtgctgagggggacgcgccccattttccgagatttggcctctccccaccccccaggagcctctgggccggcacgttgccccatatccccccagtccctgcaccttcaggggcccagtctgcctgatggcccccggctccgcggcctcccaagcgtccgtgaagcga

SEQ ID NO: 40594 - DNA, 1026 bp, Artificial sequence
  DNA replication origin
caggagtttgaggctgcagtgagctgtgatcatgccactgcactccagtgtgggcaccagagaaggagcttgtctctaaaaagagagaaaaagaatattttcaagagcctctgtgttggcagaaaaatggcccttcagagatgttcatgtcctatacctgtgcctgtgttagattacatggcagacccggcatagtggctcacgcctgtactgtaatcccagcactttgggaggccgaggcaggcagatcatttgaggtcaggagtttgagaccagcctgaccaacatggtgaaaccccatctctactaaaaatacaaaaaaaattagccgggcatggtggtgcgtgcctgcagtcccagctactcgggaggctgaggcaggaaaatcgcttgaaccagggaggcagaggttgcagtgagtcgaggtcatgccactgcagtacagcctgggtgacagggtgagactccgtgtcaaaaaaaaataataataataataaggggcaaaggggaattaaggttgctaatcaactgatttagagagatgatgctggactatctgggtgggcccaatggcatcaggagggtctttagaagtagcagaaggaagcagaggagggaaccagaggtggcagtgtgagaaaggctcaactggccattgctggcttcgaggctgtaggaaggggccacgagccaaggtatgcagggagcccttaggagctggaaaaggcaggggaacagtttctcccctagaatcctcagaaaggaacgcattctggcgatccctggatcttcgcccactgaggctaagtggacttctgacctccagaacggaaagataacaaaagcctcaacgtttgtggaaacaaacaactcataatgagcctgggactgtgcctccttcccggacggatgagcctgcctgggcagtctgggtttgcatccctgctctgtcacttaccagctattgacggcagaagttgcttaatttctgggcgctgtgacctagggattgctttccccatccag

SEQ ID NO: 40595 - DNA, 846 bp, Artificial sequence
  DNA replication origin
atctcaaacaaaaaaaaaaaaaaaaaaaaaagggaaaaccaccacgtaagtacctttgtggtatcacatcatgtccaacaacactcgcagaagaaactcagaactacaatgagcttgtgcttatcacatagggagagactcaaagtcgttgcacacacagcagatgagggcatggggaagttaaatgggaacaacctctatgtgcagcaattcagggatccctctcaaagtccgagtgcacatcccagcaattccactccttggaatgaacttaatagtccagttatttattgagtacctactgcatgcttggcctagtccaggatgcagggaatacagcacaaagcaacaccaggtcctgccctcccagaactcatgctgtagtatgggagcaggggagggacagggcagggctgggtgacacctgggagaagagtccaggcagaaggagcagggaaggtgaggtccttggggaggatatggctgggcaggggggctcatggggctgagggagggagcaggggtgtagaatgtgggtctgctctaggggtgctgggaggcagcagagggtttgcataggtgtgggataatctgacttcaagtgttaaagggacctctctggctgccacatagaagaggatgaatgggccctgggtagcagtggtggaggatgcgagggaagtcagaatccaggcagacctgggatggcgggacatgggagggggaggggaaggtgagtcaagaatgacctgaggcagagctgggcatgggctcacacctgccatgggctcacacctataatcctagtgctttgggaggcgaaggcaagaggaccacttgaggcca

SEQ ID NO: 40596 - DNA, 1217 bp, Artificial sequence
  DNA replication origin
gcagagggtttgcataggtgtgggataatctgacttcaagtgttaaagggacctctctggctgccacatagaagaggatgaatgggccctgggtagcagtggtggaggatgcgagggaagtcagaatccaggcagacctgggatggcgggacatgggagggggaggggaaggtgagtcaagaatgacctgaggcagagctgggcatgggctcacacctgccatgggctcacacctataatcctagtgctttgggaggcgaaggcaagaggaccacttgaggccaggagtttgagaagagcctgattaacacaatgagacctcatctttacaaaaaagcaaaaggaacaacccatggctttggcttaggcatgacaggaagggactggcagtctgatgtgggacttcaggtgtgttaaacgggacctgcccattggacagcctgggtggcctggaggaggtggcagcaatgtggaaggagcccaggctgggggtcgggagatgaggagctagcagggtgagtcaggaggggtaaggtcctgaaagccacaggaaagagcacttcagggcagttatcaccatgtgggggacactgacaggccaggcgagatggcagctgagacctgactgtagggtctggcaaacagagccctgggtaatcctgatggggccatgtggtgagtgacagatgaaagctgcatggggtgagctcaacaaaacctgggagatgggagaaggctggtgcactgtcccctcttgtttcaggatggtggctgtgccagcatgttctccgctgatgggactgctctggcgagaaggaaaagagaagctgcgtgccggaggggaaggaactgctgcagtgatggccttgggagggtgaggggcaagagaggcagccggtcagcatccaggcgatgcagagctgccacaaggctgcacttctcttggtggaggaggaggcatggtacggctgtccactgagggaggacaggtggtgatgctgcgggcaggcccacagcagaggaagcactggatttagttagatgggagagtccaggtgagtaggagggagagggagtgggtcagggttcgaggggagagattacaaggacagaacctgactctgagttgggtgaagagggaggtgagggttggggagggtccacagagggtgtgctctgtggggtccaggaagtgaggcacaagagcaggaagtggg

SEQ ID NO: 40597 - DNA, 1308 bp, Artificial sequence
  DNA replication origin
gacccgggtgggcctctggtggcctttcctgctcgccatccactggggctgtctcgtcctggccctgcccagcccactggtctgacctgctcctgcaggggaccaggcacaactctgagaagtcagaggccctggggaggtggggtcctcgttgccttggtgatattgcaggctgtccctgctgtgggcctgggagctggtcccctggcaccaccctggctctgggggcctcccagcagtgtggggcgctgacaccaagtaccacttcatgcgacttcctcggcccctcctgtctctactgcctgggccactggcagagtcacacccgccatggccagctctgagctcgtctgctcggccatctgtcctgctgccactttgtcctgcaggaacctaggcccagagctgtgagggggaggccagagcgtgcccagggcctccactggggatgtgtcccgttcgtttgagtggtgacatccaggtggcagctgggggctcctgcctgtagcaggtgacagggctgggctggctcagcacactactgaccatggctgccagggagcaggccagggaggccgaggcagagctggggccacaggcaccagccaggcagcatcctttggggcatgggtgagtggcgagctgtggagtgctgccaggaggctgggattccaggccagggacggggacagcccgctggtggagtccgaatgccaggcagaggggacgcacacctgcccatgctcctgccttgcaagagggcatctacctgggatcagagcctagagcgtgtgggaggagagttgtggggtcccggcatgggcagggtagcaggtgggtcccgcgtggttgggactgggcacgaggaggccttgtaactggtgctggatcagctgggtcaagggccgcacaccagtgacctgggggtgagggtgcccctgggtgggagctggtggtgctgaggtggccaaggacttgtccactcccaagggaaggtgctggtgggagggggtgccacctccgcagccaccaccttcgatgctgacctgggttgcactggcatctcattgggcgtggggactccgagagtccaaaattgggtggagacatttggggacacagctgcctgaattcctcatggccaagggggtgggcaagggctgcaggaaggaagagtgtccgctgtcctggccagtgcaccaggaacggctttctaacccgggcaggaaggcgtgacgcattcaggatgtggggggcacacagttcccagtgtgcacctaggggtgaccaggaggagaagaggcgcca

SEQ ID NO: 40598 - DNA, 1202 bp, Artificial sequence
  DNA replication origin
ggactttattatcatgttctgattggtcgttttaagacttgctctcatccagtcagaacatgataacaaagtccaaatctgagtatgcctagaggtttttctctcatccaatcagaacatgtagtcccagaactcatttgcataactccgcatataaagtatgctgaggtgggggagtcagaccatcccgggttctttcctgtttgcctacacagctcttctgtgcccaacttaaaggcagaggagaaggggaaggaagacacctgccaaatgctggaggctgcagcctgcggcaccgcggctcgcctcactgtgggtggtggccgagatggcgactgcagtgcgaccggagtggtaagagggggaaaatagttttggggtagatggaggaggaaaacagggtggtgagtaccaacgggaaaagaggatggcaagcaggagaaggcattgcaaaaaggcaataggaaaaagacggtgggaaaaaaaaacgtttttgggtagatggagggggaaatgaggttggcaaataggagagggaaaaacggggggctgagcaggagggagaaaaggttttgtgaaaacagggtggggaaaagatggtgggtaaaaagtttttgggcagatggagggggaaaagagggtggcaagtgggaggagtaaagagaggttggtaaaggtggggaaaatgggcaagcgggagggagggaaggatttgcaaaaagacagtggggagaaaagtttttgggtagatggagggggaaaagatggtggcgagcatgaggggaaggagggttgggaagacaaatagttttggggtagatggagggtgaaaaaagagtggcatatgggagaggggcaggagtggggaaaagaggttggtaagcaggagtggggagaaggcattgtgaaaagatggtgggggtgtgagaaaaaagttttggggtaggtggagggggataaaatggtggtgagcagcaggagaggggagaaggctttgggaaaagatgggggaaaatgtttttgggaagatggaggagcaaaagagggtgatgagagcaggaaggtgaaaaagggagaatttgcaagagtggtcattctgattagtcattcactctctccttggtaagtataatgatagctgtgggtttcatagataactaccactagtttcaggaagttatcttcttgtccataactctgga

SEQ ID NO: 40599 - DNA, 882 bp, Artificial sequence
  DNA replication origin
ttaaaacgaccaatcagaacatgataataaagtccaatcagagtaggcctagaggtttttctctcatccaatcagaacatgcagttcaggaattcatttgcataccctccctgtataaagcatgttgagtgggcagagtcagggtcttccgtatattctccccgtaccgtccgtgctcggcttagtgcaggaagaggagaagaacgggaagacaaccgcggcacagcagcttacctgctgatgttggctgtggtgatggagcctgctaccggagccacagtggcccacagcgggagcatggccagagtggtagaaagacagtggggcaggtatgctatcagagctgcgctgcccgcggtgagggcagattgggggcgctatctggggttgcattgcctaggtgggttctgtgcagtatcggggactacgttacttgcggaggtggaacaggggaagggggtggggtggggggtacactattgaggatgggattaggtgtgctatcgggggccgtgctgatcatcaaggcggcttaggtgtgctatcggggcaggggacacgctgctccgagttgggggatgttacaggggctacactgcctgtggctggcaggggttaggggcactatctggggctgcacagccggtagtgggtggcgtgttagggacgctataagctactgtgttgtctgtgccccagggagggttgggtgtggggttgggtgtgctatcggaggctacagtgctagcagacaggttaggggcactgttgggtgttgcaccgcttgtgccaaggggtatgtttggtgtgctatttggggctacaaggggcaggttgggagcactgtcgggtgctgcactgcccatggcaaggggtgggttg

SEQ ID NO: 40600 - DNA, 1385 bp, Artificial sequence
  DNA replication origin
ttgaggatgggattaggtgtgctatcgggggccgtgctgatcatcaaggcggcttaggtgtgctatcggggcaggggacacgctgctccgagttgggggatgttacaggggctacactgcctgtggctggcaggggttaggggcactatctggggctgcacagccggtagtgggtggcgtgttagggacgctataagctactgtgttgtctgtgccccagggagggttgggtgtggggttgggtgtgctatcggaggctacagtgctagcagacaggttaggggcactgttgggtgttgcaccgcttgtgccaaggggtatgtttggtgtgctatttggggctacaaggggcaggttgggagcactgtcgggtgctgcactgcccatggcaaggggtgggttgggtgcactatcaggggctacactgcccagggcggggcgggtggggggggcgtgctatcctgggcttcactgcccatggcggggggctggctggggacgctgtcataggttgcattggggtggtagggggcgggttcggtgtggtattgggggctgcattgccagcagtgtgggggggggggtggttgggggcactgtcaggagcttgcgctgtcaagctagtagcaggttaggtgtgctattgggggctgcactgcccgaggtaggggggcggattaggtgcgctattgggggctaaactgcccacagctggcggggtttgggggctctgttggggggttgcagtgtcagaggcgggttaggggcattatcagctgctgcactacccgtggcaggaatcaggttgggggcactatcgggtgctgcaatgcctgtggtggggacgggttgtgggcattatcgggtgctacactgctggcggtggagtggttgggggtgctatcggggtcacactgtcagcggcgggggacaggttaggggtgctatcggatgctacactgtggtggagggcagggggtggggtgttgagagcgctatttgaggactacattgctggcagcggggggcggattaggggcactctcagggctgcactgccggcagcaggcagcagaggtggcagtgacagcagtggtctccacggaaaggacagtccttccctccctggactccaggctttacaaagcgattttctcctgcttaagtacagaggacatacagtgtttccgcaggaatactgagcacggcagggccccccacatctgctgtggttccctgggttacaccctctcgctctgtgttgtggatactgcctgggacccccaggcaccgagtaacgtgcaccacgtgggggacggtgctctctgggtggaggctcaggaatgagagcccgcacttgggtggggagagctggctgggtctga

SEQ ID NO: 40601 - DNA, 1523 bp, Artificial sequence
  DNA replication origin
cctctcaaaatgttgggattacaggtatgagccaccatgcctggctaaaaatagtattatatttttgtatcatataattttcaattaggtaatatgaatattctgtacaggaaatacgcccttaattacataggaataaacatttgttacactgagaaaaatctaacagagctaaaaataaaaattaatttggaaaggtcattagatactgacacattcttacgtttatacattctttcatatattcatatattcttttaacagtatcaatggtttggagttatgtgtacaaaaccatgacctatatgtaatacaactaataacaggcacttacaattcaaggcatattatatacaaagctttaacttcttatcaaaatattttgttttttttctttctgttttggcagatactatgaatacaacattcaactcacagacaccatggagcccttactaagcataaagtactgtgaaaggccagggctaggacagaactgagacagggccagggataggacagaaccggggcagggtcatggccagagaaaaaccaggggcagggtcacagccagggacatgagaggaccaaggccagggccagaagcagggcagaaccagggccagggcagggacatggcagggccagggccatggcaggatcagggtcagcagaaggccagggcagggctagggtagcacagggccaaggcagggcagggtcagtgtagagcaaggaacgggccagggtatggcagggcagggacagggaggtccagggccagagtcaggtccaggacatggacagggcagggccagaaacatggcaggaccagaaaggggacagggcaagggcaaggccagagaaggaccatggaaaaaacatggccagggagggtccagggcaagggcaaggccagggcagaaccagagccagggcaggccaaaggcagggccagggcagggcaaggccagggtagggtggggccagggtagggtgagggtagggccagggcgagttcagggccagggcaggactaagatagcacagggccaaggcagggccagggcagggccaaaaggaggggccagggccaagcatggccagtgtcagacctggggattgtcagggccagggtcagggtcaaggctgggccagggacagggccagagcaagggcagggccagggagaaagcagaaccagagaggatccagagcaaggccagggtcagggaagaaccaggaccaggataaggcaaagccaaggccagggcagggcaagaccagggcagggcaagaccagggcagggcaaggccagggtagggccaggccagggtaggagaaggccatgatagggccaaggccaaggcagggcagggctagggtagcacagggcatggccaaaaacagggcagggccatagcagtggcaggactagcaacagggccagggcaagcgctggaccacagcatggtggggacaatacagggccaggacagaggatggcaaggcaggtccaggg

SEQ ID NO: 40602 - DNA, 1576 bp, Artificial sequence
  DNA replication origin
cgccgccgctgtccgcctctccgccgctgtccgcctctccgccgctgtccgcctctccgccacgccggcgctgtgtgcctttgcgagggcggagctgagttctcctttgcacagacttcggagatacagcgaaggcagagcaatgttctcctcagcacagacccgggcgggcgggccggtggcaccgcgagggcggagctgcgttctgctctgcacagaccttgggggcactgcctcgctttgggacacctcggggccgcatcgacggtgaataaaatccttcctgtttgcagccctgtttgtggttggtggcagcgatggacactgcagccagccagagcgtagaaaggcgttggggtaagcgcgctatccaggctgcactgcgggtggcctgggaccggttgggagccctatctcaggcgtcactgcccgtcttgggtggctggttgggtgtgctatctggggctgtgctgcctgcacggggggatggtttgggagcccaaaccggggctgcactgcctttggcggggagccggttgggggcactatcccagactgtattgctggcaacagtgaggtgggctaagtgtgctatccggggctgcactgtgcggctgtgggcggtgggggggtgggtggcggtttcgggttgagggcgctatggggtgctgtaatgcccatggtgcggggaggcggggcggcttgggtatgttgggtgtgctgttgcgggggggcgacactgctggtggtagggggcagggtgggttgggggccatatcaggggctgtactgattgctttagctaggatttctggtactatgttaaacaacagtggtgacagggggcatccttatcatgttccagatcttagaggaaaagctttccgtttttccccattccatatgattctagctgtgggtgtctttcctgtagtttttattatgttgcggtatgtttcttctgtgcccgtttctttgaggatttatagcatgaagggatgttgaatttcatcaaatgctttttcggtttcagttgacgtgatcatactgtttttgtcgtttatttggttgatatgatgtatcacattgtatgttgagtgacccttgcatcccagggatacatcccacttgatcatgatgaattatctctttaatgtattactgaatttgattcactggtattttgttgaggatttttgcatcaatattagagatcctggcctgtagtttccttctttgatgcttttgtctgattttgttatcacagtaataatggtctcatagaataagtttggaagtattccctcctgtttttcaaaatagtttgagcaggattcgtactaggtctttaaattgtttggtgtgaagccatcagcagtgaagacatcagttcctgggcttttctttactgggagactttttctgatggcttcaatctcattacttgttaccaatctgttctggtcttggatgttttcattgtttaacctaagtaggttgtatgcatctaggaatttgccaatttctactaggctttccaatttattggcatataatagccagttatgatcctttg

SEQ ID NO: 40603 - DNA, 1769 bp, Artificial sequence
  DNA replication origin
ccgaggtgtcccaaagcgaggcagtgcccccaaggtctgtgcagagcagaacgcagctccgccctcgcggtgccaccggcccgcccgcccgggtctgtgctgaggagaacattgctctgccttcgctgtatctccgaagtctgtgcaaaggagaactcagctccgccctcgcaaaggcacacagcgccggcgtggcggagaggcggacagcggcggagaggcggacagcggcggagaggcggacagcggcggcgcggcggagaggcggacagcggcggagaggcgcacagcggcggcgcaggcgcggagaggcgcacagcggcggcgcaggcgcggagaggggcacagcggcggcgcaggcgcggagaggcgcacagcgcggcacagcgaggcgccggcccagactccactccccagctgtgaaagggtaagaactgagggtggctgagactcggggttgttcagggcggggtgggctctggacccagcaggcccggcacccaggtcagggctccaggggaggccaggtgggcgaaggccaagaaggggccggggctggtcaggaagggctcctggtaaccagagcactttgcgtgagccagcgtgggaggaaggtgggctggatgagctagggaggcgccgggaggggccttggcagaggcgaccccctccgtcagcccccaggccactgaaccctgggtagcgagaaccgacaggggaggctgcatacagaggagtggaggctccccggctttgggggctctgagtagaagcatctagggggtccctcaagaggcccccaaacgcctccccatggtgagaaaagaaagcgcagagaggggcacggctgtgatttcttttattgccccaaatgtacttcatcttggtagatttctattggctttaaaaatgtgtgtgttttgctgttggggagtggggtgttatacggatgtcagattttgctggttgactgttcagatcttttgtaaatccttgctccttttctgcctagtttcactctgtcacttacattagagtgcggtggcacgaacatgactcactgcagccttgacttcctagggtcaagtacttcccctggcttaacctcctgagtagctggtactataggtgtgtgccgccacacctggctaaatttaaaattttttggagagatgaggccttgctatgttgcccaggctcgaactcctggcctcgagctatcctttgtctttgcctcccagagttctgggattacaggcatgagccactgtgcccggcctctgcctagttttaacagttgctaagaggaggatgttgaagtagatgtcttcttggtgggttaatccttttgtcattaagcagttgttatggtcacttccttttcaccccattggtgaaggaggggtccctgccctaaagtgtaggagatggctgaacacgacacctggcgtggatggatgagattgacagcagtgttttagtcacatatacccacagctcagaggaggacactgcatgccacacagggtcagatgggcaccgcactctgtagcggagtgagggctgtgggctgaggaagcaggcaggcttgatagtaacaagagcacacaatgaccaatggttcccgagggggaatgcagttggcttgtttgaataaattcatgggctggcagacaggtgaagtgaagcttcttaggctgaggtgcaactgtttggctgataaaagaactagccaggtggggagcctttcctgttgggtggcagggtag

SEQ ID NO: 40604 - DNA, 973 bp, Artificial sequence
  DNA replication origin
ccccttttctattccacaaaaccgccattgtcatcatggcccgttctcaatgagctgttgggtacacctcccagacggggtggtggccaggcagaggggctcctcacttcccagaaggggcggccaggcagaggcgcccccccacctccctcccggacggggtggctggccgggcagggggctgaccccccacctccctcccggacggggcggctggctgggcgggggctggccccccacctccctcccggacggggcggctgctgggcggagatgctcctcacttcccagaaggggtggctgccgggcggaggggctcctcacttctcagacggggtggccgggcagagacgctcctcacctcccagacggggtcgcggccgggcagaggcgctcctcacatctcagacggggcggtggggcagaggcgctctgcacatctcagacgatgggctgccgggcagagacactcctcacttcttagatgggatggcggccgggaagaggcgctcctaacttcccagactgggcagccgggcagaggggctcctcacatcccagacgatgggcggccaggcagagacgctcctcacttcccagacggggtggcggccgggcagaggctgtactctcggcactttgggaggccaaggcaggcggctgggaggtggaggttgtagctagacgagatcacgccactgcactccagcctgggcaacattgagcactgagtgaacgagactccgtctgcaatcccggcacctcgggaggccgaggctggcggatcactcgaggttaggagctggagaccagcccggccaacactagctgtgggattttcatagatggtctttactgtgttgaggtagtttcattctattcatagttcattgggtgtttttaccatgaaagggcgtggagttttgtgaaatgattttctgtagccagggtcttactgcattacatttggaag

SEQ ID NO: 40605 - DNA, 1329 bp, Artificial sequence
  DNA replication origin
cccgcatgcccacccctcccccaccctgtctcccttcccccatgcccacccctcccccaccctgtctccctttccccatgcccacccctcccccaccctgtcttccttcccccatgcccacccctcccccaccctgtcttccttcccccattcctaaccctcctcccgcccccccttccccacccccatctcccctccttccccacccccatctcctccccacccccagcctcctctgctctccaacttcctctccccttttcccctcctcctgctcccttctcctctgctcctccccccactgcccctcccccactgcccctcctcctcccagtctttgaaaacaagcccctctcgactctctgggcgacctcactggatctcgtgagattttgccctggaaggactgagaaacggggattggtcagaccaggctgcccagccccccggtccccaccgccgccccccccgccccacgcagcggctagggcgcttagctgagccattgtctcgttctttccttccagcaacttcgcggtgtggtgaactctctgaggaaaaacgtaagttcgagccctgattcctccgcttccccgcagggtgaccttgggcttgtgcccccagcaccacccctgtcccgggtccctgttttctctctggaaatgggttgaagaccaaagaaaataatgtgcgccacttgggtcaccccgggccgcctgccccggaaaattggccccagttgaggagttgtggctgtaaggatgccttgaaccgaggcggcggtgctcgtggttggagctctccagggtgggtgcgcatttgtaatgcggtggatgctctgggactcggcccctctgaaggtgctgggggttggggacggcccaggcagtggcgtaggcgtcctaggaaggcgggagcagaggcagaaatgtcgctgcaagaccgtagtcagggtccttgaccacaggggtcacttgtgaccaaccacatggtctgttgttcctcctgccccctggttcagcccaggaaacactggtgctcaggtttggagccagagatttgcactgaaagggcgggattgagtcgccagttgtcagtttcctcagcagtatttgcggaggttttcacaggaggccgttgcttcgtaaatattatacatgtattcttctttttggagcattttgattattactctcagacgtgcgtggcaacaagtgactgagacctagaaatccaagcgttggaggtcctgaggccagcctaagtcgcttcaaaatggaacgaaggcgtttgtgggtaagaaggtcccctgagctgtctgaggtgctc

SEQ ID NO: 40606 - DNA, 1915 bp, Artificial sequence
  DNA replication origin
cagtctgaggccagcctggggctttcagacctgggcgggatctgcccaggccacctgtccttctgctttgggccactgtctcttggcagatggcctgacacctgggggtggcccaaggatgcctcagaaaatcttgattcccactctacagatggcccgattagccagaggtttccaggccatctgtccgcctccaggagatggactgggacctttagacatcggtggagaacaggatgctctgtctcttgctgtccagggcagggatggcctccagccgcaagaagtacagcagcacctcgacctgccctcgcagagtggggaagaggagagtggctcagaggggggctcacagctgctggtggggaggtctttggggcccaagcccccaagtccacctcaggtgctagaaacccctgctggtgtcatgaaccccttacagtgagacgggggtggggtggggtcctgacaaggcatgacttgttgggtggggggtggttatttattttagagatgcacagggccttgctctgtcccccaggctggagtacagtggctccatcatggatcactgcagcctctaactcctgggctcaagcaatcctcctgtgtcagcctcccagatacctaggattacagatgtgtgccacaatgcctgactaatttttctttctattttttctggagatggggtttgctgcattgcccagactgatctcaaacacctgggttcggttgtcctgccttggcctcccaaagtgctgggattacaggcatgagccaccacacctgaacacttggggtggttttaagcccccagcaagatgcaccagcaggaccaggaggtggcctgggcaccccctatcactcccatccatgcaaacctaggcaagtccctctctctgaatctcagccaccaccacatacaatgcaagtgggaagatgggcaggactgggggtggggcaggcagaggccacctctgtcaggctggggttgcatgggctggaggctgtcttcccatacctgggacatgacctccaaggacctgctgtcagtcatggtgatgggctggctggggttggcagggagcttgctctccttctcggagggccagagcagcgtggggccaaacaccgtgccaaggttgtgcagggacatcttattgactgcctccttctctgccaccctgtagaggaccgaagcagagggtgctgtttcaacgccaccaccaggagagaggcagaggggctgtgccatgctagagtcctcagggagggagtgacctcgaccctggctgtgctgcaagctgactccagccttggtacttctgggtctcagtggcccgggacaaggggccagctctgggctgatggggaggtcttcatgatgtgcttgggagggaagtgggggcggtccaaatgcactgctggccacggccaaagctctgagctctttgttaaggccacagtgcagagggaggcgggtggcaaagaggagaggcaggggcaggggtggcagtggtgctagtccttagaagcagtgagttactgcagacaggggtcgggggaaaaggtccttggtgctgggggtctggtgggagcagaggggcaccccaacggcctggagacctggagtcctgggcagccacaagagagctgggctacctttccaggtggtctagaaggaaaaggaaggtgagcaggttggcctccggcagggacgacagcaggttgagcatgcagctcttctttgcaactgggtctgaaagagctgcaggaggcagtgggtcactcccctgggttacgacaagccggagacctctcccgaggtggtcacatggagcgcccgggacacgagtccttgcgcagtttaggcttgtcatcatcgtcacacccacagcgctggccgccagtg

SEQ ID NO: 40607 - DNA, 945 bp, Artificial sequence
  DNA replication origin
ttgttgtccctgaagtcgtttttcacaactggaaacatcttctgtctggaccgagcaataagaccgctgaagccactctgacccccgcttaaggggtccctaggaaccttgaagaccccagctcctctgatgatcctgggttgcagcctccaccccagctctcctccaggaaataggagaggttcctgctccctctgtagatgtcatggactggcccacctgacagggggtcttcccactactgaggaggaaacagaggcagagagagagagggagagggagggggagggggagggggggagagagagagagagagagagagagagaaagggagagagagggtgagagagggtgttccagggcccttaccgcagccctggaaaatgcctgtcgctgcttccagtgggcagactaggaagctgaggcccagggagtttagaagcaaccctagtgggagtgaatgggccaggggaactaggattccagactcccagcctggatgttggagttggccaaggagatgcagccaagtgggcttgaaggccagcttgaaggccatatgcccaacagcctaggtcactgtgggctggtttcccacccgtcatctctgagggtgattgggatctctacaaatatgagacacagggactggcctggttctgtagggaaggttctgcagctggtgggacggaagcttctgcccaagtctctgggcctgggctgctctgcagaggctgggcatggagcagggggaggagccagggtgagcacagggagggccttggggcagggaggagacaggagatgaggaagcaatgatggttctggggagtggaggggaagccccagtagagggaggaggagcctggagatgctgctgggaaggactggaccagacttccatccctctaacctctgcccagcccaagcagcaggtagccctgg

SEQ ID NO: 40608 - DNA, 1351 bp, Artificial sequence
  DNA replication origin
tgggtgggtgaggggcttcaagatgacgagaatgatgtgagttgccaagcccatcctgaggtcaacagaaggaggacagtgaggggaccattggattgagccacgtgcaggccactggggctgtgatggggtggtggtgagactgctgggcttgaggcaggaagggaggggaccgtggaggccaggagcccttgattaccacttgtaaaaggcaggagagagggaggggcagccagaggaaggcagcattcacattttattacttcttcctggcaggaccacatttgtgctcctaaggtgaccatcaggagggtctctggcccttcatactgagatgttgaggcagagagactgtggtccaggttctctccaggaagagcccaccattactgctgcagtgggccaggcaggactaggtctgggtcccaagcccaggctgggcacatatgggtgcttgggaaaccatagttgattggtggccagtggcctagtacctggatggggccggggtcaccatgggctggtcactgctccagccccagcatcaaccccagctcccagagtcagtggggaaggggactggagtggggtccgattacagtgaccacagggaaatgggggccacagggaaatgggtgcggggagcaggggagattcgggaggtgggtggaagaggaccacgtgctcccatcctgacagcccagagcctgcgtgtgcctggggcggctgctctctcaaagggcatgcgtctgtcttggggactgagggtctctgaagtcaggtcgcctcttgctcgaaagccccctgccaccttgctcttgactttagcacctcctcacagggcagcacgtgttatgttatccgggaggaaatggaaaccctgggaggttctctggtgggggaagggaggagcggaggtagactaagagggggtcagcagggggagaagggggaaccagcccagagttctccagggacgggtgcgtgttgtcctagcctgtgccctgggagtgacaccaggtgagttgagatttcagtacccagcatttttgtgactgaagtaaagaaaattctgatttggcccttgcctgcttgtacaagttaactgcttgctttttgcccagcatcccttgttcacacaatgtgatcataagctgcagatgtcctgtttctttgtcaagaaggaggagataacttcagagtcacaaaagtattttgcaggagtgaatgcctttagggacgtagagaccagccgctgtcgcccgcaagtctagttgcttaagatgttacctgagactgaataaacacagacttttcccctgaaatgccacctccctcactccttagccac

SEQ ID NO: 40609 - DNA, 762 bp, Artificial sequence
  DNA replication origin
agacgccagtgcagggtttccctggaagtggccctgggccaggtggcaggtgaggtagcatcttcagcagagccgggagcagttccactgtcgagcagtggccatcgaggggctcagtgatacccagcccagcacctggctgaacatcggaggacgtgaggggtgcagcccctgcttccaggctcccgtggtgtcccagatcggtgctgggcagggcggcaccaggagagcgtggtcagcagccctgggcagccatcaagcctgaggcaccactgggctgagggctggggccggggaaggagcaaggaacccttttacattccggtagttcatgaatcacacagtgaaagaaagagtcaccaagggtgctagctgccggtggccctgatggggcagcagcagaacaaagtgggaggggaccatagaagagaggaccttggcggggggtgggggtgggggtgggtgggtgaggggcttcaagatgacgagaatgatgtgagttgccaagcccatcctgaggtcaacagaaggaggacagtgaggggaccattggattgagccacgtgcaggccactggggctgtgatggggtggtggtgagactgctgggcttgaggcaggaagggaggggaccgtggaggccaggagcccttgattaccacttgtaaaaggcaggagagagggaggggcagccagaggaaggcagcattcacattttattacttcttcctggcaggaccacatttgtgctcctaaggtgacc

SEQ ID NO: 40610 - DNA, 959 bp, Artificial sequence
  DNA replication origin
gctaactctttgatgatgctggaaaaaccagcttacttttggagtaacaaaatttcatgtctccctaacacttaaacaaaggtggccttcagatgaattaacgacttagtgtgacaaggaaaactacaaaagaaaggaatgttagagaatatttttgagacagcgagggaagtaatcatatcagtttatcacgttacatataaggcctttttttcctgagacaagctctcactctgtcacccaggctggagtacagtggtgtaatcacagctcactgcagcctcaaactccccggctagcaatcctcccacctcagcctcccaagtacctgatgtgtctggaattggtgggttcttggtctcactgacttcaagaatgaagccgtggaccctcgcagcgagtgttacagttcttaaaagtggcgtgtccgcaggttgttccttctgatgttcagatgtgtttggagtttcttccttctggtgggttcgtggtctcgctggctcaggagtgaagctgcagaccttggcggtgagcgttacagctcttaaggtggcacgtctgcagttgttgttcctccggctgggttcgtggtctcgctggctgcagaccttcgcggtgagtgtcatagctcataaaggcagtgtggacccaaagagtgagcagtaacgagatttattgcaaagagctaaagagcaaagctcccacagcgtggaaggggactgcagcaggttgccactgctggctggggcagcctgcttttattcacttatctggccccacccacttcctgctgattagtccattttacagagagccgattggtctgttttacagagcgctgattggtccgttttgacaggttgctgactggtgcgtttacaacccctgagctagacacaaaaagttctccacatccccactagactagctagatacagagtgtccattggtgtatttac

SEQ ID NO: 40611 - DNA, 1249 bp, Artificial sequence
  DNA replication origin
tgccgagctgctccgggcagggcggggcggggcggggcggcgagcacggggccgcggcgccctcgttccgtacgacgcgggcagcggcgcccacgcggggacgtgaccggaccgcgggcggcgcacacgctccggccggcctggttccctccgcccgccctcccgcgccgcccgccgcccgccgcccgccgccagtccgcgggtccgcccgccccgcgccgcgccgccgccggcagggggcggagccgcgagcgcagcccgttgccaggccaaccgcgggcgggggggtgccgcgcgcccgccgggcaccacgcgccgggcacctccgccccgccacgagcgccggccctctgtccattgggcacaggcagctgacggacgggccagtagcccaatggggacggacaggggcggggtcgcagctccgcgcgcgccgcagtcccgcaagagctccccgcgccggcgttccaccgactccgctgcgctgaggcctggtagccgagccccaggggccacctctggcagcccgggaaaccaagcctgagcccagccatggtcctggccctctttactgcagccagtcccggctcgccttctctccactcgggttcaaacccagttcggcctcttgtgagctctacgtccttgggcaaccgactgacctctctcagcctttctgtttgcaaagtggggctagtggcacctgctttcctggattgtctcaccaatccttcagaacgtgtgaaaggcctatgcaaaccctaacgatttacaccggtgaggtttgtgcagcgatgggagggagcattagtcatctctgccgccgccccccgccgccaccgcccagtgtctaggggctctttggcgtccctggcaatcctggcacacggaagggtggccttgggagggaaggaagggagaaggaccgaggagctggcccccagcccagacaagcgtgagagagccagttcagttaaggccactgattggcgcttttgggaagctggtggaaagcatcagaccctcagcaaaacgcagctgaacccaggctgcaaaattctgttttcaatttcaaagcctatctgtggacctcagggccaggagtccctcagttccatgcttaaaagactctcaagccagagggccaagacatgaatgctcctgtctctcttctccatctttgtaaatctgaagctttgtgtatcctagagcatccctgacaaagtgcaaatgccttcccagctaacgc

SEQ ID NO: 40612 - DNA, 1932 bp, Artificial sequence
  DNA replication origin
cgagggcgccgcggccccgtgctcgccgccccgccccgccccgccctgcccggagcagctcggcagatgctctgtgctgcggcccggaggtgagtgagccgacccgcggccggccgcgcgccgctgagcctcaggggtcgggggcacggccggggcatccaccttgcccccacttgggactcttcccaggcctttgtgccccggatccgccaggacgcagcgtcagggatgcccctcaggggtgggggacaccaagggcggggacgcctgcgaggtgggcagggggcggcctctggtcgggcaggtgctgggggagggatgcgccgccaagccgatgaccccgcgggagggggcggttgaggacccgggagggtggacagagggcgccggggatgccgcgcggggccgccgggcgcccccaagcagcggctgatgcggagcccgggcgggccaggcgagctgcgggagcggcgctgaggcgggtctccctagggggaggatcagggaggggcggccggagccgatgcagggccttgcctgaaaccgaggagagggccccagaggcctgggcccgaggacctgggcccgcagacggacagctagcagttctcggtcactgctcttgcagcgagcaggttcctcacaggcatttagaggaagagatgagtatcgacctgctgcgattgtaatacgttcccggctcaatattttttcccttaaaaggcggtgggggtgtttgggggaggggagtgagggcctcagggctggcgctccgtatcctgcgggcgatccgagggggctctgcctttagggcggtgctgagccttcctgggtgatgatggcaggattcggcctaggccgagaatgggggctcctgttaactgagacaagaggatgatgccaagcgagaccagcgttccgcgtagtccgtgttggggtggagggacccgcctggtagagaggtctgtcttgcttggggagacagctgagcccctgaccggctcctttctgcccaagtgatttccctgccctggggattgagctctctggagaaggctccttggccaaattcaattaagcaaatatttattgagtggtcactcccccagagcttgacgctggggtgcaccgggtgggagtggactgggcctgccctcccaggactgattgaccaccgcataggggaaaacgtctctactcgaccaaccccgcttgagtgcaggtgcaggggcctcgggagggacctcagagtggtgtcctgggctggggggtcaggtgagctcgtgggcaacatgacatttgaactggagcttgaaggacatgggcacagctaagctgggcattgtgggcagagaggagagaatagaccgaggcacttgggcagttaggtctgatgggagcacttagcatgcctggggagtaggaggaggtatggcgggaaaggccggtgggggctgcacggggctgagggagctgggaagtggaatgaccccactgctggttaactgtggctatggtggagaccacggcttcctcatctgtaaaagcgaagcagttccatgaccccatgagctggggtgggcctggagaagagctagctttaaagactggggaaggctccttgcagtctgagactgtgcttccaggcacttctccctcgggcacagccagggcactgggtaaccacccaggcaacccccttgttaggattgagttgcctgtttcggggatgatgcttagctagtgactctgtgcctctgggatgtggatgtttgagagcagtaatcgtggcagcctgggagcatccatctacggggtgcagtgggggtgtggatggcctggcggtgcttggataaaatatgcgccttgagcaagcctcattctctaggaatgaggagatgctggcatctggtttaaaagtcttcctgtgtg

SEQ ID NO: 40613 - DNA, 1034 bp, Artificial sequence
  DNA replication origin
agcatccactcacagtgctcacaccagacgggcaggggttgacagtaacacatgttactaagtgctgcactgtggagaacactaaagcagaaggtgggggacacgagatgggggtgggggactgacacagtgccatgcagaagtgctgggtgagtggtgtggctgagcaggggagagacagcaggtgcaaaggcgctgagcagacactccctggcccctggaggccccaccagagtggctggaacctggtgcaggagtgtgggtggggtgtcagggccaggtcctgcaggactcagtgggccccaatgaggcaggaagaccttggcagggttggagcagagaagagactggagctgccctcccaggaggagctaatctacactttgaaaagatctctctgctgaggtgggaaaataggctagggtggggtaaggctgggggccatgaggggctactgcaacatcccaggcagagaggctgctgacccaggggtgggagctctggaggccctgagaaatgcaggtgggagatttgtttttttaaagctgcagcttttaaaggacagctgcagttttggtctgaaccagtagaaagatggagctggtattggctgagaagcaagatacagaaaaacccattctggagaggtggggaattaggaggtgggtctgagacctggagagccattgatgggcacatgtggccagagggagagcaaggctggaggtggcaacctggagcccctggcactgaggtgtgtggcaggccggggaccacgtgaggtcacttagggatcaagggtaggtaggatcagaagaggctgagctgggctcctgggcctccactgtggggaggatgagttgagaagcatcgagaaagagagattgaggattgacgggcaagtgaggtggaagcacagtcacagtggcgcctcgggaggctggagaagagcgggtcccagagagcaggtcccctgtgtcaagcaggcagggcatgcccagggactgagcaatgcaggcacagctggccacatg

SEQ ID NO: 40614 - DNA, 1297 bp, Artificial sequence
  DNA replication origin
cggctccacctcagctacccccactggccctttgctcttctcagctctctggatccctcagtcctgcagccctgcgttctctcccagcctcctttgctcttgactggcctgtactctcccttgggcaagatttgttatcctccatctccagggctttgctggggctgtggaagtcctgagagaagggggcactatctcgacagagttaggaactgacatccacaggatctgaaggctcagtccaggcagggcatggaggattgaggaacgaactcaggcaccaggaaggagcttggtgaatgccagcaggcaagtggagaggaggggggcggggctagccatgtaggggagcacggaagggtctcacaggagagtagaggtgagggcccgagcccaggcaggcctgcagcattctccaggtgccggggcagagggaagctacccagctggggtgggagagggtaaggggtgggagagtggccctgggccactcagatggaaggcagagggaaggggtaaggccagtggaggccatcgtgagtcagactcccagggcctagcaaggaagacaaacagaagtgggccgggtacggtggctcacacctgtaatcccagcactttgggaggctgaagcgggtggagcacttgaggtcaggagttcgagatcagcatggccaacatagtaaaaccccatctctactaaaaatacaaaaataaattagctgggtgtgggggcacacagctgttgtcctacttgggaggctgaggcaggtgattcgcttgaagtggaggttgcagtgagctgagattgcgccactgcactccagcctgggtgacagagcaagactctgtctcaaaaaaaaaaaaaaaaaaaaaagacagaagtggaaggaaagtgaggctggggagagggagtgaaggctgcagtgtgaggaggaagacgagtgcctcagacctgaggaaggatgtgggtgctgtgtactccatctcagccctccttgcccaagcctggcatgcagggactggatttgaccccattttacaggtgggaacagaggctcagagctcagcagcaacctgcgggaggccaccctgctggcctggtgagtgggatcacaggaggcctaggtcagggagggactggagccagggcctcaagaggagtggggtgggcattggggaggtcatgggcaggtgggcaggtcaggctgtgagcaccttccccagagccaatgaccaaaatgagacaactttgggactgacagagcatgtgggggctctgggagccaggaagcta

SEQ ID NO: 40615 - DNA, 1290 bp, Artificial sequence
  DNA replication origin
ccatggcccgcgcggcggcggcggcggcgaacaatgcccgcccactccctggtggcaggtgaggcggagcggggcgctcggcgcgcggggcggggcgcgccggggggaagggcgcgggctgcgcgcgccgctattgtgtgcggggctcctccgcacggcgaggcgcgggcgctgctctccgctccgccaggccgccgccagactctggccacggcccgcgcgctcctcgcctctcgcttccgcaccgccccacagccccgccgccgccgtgccgccgccgccgccgccgcctcctcggacgctaagctcagccagccggctctcgccgcactcccgcccggcccgcactctgcgccgcaggaaggggagggccggggggaggtggccgcggcgcggatgacggagccaggcgggcctcttaaaggggccgcgccgtgggcacagggcgggggggccccctggaggcggctcccccatcgagccgccaccctccccccgtccctgtgccttttgggaaactgaggccctaacaacagcgaattggactgtgcaactcgcagcccaggggtcccccgtaaaaaagacaccggactccctggtccataaagacctttccaatacagaggtctgggccagttctgcagtcctggaacaggaacacttggctcccctccggccaggaggacttctccggccagtccagccgcgtgtccccaagccccaccacctacctcatgttccgggacaagagctgctctctctggcagaactcgcagcagtcctccgacagaagcaacctcccccctctgcccctaccacgccgcagtgccataagcgtcaccggcactgcccagtcgtcgtgtcagaggccaccatcgtgggcatctgcaagaccaggcagatctggcccaacgatgcggagggcaccttccatggagacgcaggtaagttcctcacacctcacagcctggcctctcaccagcctcagggctgggcacactagggaccacccagcagggcccaactcacagagaggccaggaccaggcaggtcaccccgcaaggcagggagggccaggctgagtaaccaatgccagcacccttgtttcagcgggcctctcacgttgtggatctgctgtgggtggctgccacacgggtttgtcacagcaggaccacatgatggatgataaatagggatttctccctcaggtcactcaatacccacacctgccttcctgtgtgctgagccatgtgtttgtcccctggcctctcttgagctccagaggtcaat

SEQ ID NO: 40616 - DNA, 1159 bp, Artificial sequence
  DNA replication origin
gcggaggcgtggaaggcgcagttcccggactcagagcccccgcgcatggagctgcgctcagtgggcgacatcgagcaggagctggagcgctgcaaggcctccattcggcgcctggagcaggaggtgaaccaggagcgcttccgcatgatctacctgcagacgttgctggccaaggaaaagaagagctatgaccggcagcgatggggcttccggcgcgcggcgcaggcccccgacggcgcctccgagccccgagcgtccgcgtcgcgcccgcagccagcgcccgccgacggagccgacccgccgcccgccgaggagcccgaggcccggcccgacggcgagggttctccgggtaaggccaggcccgggaccgcccgcaggcccggggcagccgcgtcgggggaacgggacgaccggggaccccccgccagcgtggcggcgctcaggtccaacttcgagcggatccgcaagggccatggccagcccggggcggacgccgagaagcccttctacgtgaacgtcgagtttcaccacgagcgcggcctggtgaaggtcaacgacaaagaggtgtcggaccgcatcagctccctgggcagccaggccatgcagatggagcgcaaaaagtcccagcacggcgcgggctcgagcgtgggggatgcatccaggcccccttaccggggacgctcctcggagagcagctgcggcgtcgacggcgactacgaggacgccgagttgaacccccgcttcctgaaggacaacctgatcgacgccaatggcggtagcaggcccccttggccgcccctggagtaccagccctaccagagcatctacgtcgggggcatgatggaaggggagggcaagggcccgctcctgcgcagccagagcacctctgagcaggagaagcgccttacctggccccgcaggtcctactccccccggagttttgaggattgcggaggcggctataccccggactgcagctccaatgagaacctcacctccagcgaggaggacttctcctctggccagtccagccgcgtgtccccaagccccaccacctaccgcatgttccgggacaaaagccgctctccctcgcagaactcgcaacagtccttcgacagcagcagtccccccacgccgcagtgccataagcggcaccggc

SEQ ID NO: 40617 - DNA, 1044 bp, Artificial sequence
  DNA replication origin
cgagttgaacccccgcttcctgaaggacaacctgatcgacgccaatggcggtagcaggcccccttggccgcccctggagtaccagccctaccagagcatctacgtcgggggcatgatggaaggggagggcaagggcccgctcctgcgcagccagagcacctctgagcaggagaagcgccttacctggccccgcaggtcctactccccccggagttttgaggattgcggaggcggctataccccggactgcagctccaatgagaacctcacctccagcgaggaggacttctcctctggccagtccagccgcgtgtccccaagccccaccacctaccgcatgttccgggacaaaagccgctctccctcgcagaactcgcaacagtccttcgacagcagcagtccccccacgccgcagtgccataagcggcaccggcactgcccggttgtcgtgtccgaggccaccatcgtgggcgtccgcaagaccgggcagatctggcccaacgatggcgagggcgccttccatggagacgcaggtgagttcctcacgccacgtgcgtgggcacacctgcacgggggaggaaaaccatagacgagtaggggatacaaaacagaagttgggagggaggagtggatagttttgagtgtatcaggtgcacttgtggttcacgcggatcctgcacccgaacaaactccatcccctcctccttcctgaatgcatactgttagtgtttggaatggaattgggttgaggatggtcttgtgagggatgggaggtggtttgttcctttggttctagagcaatgtgtttgtgaagtacagcttgtgagttgaaggaagatgcttcaggcagtaacctccttgctatgtgctctctccatgccgggcagtgaggatggcataaaagccggagtcatctctagcgcccacatcggatgctgttagcagggactgatttatgtcttgggcattccccgccaccccactgatcctgttctggaggggttatatgacacgtttgtgaaacctgagatatgctagctgctc

SEQ ID NO: 40618 - DNA, 1811 bp, Artificial sequence
  DNA replication origin
cttataatacagtcatgcaccacataacgacattttggttattgatggtggtcccataagattataatactgtgtttttactgtaccttttctacatttggtatgtttagaaacagataccactgtgtcacaattgcttacggtattcagtacggtaacatgctgcacaggtttgtagcctaggagcaataggctgtgccacgtagcctaggtgtgtagtaggctctgtcgtgtaggtttgtgtaggtacactctatgatgtttgcatgaagatgacattgcctaatgatgcatttctcaacatatccccttttaagcaaggtatggctttatctaataaaatataaatgctttgtaaatagttgttacagtgtattgttattacatttatattattcttattgttggttatttctttccaaatagtttcattctgaggttgcttgaatctgcagatgtggaacttgaggctgtggagggccaactgtatgctcagaaagtagcaggctctggttggagagttggtataaaatgtggacaacagggaaggtgagggataggagagttggggtcatcctatgtgggtctccgaagccaggctgagggtgttgtgctttctttgaggatgatagggagccactgaaggttgttaagctggagaggggatgcctttggagctttgccttgggaaggtgagtttggcaaaagtgtgtgtgatggtccagtgggagtcaggtacctggagctgttgtcttgaggggcggtggggaggaatggggagggatggagaggacaaggaatatgagctgattctggggagggggtgacagaaagggaggctgtatgagcctggggatggtgagcgctgtgctggcaggtttcagggcctttcggagagaggaccaggccaggaatgaagaggaaggacagaagcgtgggttgcggagggtgtgtggagtggagggccggagcaggcccttgggccttgcgtcctgggggaggtcacgtgagagaaagaagtgggggagtttatgttgcggaaaggctaaaaggaagtgactgttaggaggttatgggataaaggacagaagccaggctccaagtgagtataggagagaccagagcactaaattggaccacagtgtccagcattctggcagcagggaggaggtgggtggggattcaggattagggtccgagtgctccccgagtgtccaccgtcggcctgctctgttccggggcagggccacatctttgtccgtgtgccgaggaggggactggtgggctggagtcccagggggagattattccaagtaggggctccagaaaggtgagtgatgtgtttgggtctatgggaaggttggtgacccccaaagagaggtggctgggttactgctgaacagctatcagggtgatatggctttgcaggggtccagtccatgggcctgacatgttgtagctatgctttgaaggcattttcctggtgggaggccaccgcaggtaaggggagtgaaagggtggctgtggcggctgttccctgtggctggtggccatggataagtgaagaggaacgtgatgctgggcaccatgctggtggtgcctggggcagagcctggccttgtggggctgtggagcagggtgaggatctgggatctaggactgctatgcaccgggccgaatcgtgatacccaagggaggcatcttgtcgtggagcagttgcatgggcccgcccttgttccctggagcagctggtgaggtactgttagaatttggccctaacaggactgggcacagtaggtcacacctgtaat

SEQ ID NO: 40619 - DNA, 906 bp, Artificial sequence
  DNA replication origin
gctctggcttctccaagataagtcattcacccctcctcccctagaaccaaacatgcagctgtcactacagcagggtcaaaatcccatggacggtaggtgaaacttcagtgtaaccttcctcctttcagaagtacattcgacagagggaggtagatcctgttggtccccatgcaaggggtgaagtggttcaagcactatgggagtgggggcacagcaggacccccgcatgctctgctagacatggagctctagagggaaccgtgcccacacagcctcaaagggcaggtggcagaacagcccctcccctctgtgcagccacacatgacaccagccagccccaaggggccgtgtccttcgagtcagaagcaatggtaacaggatgactcaatgctccaggaactgcagacttggaggcgagaaggcggtgcacacacaagtaccaaagggagcccaggaaggaggcatgaaggagcggctgagagcggccggaggagggaaacaggttacatgcaggtcggggacagagaactacatggggtgggataatagtggtgactgcagaaagtagcctcaaagctggacacagaggacagagctgggcaagtggagacattgtgggggacattctaggcaaggagagggggtgcaggaagcacacagaggggtggcgggggactctcagagctagcagagaggagggagctgtgctcccgcaccgccagtgcccacgagcgtggagggtcctgcacacctgcctgcctgagatgcgtgaccttgaccttcagcccatgggcaactcagaggtttgtgagaagggaacagcggtcaggtccctgtgaggatgaatctggccatgcaatagtggacctgggcaagaaccagggacagaggccaagggtgggacag

SEQ ID NO: 40620 - DNA, 1294 bp, Artificial sequence
  DNA replication origin
actgccatacaatgcacctgacggatggcagcccctctcacctgtgctacctcacttgtgccctcttccagcccatgaagcctttgaaagccgctgccaccacctctcagccggtgctgacgagtcagcagatcgagaccatcttcttcaaagtgcctgagctctacgagatccacaaggagttctatgatgggctcttcccccgcgtgcagcagtggagccaccagcagcgggtgggcgacctcttccagaagctggtgagtaacccagggccggtgctgggactacaggcgtgtaccaccacgtccagctaattttttgcatttttagtagagacagggttttgctatgttggccaggctggtctcaaactcctaacctcaagtgatccacctgcctcagcctcccaaagtactgagattacaggcgtgagccgccatgcccagcctttttttttttttttctaatttatatttatttagatagttatttttaaaaagagatggggacttactacgttgtccaggctggagtgcagtggctattcacaggcgcaattccactgctcatcagcacgggagttttgacctccttcctttccaaccttggctgtttcactccttcttaggcaaactgatggttcccgactcctgggaggtcaccatattgatgccaaacttagtgtgtagtgcactacagcccagaactcctgactgaagccatcctccggcctcagccttccgcgtagctggggctataggtgcacgccaccacaccctgtgtgtggctgggactacaggtgcacgccatcacaccctgtgtgcgccatcacaccctgtgtgcaccatcacaccctgtgtgcacacactttccctaaagcaggcttcctccgctgggaaacaagtcctctaggggcaggtgtggccagaggccaggcccccctctaagtgtgaagagcatgtgattccttaaaagcccttcccccagcacttctggactaccgagacacacagctctggcctcgggcctccccttggctggtgctgggggctgagttttctgctctgaggtgtggctttcctgtagggggacccctccctctgccaccctgtgctgcagacccccagactccaggccagagctaaggcttgaggaacacagaaggcacttaatttgttccagttcttgctccctggggctctttcccccatggccagagagcaggaggctgtattttgatacatgctgccccctccatctttgaagcccccccacccccgtttctccgtgtgtg

SEQ ID NO: 40621 - DNA, 938 bp, Artificial sequence
  DNA replication origin
ccagaggccaggcccccctctaagtgtgaagagcatgtgattccttaaaagcccttcccccagcacttctggactaccgagacacacagctctggcctcgggcctccccttggctggtgctgggggctgagttttctgctctgaggtgtggctttcctgtagggggacccctccctctgccaccctgtgctgcagacccccagactccaggccagagctaaggcttgaggaacacagaaggcacttaatttgttccagttcttgctccctggggctctttcccccatggccagagagcaggaggctgtattttgatacatgctgccccctccatctttgaagcccccccacccccgtttctccgtgtgtgtgtcagcagttttaaacctagtggagggtggtggctcgggctgggctccgcgtcgggctgccccgcagctgctcttgggcagccagggccgctgggtgtggggccgccgggaatggcgggcccgggtgagggcgggcccgggtgagggcgggggcggagaggcgaagaagctgcaggaagggagggtgacgagggggaagcgaaggaaggggaagaggaagggaaaagcgagcgagaggggcaaggcggaagaggaagcagggcggaagggaagcccgggccgcagacggcgaaggaggcagcgggccgggggctgaggcgggagcgaggacacgcccaagagaggaagcagagggaggcggaagcgtggaggaaggggcgagaggcatcatcaaaggagatgaggggagcgtaggggccgggaaagaggcacaaggaagaaagtatgggaaggaggaatggagggtcagggctaggcggcgggagggcgccaggccgggaagagtacaaggacaaggaggtcaggtttgggcctacatcccggggacaggggcggccatggcggcgg

SEQ ID NO: 40622 - DNA, 1458 bp, Artificial sequence
  DNA replication origin
gcgagaggggcaaggcggaagaggaagcagggcggaagggaagcccgggccgcagacggcgaaggaggcagcgggccgggggctgaggcgggagcgaggacacgcccaagagaggaagcagagggaggcggaagcgtggaggaaggggcgagaggcatcatcaaaggagatgaggggagcgtaggggccgggaaagaggcacaaggaagaaagtatgggaaggaggaatggagggtcagggctaggcggcgggagggcgccaggccgggaagagtacaaggacaaggaggtcaggtttgggcctacatcccggggacaggggcggccatggcggcggcagccagggaggaggaggaggaggcggctcgggagtcagccgcctgcccggctgcggggccagcgctctggcgcctgccggaagtgctgctgctgcacatgtgctcctacctcgacatgcgggccctcggccgcctggcccaggtgtaccgctggctgtggcacttcaccaactgcgacctgctccggcgccagatagcctgggcctcgctcaactccggcttcacgcggctcggcaccaacctgatgaccagtgtcccagtgaaggtgtctcagaactggatagtggggtgctgccgagaggggattctgctgaagtggagatgcagtcagatgccctggatgcagctagaggatgatgctttgtacatatcccaggctaatttcatcctggcctaccagttccgtccagatggtgccagcttgaaccgtcagcctctgggagtctgctgggcatgatgaggacgtttgccactttgtgctggccacctcgcatattgtcagtgcaggaggagatgggaagattggccttggtaagattcacagcaccttcgctgccaagtactgggctcatgaacaggaggtgaactgtgtggattgcaaagggggcatcatatcattgtgagtggctccagggacaggacggccaaggtgtggcctttggcctcaggccagctggggtagtgtttatacaccatccagactgaagaccaaatctggtctgttgctatcaggccattactcagctcttttgtgacagggacggcttgttgtgggcacttctcacccctgaaaatctgggacctcaacagtgggcagctgatgacacacttggacagagactttcccccaagggctggggtgctggatgtcatatatgagtcccctttcgcactgctctcctgtggctatgacacctatgttcgctactgggactgccgcaccagtgtccggaaatgtgtcatggagtgggaggagccccacaacagcaccctgtactgcctgcagacagatggcaaccacttgcttgccacaggttcctccttctatagcgttgtacggctgtgggaccggcaccaaagggcctgcccgcacaccttcccgctgacgtcgacccgcctc

SEQ ID NO: 40623 - DNA, 663 bp, Artificial sequence
  DNA replication origin
gcctgagggcgcgggaggtcaggccaggccagaggcatgcagagccccagctcagggtgaatcccaaacctccaaggagggaaccgggtctgccttccccaccgacactgccaggcaggacccgaaggaaggagcgccctgacagagggaagtgcccagagaaggaaggggctgccccagacaggagggagcgcccctgagctgagagcgggcaaccccggccatatgaacagggcagtggggccagcacagtgtgaatgcccaagtgggcccagccaaaggcccctttagcatcagcacctgctggggcagggaaggcccagggggcggggagtagatgaggagaaatgggggaggccaagaaaatggggtggtggcagggtcccagaaaggactagggggcaggccgggggtgcggtgtatgggcagcagactagggggagatggcaggggtgtgtgtaggggcaggtgtggaatctggaaagggcctggggaagggggattcacaggggatcacagggcagtggggaaatgagtgcccaggtgatgggggcaggataggctggcaggggaacaagagggctgggggcctatcgggatggctgtcgccaacttcttttctaaattagccctccatgcaacacttcacttggataaaacccc

SEQ ID NO: 40624 - DNA, 1901 bp, Artificial sequence
  DNA replication origin
gccacataaaaaaccacagtctgaggccagcctggggctcccagacctgggcgggatctttccaggccacctgtccttcggctttgggtcgctgtctcttggcagatggcccaacacttgggggtggcccaaggacacctcaggaaggttcccgctctacggatggcccgattagccagaggtttccaggccatctgtccgcctccaggagatggactgggacctttagacttcggtggagaacaggatgctctgtctcttgctgtccggggcagggatggcctccagctgcaggaagtacagcagcacctggacctgcccgggcagagtagggaagagaagagtggctcagagcggggctcacagctgctggtgggaggtctttggggcccaagcctccaagtccatctcaggtgctggggacccctgctggtgtcatgaaccccttacagtgagatgggggtggggtggggtcctgacaaggcatgacttgttgggtggggggtggttatttattttagagatgcacagggccttgctctgtcccccaggctggagtacagtggctccatcatggatcactgcagcctctaactcctgggctcaagaaatcctcctgtgtcagcctcccagatacctaggattacagatgtgtgccacaatgcctggctaatttttctttttattttttctagagatggggtttgccacattgcccagactggtttcaaacacctgggattggttatcctgccttggcctcccaaagtgctgggattacaggcatgagccaccacacccgaacacttgaggtagttttaagcttccagcaaagtgcactagcaggaccaggaggtggcctgggcccccactatcactcccatccatgcagacctaggcaagtccctctctgtgaatgttggccacaccacatacaatgcaagtaagaagatgggcaggactgggggtggggcaggcagaggccacctctgtcaggtcagggttgcatgggctggagcctgtcttcccatacctgggacatgacctccaaggaccagctgtcagtcatggtgataggctggctggggttggcagggagcttgctctccttctcggagggccggagcagcgtggggccaaagaccgtggcgaggttgtgcagggacatcttattgactgcctccttctctgccaccctgtagaggaccaaagcagcgggtgctgtttcaacgccacccccaggagagaggcagaggggctgggctgtgctggagttctcaggaagggagtgacctcgaccctggctgtgctgcaagctgactccagccctggtacttctgggtctcagtggcccaggacaaggagccagctctgggctggtggggaggtctcctacttgatgtgactcggagggaagaggggggtccaagtgcactgctggccacggccaaagctctgagctcttttttaaggccacagtgcagagagaggagggtggcaaagaagagaggctggggcaggggtggcagtggcactagtcgccaaaggcagtgagtgactgcagacaagggtcaggagaaaaggtcctcggtgttgggggtctagtgggagcagaggggcactctgcggcctggggacctggagccctgggctgccatgggagagctgggctaccttttcaggtggtccagaaggaaaaggaaggtgagcaggttggcctccggcagggacagcagcaggttgagcatgcagctctcctttgcaaccgggtctgaaagagctgcagaaggcggtgggttactccttggggtcacaacgagccagagacctctcccgaggtgttcacatggagcacctggggcttgtgtccctgcacagcccaggctcgtcatcatcctcag

SEQ ID NO: 40625 - DNA, 1076 bp, Artificial sequence
  DNA replication origin
attccagtgaccacagagcactcatgcaactcagggaagaaaaatgtgctttctccagcaggtctcaaattcttccaaagtcttcccataggccttacagagtgactaatggtggaattccacgcatcctggtacccagtgctcctggagccagccgcccacctggcctaggacaacgctggccaagggacagatgccaagcctggacgtcccgtgccagccccttccaggacaccctgctcctctccgtgggtcccagctctgggtgcacacaggcagggtcctaccagtcacacaaggcccttggtgacccaggcagagccctgaggggtgtggcctcaggggatgtggcctctgctggagaggcagggctcagggggggcccttcacggggtgaaagctgtggggagagctcctggaggcaggcctggggggacagggcttgggcgtgcagggggcagggggcaaggcgggggaggagtggggggcaggccacgcctctttacctgctcgcctcatccacagaaggtgccttaggacccgtgagccggcctaaacttgtacatggcaggcgtcggggggtggcggaggctggtcctctgcaccgacagggcactctctggggatgtagaccactgtcagactgaggtcagatgggggtcaacccatgtccctccccaggtgtggctgccccgacctcaccaacactgcctgggcgtggggtctgcaggtcactgctgaacgtgccagcctccatcttgggggggcagcgccggccccaagtccagcggcttatctagcgggtccaggctgcccttggactgggagggggcggggtcagtggtgtgtggggcttggatgatgggcaaggcttcgctagggattcgacctggaagctagtcctctccccagaatctgtctacggctccacctaccccatccacctcttttaggccccccctaacttgcctgtttccccatccaagggcctgactgccagcttaggcccgcaccgcagacactcacctccagcagacgccctcttcatcgcaggggtggggcggggcgcgtcgagg

SEQ ID NO: 40626 - DNA, 2227 bp, Artificial sequence
  DNA replication origin
gtgggtgtgaggtggggagcaactgaggcagatgcctgtgtggccctgctgacctagcccaggcagggtgtgacaggtctgtccagccctgagggcacagctgtctccagtctccagctcattcctgatccccagggtcacgtgtccagaaaacctgggcactcagatcagctgggcacagatggcctgtcctgcctctgcacccccataactccctgtcagcgctggcccacacctaatcagccagccagtaccgaggagtgggcccagcttccagcggggagggcgctggccaaggtgctgaccaagctggcagacacaggaaaccagcctgtccctctgcgggcctctgccttgctcccactgcacagacctgtggggaagtggaggcccaggccccaacccagagcaactggggacagctgggcttggtggctggagagggttctgataccagaagtctccagggcagccctggctccccatttcctcccatgcccatcccatgccccagaatggtcacttcggctgctccaggaggggtgggaggggcattaaacctatgagagagggggtggggtcacaatcttcagctgtagtgggccgctctgggtcactgataatggaagtgacgcctgcacagtaagcacagaagtgtctcaaggcctctctgcaagcacagagcagcccaagactggagcctggtccaccccagtgctgtcctcagactgatggccagtgccacatgactcatctagggtctgatacatccctgtggcaagagctcagttcctagtctgaaggctgctgtgtgcagggaccctggaggaagaatgcttgtttgggggtcaggcctcagcctcccactggctatgtgagcttcgcctgaggttctccatctgtgcaatggatgacgacgtcttgatgtggctctgggaggacccgttgagccaccgcaagggctgagatggtggcacttggcagccagtaccccctggggaggtggcagtgtgtgcacagcccaccccttcaggaggccagggggcagagtggctggggggtgtctgggccccacctcaccttctgtgcgactgggaatggcatgcactccacaatgccctggtaagcctaggctgggacaagggtgatagggataaagcaggccaaggtgatgagggctacagagtggcaaccagaggtgtgtggacagtgcagcctccacaccaggcagagggcccggcccatccagtatgtctccgtcccgcgaaactgcctgccactgggctgagatgggagcaccagggctctggtaggtcctcacttcctctggacaaagcaggcaggccaccagccttgcaccctgctcatgtccctcagggccacctccatggccaggggcaggcagagagcacagggctgcccagtcaccaggtctctctgcttcatgtcagtggacctgggctctaaggagggccatcaaggcctcaggctggcccactccatccctgagtcagggtcctacagactgacaccaggtgggcctgcaagaccctcatctgcatggtcctctcatgcagggtgggcctggggaggacccagcccggctgagctgactcccagcacttctccaggtgcaggggcagcctggcagttgtctcaagaccccgggatacacttaggagcacatcagtgaggcccggtgggtgccccgagcagaaagcagagaagggacacctgcacccctgtgtgcaggggtgtcactgggttctttggccccatgcccgtcccccctcccccctgccccatgagagctggcttggtagagtgggggatactaaggaggtggcctccgagagcgtcttctgggtttggagtccccattccgcaggcgggaagaggtgggagacccctgaagggttacgggtaacatcaggcctggatcccgtccctagggtggtgcagagagggccacaaaggcccaggagggcccccagaactctcttaagcctaagaaacagtgcagagcctgtttcttactgaaaaatgggggcgaccgtgctccagcaagggcttctgtgcagggggccggcggggaggggttcatgggtttcgtgaggccaggaagggagtgggtaggcagaggccatgcccaggcctccggacaaagcccttgcccgcttggggagcgggccagcttaggccgccacactctcaggcctggggcctg

SEQ ID NO: 40627 - DNA, 3328 bp, Artificial sequence
  DNA replication origin
ggctgctcaaggtcaaggaacaaacagataaaccctttctctggagccagcacggagaggacgcctccagctagaatccaattctgagtcagggctagggctctctcctgtgaatctgaggacaggaaggaaatttttgcagccataaatcggtaaaaatgttttgtaggcagagaagaggccaagcagttggctctggtttaaggcacaaatagcaaatgagagcagtcagacccagggagggagggcctggggggtaaactctaatattcaggcagccaaagcaagattttcttttgcctgagggccaatcaggtgttggacgtggtgtggatgacgtggacttggtcccgggctcaccgggatgggatgatatgggggtctgaccaggcagttgaagacttgggactcttctaggctattagccaagatggcccaggggctggagccaggactgtggattcagcgatgcagtgtggacagcaatgaacttgatggccctcgtgtcttagagcgatgaacctggagcccagagaagtggagatgggctggcctgggaagggccattcaggccgtggcggggattcaggactttatccagagggcagcaggaagcatgacagtggagagtggcagggcccagcttatgtgttaggaagacccctctgactgcactgtgtgtgtggcctggaggcaggaagggcagtgagaaggcggctgccatgcccacccatgttggtgaccaggtagggtgaggatagtggagagtccaggtgtgctgcgggcagaatcgttaggtcctgctgactggatatggtggggtgttggggagacaggaaggggctaacgccgacacccaggagccccaagaggaagaagaggaggaggaagttttacggggaggtttcatattttttgtatgtttttgtttgttggtttgtttttatggagagacaggttctcactttgtttcccaggcttgtctcaaactcctggcctcaagaaatcctcccaccttagcctcccaaagtgctgaggttacagagatgagttactgtgcctggccacctgtattttttcatctcttgaatatttgggggtatctggccgagtccatggagcaggacaccaagaaggataaggcacagccctgcccaaagctggaatccacacacagcaacaaaaaagcctgcaggggtggaactgtaggctttaactatgagcatattgggagttcaaaggattagggagcctggagggatgtgggtgacaggcctatttggaagggtcagtggtaaacagctggaggacaaggacctggcttctgtaccttccacgttccctcttcgcgtggccctgctctgtgccgggcaggttgtcccagctccacagcctgaccttgctgcccactccagcctcagtagcttctcctgtgctctggtgggcctccccctctgaagtgactgccagaatgtgactggatggtcctcaagaggcctcttgcctcttgtcctctgttgggaataccttcccttccccgctagcccaggtgtctccaactcattctcctgtctcagtgtaggtttcttcctcctagaagcctttcctagccccgaaactgggctgggtgcacctctcctatgctgaagaaatgttctttggatggaaggatgaatggatggagggatgggggatggagggatggagggatggagggatggggatggtggagggatggagggatgggaatggtggatggagggatgggggatgggaggatgggggatggagggattggggatggagggtggagggacagggatggaaggagggagggatggaggatggagggacaggggatggagggacagggatggaaggagggagggatggaggatggagggacaggggatggaggggtggaggggtgaaggaggggagatagaggatagagggattgagggatggagtggagggatgggggatggagggatgggagatgaagggatggagggatggagtatggagggatgggggatgatgagatgggggatggcaaatggaggggtgggaggatggaggaatggcagatggagggatgggggattgaaagatgggattgaaagatggagggatggggaatggaggatgggggatggagggatggggatgggaagatgaagggatgggagatgggggatggagaaatgggggatgggggatggaggaattagaggatggcagatggagggatgggggatgggaagatagggaatggagggatgggggatgagaggatggaggggtgggggatgggaggatggagggatgggggatggaaggagggggagggggatgggagatagagggatggagggatcagggtatggaaggatgggggatgagagatgggggatggagggatgggggatagggatgggggatgggggatggaggatgggagatggagggatggggatgcaaggtgaatggatgaattaatgaacgaatagacggggggtgactggagatctagatagacaggcagatgatggatggaagggcacacaggcaggttgggcaggtggaagggcaggggaggagtgggctggacagaggaaagggcaggtggtgggtggtggaggcaatgggtggcagaggcagtgggtggcggaggtggaggcagtggatggaggtggtgggtgttagaaatggtgggtggtggaggtggcgggtggagatggcgggtggaggtggtgggtggagatggcgggtggtggaggtggcgggtggcgggtggcagaggtggtgggtggaggtggtgagtggaggtggcgggtggtggaggcggtgggtggaggtggtgggtggaggtggtgggtggcggggtggatgcatggaaaggagacaaggttggctcaggcaggccgaggtgtgccctatctctacattccccgcaatgtggatgggcggaatgagtaggaatcttcctctcctgactcctcctcagacctctcagcttcctcagagtacaccctacactgaaagggacccactgggcactgcagagatgtaactggcaccaggaacctccctccatcttacccctgtcccacaactcttcacctgtgggtgcctttttgccaactggtctgattactggcgagaacctggtgtttggggatgaaagaagttcaggtctctacaagtccattttcttcctgcttcctttctcgccttctgcctcctccttctcctcctcccatgtctttccagcaaagcacaggatacccagatggcttgggccagactgaaggcacagccgtag

SEQ ID NO: 40628 - DNA, 1905 bp, Artificial sequence
  DNA replication origin
ctgggggtgggggtgctgccctggggcccccttcctgggtttcctggtccttctgtccacgtatctcactcccccattgaaccggcaaagagcacaaagcagaaaagacatccttgccgccccaggctcccccatctagcagaaaactctgaaacagtcctcacccctcccaaagttgagagaaacgtggatgttccataaacaaaacccgccctccagcagcatgtttaagtggaggcgacctcgcgtgggtgtgcgtgtgtgtatgtgtgcgtgtctgcgtgcgccggggacgcgcgatcatctctcaggctgtttgtggataatttttttctctagattttgtttgtttttaataaggatcagaggtctgggctgtggggaaggggcaagggtcatctcggatggccaggccgggaggtaccagggggacaggtctccgggcctggcctgccgagcgaggcgggatccggagccgccccatctggccctactcccggcagtggctggtgggagtcagtggggaccggctccgtgggctgctcctggggtatggccccagagaggagccaagccaaagaatacgatttctctcccctgcacagggcagctgtcatttccccggcccctgtcctggccataagggccaagagagaaggcaagcagagtggctcgggtctctggggctttctacactggaaagggaggtttttgtttttttgtacaaggcagacttcaactttcagcgagcaggctgaccagatgggaatgtagggagggtgtgcggggaaaggggacccccctgcttcaaactacctccctgccatcattgcctaccagcctgggcccccactgcggccctgtgctggctgaagggagggaggggctggggctgatgtttcttctttcctactccctccttctttctagatgtgagaaaggaaccccgccctgtaggggaagcttgtctggtgtccagaagacttagggtccatgggccgggtgtggtggctcaagcctgtaatcccagcactttgggaggccgaggagggcagatcacgaggtcaggatatcgagaccatcctggctaacacggtgaaaccccgtctctactaaaaaatacgaaaacttagccgggttgcggggtggcgggcacctatagtcccagctactcgggaggctgaggcaggagaatcgcttgaacctgggaggcggaggttgcagtgagccgagatcacgccattgcactccaacctcggcaacaagagtgaaactccaacctcggcaacaagagtgaaactccatctcaaaaaaaagaaagacttagggtccacagtggcagtctgggtgttgtattgccatctctccttgaaggagaagatgaacacttggtgggagggcgcctgggagctgttgctgcagtgtagagaagccccatcttggcccagcgggcagcagcctgtgctgagaatggggactccaggaccagagaggcctggcagtggatcctggctctgccaaaaccactgcttgtgcatctggacgacggggacagcgcagtgcccctgtcacagatggtgatggctcctggcggtggtgcacagaagctcgtggcatggcatctggtgcacagtaggtgctagaacatggaatctgtcattggagctggtgtgacccaagatggccaccttgggtctctgacactccggggctggctgtgtcccaggacaggttcatctttggtcaagcctccaggaaaagagcactggactggggtcaggagaagcagaggccatgggttctgtcaccaaccaactgtgtaatccgacacaagtccctgagctgctttgagcctcagtcttcccatcttgcaaatggggataataatcacaaccaccactgact

SEQ ID NO: 40629 - DNA, 1168 bp, Artificial sequence
  DNA replication origin
tgaaacccggcctctactaaaaatacaaaaattagccgggcatggtggcgggcgcctgtagtcccagctactcgggaggctgaggcaggagaatggtgtgaaccctggaggcagagcttgcagtgagccgagatcgcgccactgcactccagcctgggcgacagagtgagactccatctcaaaaaaaaaaaagaaaaaacaaaaaacaaaaaaaagaaaaagaaacattgtaaccgtttctgtttctattacgttgacaagggagcgttatttactgttactgtttgcccagcaggctgtgccgggcgcgggggtctcccccgggagctcaccttcaggccgcggagggcgggggccgggctggggcgcgggcagggggcgtcgggcgaccgtgcaccccggggccctgctcctcgccccttcccccaccagcccggccgggccccgcggctgggtgcgttgccgcggggagggacctgcagaggaccagtgactctcccgttgtaggagaaaggcaacaaaaaataaaaacggcacagatgacttcattctcgggaaggctcggtcctacatggaccaatttcctggggaccgtggtggaacagcttcgctgccgttggaagcacttaaaactgaaccagataaagaccaggacattctgggccctgctgaaccaagccagggcaggctgcggggcgtgtgatttctggccaggtggggaggcgggtggcctccctccaccctcaaaggcgcctggctttcagtgtcccaggattcgggggcttgtggggaggtctccactgggatcagatgggcctgaaggacgccccccaccctcaagcccctgctgggatgttaatctcatcctgctaattaaagtttgtgattctctccctaacttagctccccactcttggacattatcagctcaatgcaaacagttgctgctctggacagggaagccagaggaaaaaggcctctgcagtacacgccataacatggattaaaaaaaaaataaattggccaggcgcagcctgcctgtaatccagcaatttgggaggctgaggcaggaggatcacttgaggcctggagttcgaaaccagcgtggtcaacacggtgaaacccagtctctactgaaaatacaaaaattaggcgtggtggcacacac

SEQ ID NO: 40630 - DNA, 966 bp, Artificial sequence
  DNA replication origin
cagatcctgtgctgagtggccgtctctgctgcccctgccctgacccaacccctctgctctcagggctgtgcccacttccagatccctgccctgggaccagcactggtcgggcacgctggggattcctgccagaattctggaagcttgggccccatcaaggcggtctcttgcccctgagactcagaagatggagccacaggaccaggggagcccgcccagcctggaaccccaccccaccatgaggcgcctgcaggcctggggacattggggctgggcaaggggtccccttcctctgcctcctcctggggccaggctctgaccctccactgctgccgtaacaactgcacgggctgcgtgtatgagctgcgtgtgtgggctgcgtgtatggactgcgtgtatggactgtgtgtatgagctgcgtgtatgggctgcgtgtatgggctgcctgtgtgggctgcgtgtatgggctgcgtgtctgcaccagcccctgcctgtgcctccgtgtgtctttgcacgtgtgtgcatgtgcgcatgttggggtgagcagaaacagcaggacaggagagggagggagagaggggagatgcaggcagcagagggctggggtgacacagagactgtgctggaaatgcacagagagcaggggacatgccatagctggggggagaggccctcggagagagggatgacagacaggatggaggggtcccagccaggagccagtccaggtggcagaatcaggaaagcagaggcctgagggagagaaaaggaaaaggagagaggagaggggaggaggagggaagctgagtccagaccgcagcagggggcccagagagtggggcagacagagggtcttggatgggatgaggaggacaaagccagcacgtggtgtggggcacaggcagcaccttctccaccagccatcctgagtcagccccacagaaaagcccgggggtcaggagcagg

SEQ ID NO: 40631 - DNA, 822 bp, Artificial sequence
  DNA replication origin
gaatgggtgggtggatgggcaggaggagtggatgagaggctgtttcacagttatgcccatgtgctatggcaacagaccagactaggactcaaatcccagctattccatacgatactagtgtcatcttgcataagttttgtaacccctctgatcctcagttttcttgggcgggaggacagacaggaggatatgcagatggattaaaatgagtactcttaatacatacagaaaacttaggacacgtcctgacacacagtcggtgcttaataaatgtgcactcgatgattgcatcccatgttctaaactcagccttggggacgtgtgtgaggagtgagatgctggggctgccctcggggactcagcatctgctgagcaatgtgatcagtcctgattcagggccccttgggatggtcagggaaagggccccatgggtgacccaagtcagaagggaggaggggggaaatgatcatgaatctgtattggctgggcccagggtcaaggcagtcagggggccgggaagaggggcatcagcgctgggggtctggaggccaggggaaaaccaggggagggtgggaaccaacgtgacagggatcaaagggagaagaaggaaatgggtcacttggatttggccccccagcagcagttggggatttctgttggggatttctgtaagagccgtttagtggcattggggctgggaggccattggctgaggacatgcagtgagggccgggcaagggggcagagagtggctcatgccatggcagctgctttcaaacaccagaggggccactctgacagttctcttccttgctcaggtag

SEQ ID NO: 40632 - DNA, 3738 bp, Artificial sequence
  DNA replication origin
aggagggaataaagggacagatttgtctcttccctaaggccattgttaaaattagttgtgttctcccaaggcgcagcccaccgtgtgtgtccctgaggtggctctactccctctgctttggggtgagccacaagagagcaggccccaatgaggtcatgggccagcaaggccaccagaactccccatctgtggctggcactgaggtggacactgagaagttggtactgcagaggcagggccaggtgcaggaggagagggtgtggagtgtatcagggcaggtcccacacaggtgtgagtccctgggccaacaaagaggagaaaaagcaggcctggctgagagaacagcctatattaaggcttagaggcatgacaaagcctgagtgagggcttggggcatgggaggataagagaatgaacaaggaatagaggagaatgaatggagactgaagggagattgatgggaaggtggatgggaggatggatggaaaaattgttgcaagggtggatgggaggatggatgaaaggatggatgggaggatgggggagaatggatggaaagatggatgagaggattgatgagaagatggatgggaagatggctgaaggatggatggaaaaatggatgcaaggatgaatgaaagatgaatgggtggatggatagaaagatggatgggaggatgggtgggaggaaagatgaaggatagatgggaaaatggatgggaggatgcatgggaggatggacagaagaatggataggagaatggatggaaagatggatgggaggatggatgggaggatagatggaggatagatgggaaggtggagggaggtagaagagaggatggatggagaatgaatggaagattgatgggagaatggatgagagggtggacagaggaatggatggaagataaatggaaagatggatgggagcattgatgagaaaattgacgaaaggatggatgaaaggatggatgggaggatagagggagaatggatgaatgggaggatggatggaaaaatgaatgggaggatgaatgaaggatggatgggtggatggatggaaagatggatgggaggatggatgacaggatgaatgaaggatagatgagaaaatggatggtagaatgcatgggaggatagacagaggaatgaatgggaggatggatgaaaagatggatgggaggatggatgtaaagatgaataagaggatggatgacgggatgaatgaaggatagatgggaaaatggatgggaagatgcaggagaggatagacagaggaatgaatgggaggatggatgaaaaagatggatgggaggatgaatgaagaataagatggagggagaatggatgggaagataaatggagaatggatggaagatagacggtagggtggatgggaggatggatagagggtggacagagaaatagaggaaagatgaatggaaagaaagatgggaggattgatgggagggtggatgggtggatgaatggaagatggatggaggatggatgaaagatggatggagaatggctgggaggatggatgaaaagatgagtagaggatgaatgggagggtggttgaaggatgaaatgaaagatggatgggaggatgcatgggaggatcgacaaaaggatgggagaatggatggaggatggaaggaaaaaatggatgagaggatggatagagaatggagggaggatggatgggaaagtggaaagagaatgaatggaggatgaacagaagatggatgaaggatggatggaggattgctggaaggatggatggaaagatagatggagaacaaaagggagaatggatgggaggatggtgatgatggatggggatagacagaggaatgaattggaggatggatggaaaaatggatgggagaatggatggagaatggatggaggatagattggagagtgaatgggaggataaatggcagggtgaacagaggaataaatggaagatggataagagaatggaaggatggatgagaggaggaatgaaggatggatgaagtgtggatggaggatggctgggaggatgggtgaaaagatgaatggggtatggatgggagaatggatgagagggtggttgaaggataaatggaaagatggatagaagatgaatgaaggatggatgagaggatggatggtggatggataatggatggggggatggatggaaggatggttgggaggatgattggaggatggatgggaggatgaatgaaggatggaagatggatgggataatggagggagaatggatagatgagaagatggatggatgggaggatggataggatgatagatggatggaggacagatgggaggacaggtgaaggatggataaaaagatggatgggagaatgaagaatggatgggagtatggatggaaagatggatgggaggatagatagaagatggatagaaaggtggatgggtggaaagatggaaagatgaagcgtggatggatgggagaatagacaaaggatataagggggaatgaatgggaggatgaatgggaggatggaagggtggatggatggaaagatgaataggaggatggatgggagaataaataaagaataggtgggagaatggataaaggatacatgggataataaatgggaggatggatgggaagatggatgaaaagatggatgggatgatgaatgaaggatggatgggtgaacgcatgaaaagatggatgggaggacgggtgaagaattgatggaaagatagatggatggaaggatggaggatgcatgagaagatggaaggaggatgaatgaaggatagacgagagaatgggaggatggaagggaggatggacagaggaataaataggaggatggatggaaagatgaatgagaagatggataagaggatgtatgggagaatgaagaatgaatgggaggatggctggaaagatggatgagaggatgaatgaaggataagtgggaggatggatgggaggaaggattgggaatgattgggaggatgaatacagaatgtatggaaatatggttgggaggatggatggaggatggatggaaagatggatgggaggatgaaatgggaaggtcgatggaggatagatgggaaaatagatgggaggattcatggggtatgagtggaagatggatggaggttggatgaggaatgaatggaggatgaccgaggggatgaatggaaagatggatggaggatgagtggggggatgaataggagaatggatggaggatggatgggtagatggatgatggatgggtagttggatgatggacagggggacggttgaaggatggatggaaagatggaaagatggatgggaggatgaatgggaggatggaagggagcatgaatgaaggatggatgataggatgaatggaggatggattgggaggatgaatggtaggatagatgaagtatggatgggagaatgggtgggtggatgggcaggaggagtggatgagaggctgtttcacagttatgcccatgtgctatggcaacagaccagactaggactcaaatcccagctattccatacgatactagtgtcatcttgcataagttttgtaacccctctgatcctcagttttcttgggcgggaggacagacaggaggatatgcagatggattaaaatgagtactcttaatacatacagaaaacttaggacacgtcctgacacacagtcggtgcttaataaatgtgcactcgat

SEQ ID NO: 40633 - DNA, 850 bp, Artificial sequence
  DNA replication origin
accttatcctgtaggtgagagattaaagagctgggtccaagcaggcccacccctgacatctgtgggccctggagcaagagcagaaatgaaggtccaggtagcaaaggtctaggtgttcccaagtgagagaagcagccaggacgctgctggctgaagggctcttctgtcctccttccctcagaaatgccttcacgggcctggggaggccaggctctcatttatattcttgtctcttcagagttttccaccagaacgtgaactggaccgggggccacagtcccccagtctgaagggagactcatgaaatgcagattcctgggccctgcggcagacccaggagaccatgctcccgatgaagataaggcgctatatctttaagaggttccccaggtgataattatgcatgaaagtctagagaagccccccaccccctgctgaaagtagcaggagtccgggggtgggggtggggggtacgtacaagcagatttgtgttctagaaatggatccccagctattgggcaaatgtgggcagggaggagagctgggaggggcagagaggcctggcagcacctaggttggagagggtggcggtctggtgccaaggcaggatggttgggtggggtgtgatacgcggtgggggtggtggagggggaaggttgtgtcagcagaggctgagtttgaaattcacgatggacagggcctggtgctgatgaggcttgaaggtgagcagggatccagggcagctcctttgggatcataaaatctaatcagactgcaggaggcctgggccctgggcctccattaggcaagtacccactcccctctgctgatctgggcatccctggggccc

SEQ ID NO: 40634 - DNA, 774 bp, Artificial sequence
  DNA replication origin
gggcagggaggagagctgggaggggcagagaggcctggcagcacctaggttggagagggtggcggtctggtgccaaggcaggatggttgggtggggtgtgatacgcggtgggggtggtggagggggaaggttgtgtcagcagaggctgagtttgaaattcacgatggacagggcctggtgctgatgaggcttgaaggtgagcagggatccagggcagctcctttgggatcataaaatctaatcagactgcaggaggcctgggccctgggcctccattaggcaagtacccactcccctctgctgatctgggcatccctggggccccttcactgtcacactgagggtctgagtggggaagaattaaaagcccacctctgtccccgcctaccacgatcccctacaggagcctgcagccctgctggggagactggaggagcagctgggagcagcaggccaccaggagggaaaggtgggcatgcctcgggggtgggagggtggagtggccaggaggggaggcttcccactggaggaggactttgaaccctctcactttccatacacagttccagaaatcatcttgataataaaaataatagccgtgaaaatgacagcagcaactattgcccttaatcgagcatatttttgtgccagacactgagcatgcagcaaggaagtggcagagtgggctgtcagatcctgagccatgggctggaaccagctttccctgtgccaagcagagaggggcttaaaactcaactcctacccttggaacat

SEQ ID NO: 40635 - DNA, 946 bp, Artificial sequence
  DNA replication origin
cagttctatcatctgaaaaggcttcctcttcctatctttttgtagccacgccctggcctcacccctaacccctggcatccactgatgtccatctctatattttgtcttttggagtgtgtcatataaatggaattgtgtagtgtgtgatcttttaagattggcttttgagggaggtgggggggtcagccccgcgcccagccagccgccccgtctgggagggaggtgtgggggtcagcccccggcccagccagccgccccgtccgggagggaggtggggggttcagccccctgcccagccagccgccccgtccgggagggaggtgggggtgtgagccccccgcccggccagctgccccgtccgggagggaggtgggggggtcagccccccgcccggccagccgccccgtccgggaggtgaggggcgcctctgcccgtccgcccctactgggaagtgaggagcccctctgcccggccaccaccccgtctgggaggtgtacccaacagctcattgagaacgggccatgatgacaatggtggttttgtggaatagaaaggggggaaaggcggggaaaggattgagaaatcggatggttgccgtgtctgtgtagaaagaggtagacacgggagacttttcattttgttctgtactaagaaaaattcttctgccttgtgatcctgttgatctgtgaccttacccccaaccctgtgctctctgaaacatgtgctgtgtccactcagggttaaatggattaagggcggtgcaagatgtgctttgttaaacagacgcttgaaggcagcatgctccttgagagtcatcaccactccctaatctcaagtacccagggacacaaacactgcggaaggccgcagggtcctctgcctaggaaaaccagagacctttgttcacttgtttatctgctgaccctccctccactattgtcctatg

SEQ ID NO: 40636 - DNA, 1346 bp, Artificial sequence
  DNA replication origin
ggtggcggtgtcaattgatcggcgcgggaggggcttcgcgccgcgctgggggcctcgctcacagctgccggcgcgcaattatcggggaaaaactggggcggctaccgcggtgaaattagttatcgatctctcggcggagccgcggggccgcgcttggcgctgacggctgcagacccggccgggcacgctcggcggggcggggaccaggggggcggcgggggcgggccccctgctcgggcctctccctcctcctcccgttctcccgttctcccctcctcccctcctccctcaccctctcgcccgcgctcccctctcccattcatcccgccgtcgtatcgacccgcggccgaccccacgcggtcaggcgcccccgccccctgccctctcctctcccagcctggcctcccccgcgggggctgtcatcgagcgtctggcacgaccggaccctgccccggaggaggagggaccacagccgggggcgggagccagccttgtgctcgcaggcctgggttcggagcccagctgccgggaatggtttccagatctccctgagcctcagtttcctcatctgtaaaccgggtggtggtggcttcatccacctctttgagaagacagcaggacaggcgtcctgagaagtgagtttgcctggaagctgccgggctgtagtttgcgttgataccaccgatcttcccagtcactctaagagacgggtcatatccccgttttacaaatgaggaaagtaactcagcgaggggagacgccgtgtccagggacacacagtaagcaggtggcccaggaggaccccagagcccggctggaggtggcggagttgtggtgggggcggtgcctgcggaaggggagggacaggagcagagggcagagggaggtcagtgctggcacctgcagccctgtcagcctgcgagggtgtagaggtttgggaggtcttagcaaagtggtgcatacagatcgcagaggctgggtggagggaggagagggtcaggtcagggctccccagccctcgctgagccattggctcggcagcctcctggttggagaggaagagtggggagaggcagggaaaggagagggacgcaaacaggagaaggagagggtttttgctcagagccagcctgccaccctctcctttcccagcactaggctgcatctgggagggaggctgcaggctggagagcaggggatttgagttccaatcctgaggctccactaggtggtgtgtgaccttgagcaaggccctgcccctccccaggcctcctatggagatggtattgggtcttatgtccctcaaggctccttgtggctcccctctgcctgccagccacagcctc

SEQ ID NO: 40637 - DNA, 1981 bp, Artificial sequence
  DNA replication origin
gggcagggggcgggggcgcctgaccgcgtggggtcggccgcgggtcgatacgacggcgggatgaatgggagaggggagcgcgggcgagagggtgagggaggaggggaggaggggagaacgggagaacgggaggaggagggagaggcccgagcagggggcccgcccccgccgcccccctggtccccgccccgccgagcgtgcccggccgggtctgcagccgtcagcgccaagcgcggccccgcggctccgccgagagatcgataactaatttcaccgcggtagccgccccagtttttccccgataattgcgcgccggcagctgtgagcgaggcccccagcgcggcgcgaagcccctcccgcgccgatcaattgacaccgccaccgggcggcaggaaaactcatttttctttctctccccggctccgggtgggcgcgagctgagctctgccaagggccgggggctgcttggggccggggcggggagggagggcaggtcccggggagggggcgcggacgcgggtttgggaaagaggcttgcgaggaatccgaggaggcggggtgcctcagtttctccactctaccacaggggcgtggccgaaggcctcagggacctggggtgcgggtggggcagtcctgtcccctcttagctgttgggatggcggactggctggtgggaggaagggctaagtcaggcgccgcggcctggacgcgtgggttctactctggactcacaccagggaccactttgtgacgttgcatccgttccttcccttcgtctcttcctctccgagcctcagtttccccatcttccgaaaggggcctggcatatcctgggcaggcagatggtggatcagaggtagtgaggtgcctacaaggaaatgctcccaacagggtggcttggaggaatcctccttcctcagcactcatgggccgggcactgttctaggccgtgggggtggggatcgagcagtggccacactgacaaagcccctacccttgtggaagtgacattctactgaggccatggacacgtacagtacccaagtaagcagtgagaagatggcacgggccacggagaaaaatgaagcaaggttggcaggacagggcgtgctgtgcaaaggcaacgcagcccccaggacccacggtgggcctcgccccaggccctccttgcaaagctctgaactgctcactcccaaactgctggttgttcaaggtcatgggaaacctgcagacttggcattctccaagggaggtgggcaggaggagggagagcaagaggaaggagaagccaggaggtggggtgggacagtcttcctctgggagagtccctaagagggccagagagagagagagagagagggctggggactggaagacaccaggggagagcgggtatggtcagagctccaatggacacggtgtcctggagggtcaggtcaagagagacttgtgctgctggctgggctccagctgggccagtgaggcctagagaagggcagggacttgcccaaggccgcagtacatatgggggacagagatgggctcctagatcctgccaccaggcacagagaagggcaagagaggccagagaggaaaggaggaaagaggctcatggagcgggggcgccagtctctgtttagaggggccaggagccccagtgtgcttcccagaggccagctagagcttcccaggagcaccatgggtggtgctgggacttctacaggactcagcatgactcaaagggccctggggaatgcattctgttccccagtctcccaccctccacctgccagaatgacagaggctcccccatggaggtgagtaagccgggcaggggtggcgacccaaggctgctggggaagtggggtgttccagggcggagcaaacctcctgactctccccctgcctcggtttcttcatcttaaaaatggagctggtggggctgggcgccgtggctcatgtctgtaatcccagcactttg

SEQ ID NO: 40638 - DNA, 914 bp, Artificial sequence
  DNA replication origin
gcaatcgccctcaacaaagatggcgcggacgacctaagtcgcgtcacgctaccggcgcgtcacgcgaccttgccgcaatgctcctcccgcgcagctcttatccccgtagactgcggccgagacggggagggggaagcctcgcctggggggcggcagtggcctgggcggctctccggctgctgttgtatggctgcacgttggcgctaccggacgggatgctgtatccccgagagagcccgtcgtggcagcgcaagcagctggacggcctctgaagcttccgcgccgacttctccgacaaccgacgccggggcttcgaggagcagaggtaccggcgaccgctgtcggaggcgcggactcggggcagggccaggagtcgcccggaagcccggcggtgggaatggggtaagccccggcgccctgcagcctccttcaccgtagtgccccggagctgggggcccggaggaggttaaaggtcaacgggcttgggggcgcgggattggagaacgggagtacctgggggacccgcgagggccggagcggtggaggcgggaggaggaagaagcgctcctgtcgagtcccgttcctaggcgaaggctgagcccgggcagtgtccttctttctaatgtttaattttaatttttgaaatgcttttgagaccgggtttggccctgctgcccaggtgggagcggagtggtgcaatcctaacttctgagctcaagcgattctcccgccccagccttgcaagttacctgggaccaccatgcctggctaatttaaacaaacaaacaaacaaacttggtcgggctcgtggctcacgtctgtaatcccaacactttgggaggccgaggcaggccgatcacctgaggccaagaattcaagaccagcctggccaacgtggtgaaaccccatctcta

SEQ ID NO: 40639 - DNA, 1619 bp, Artificial sequence
  DNA replication origin
cgcgcggcgacaaccggcgcggtgggaccaccgagacgccgggacctccgcgcggcctagagtggtcccggaagtgcccgcgggccgggggcggggctctgggtgctcgggcggccgcgggctccgcgtcagcagctgctgtggagccaggcagcgtcggccgcgtcggccgcgggttggagcagctcaggtgcggccccgccccgcccgcctgcggccccgccccggcccaggtgagctgccccgccccggcccaggtgagtggccccgcgtccgccggtgtgacctgagtccgcctgaccacctgtccctccggtggccctgggtgtgcgtgtccccaatcgcggggaagcctgtaggggcgccacgtcgccgcctgggcagcgtgtgcgggtccgtggcaactcttgggcccccagccaggaaaccttgactgcactaagagtttgcagggtgcccaggccctagggactctctggaggatgggatgacagatgcaggaggacccggagaaggccccgacagaggtgggaagcatggagttccagatctttgcattttcggtccaaaaacacttatcatgttgtgggagacagataaagggttgccaacttttttctgagtggagacttcagggtgtaggggctatatagtgggaatggaaaacctctacggagggaagtttgagaacaccaggacttaatgggtgggcggaggaagagttgcaatctaaagatatcaagaaagagaacttggaagccatgaaaattgggaagaaagcgagggtggggatggggttggggggtagctcaaagctttcatgcacctaggtaggcaatgtgggcgggtgaagggatattgtcacatcttcgtttttcaagagaaagccagaaacctactgagttttaaatattggtaactaaggaaaatgaacaggaaaagccaaactcttcgagagccaaacataacatagcaggatcttcaggctgccaatttgcaacctctgaaatgaagggttttgagaaggaggtattggagagcagtgccagatggggtgggaaggtgaagaccgagaagagagggattggcaataaggaggtcatagaatgccagagctgaggtcccagctgaaatcggaaactcgaaatttgtcgtggtgccatacatagttgtatgatttttcttggcaacatttaacaacttaggaggaactggccgagaagactgggacttagcggctagttgcagccggacgaggaggtgaggagcatggtgctagagcgtgagagttgaagtgatgcgcatagtatggagagtctaagctggatggagaaggggtggagctagaaaaggagaactacagtaaaaatggcttggatttcatgaggtcgaaaagcacaaattgagtgagagagctggaagagttggagattatgggttgctgaagaggagggggagggtgagaggagttgaagtgatcaaagaatttttgaaaatactttagggctgggcgagggggctcacgcctataataccagcactttcggaggccaaaatgggtggatcgcatgagctcagaaattcgagaccagtctgcacaacatggcgaaaacccatct

SEQ ID NO: 40640 - DNA, 1885 bp, Artificial sequence
  DNA replication origin
tagggcaccctaagtcacacagaaccaggcctcctgcaccccgttcattgctaatcccatagcactgggctatgagccctttgggactgggagtctccatggagtccaaccaagccttcacagggcaggggtgggagggaaggggctcaggctgagtgggtttgtgtctcgcagtttcccagacagtcctggcccagctggatgcactgctggtcttcccaggccaagtggctcaactctcctgcacgctcagcccccagcacgtcaccatcagggactacggtgtgtcctggtaccagcagcgggcaggcagtgcccctcgatatctcctctactaccgctcggaggaggatcaccaccggcctgctgacatccccgatcgattctcggcagccaaggatgaggcccacaatgcctgtgtcctcaccattagtcccgtgcagcctgaagacgacgcggattactactgctctgttggctacggctttagtccctaggggtggggtgtgagatgggtgcctcccctctgcctcccatttctgcccctgaccttgggtcccttttaaactttctctgagccttgcttcccctctgtaaaatgggttaataatattcaacatgtcaacaacagctattgtgagggtcataagatcctggctgagaaaaatgactgtggtgggtctgggagtcgaagacccactcctggggtggggagcagtgtgcgggggaatggggattctggggactgttgtcaaagaggaagcacctgagactattggggcatggcccagactcccccaccatggccccctgggggctcaaactggtagcctgaccttcctgtgacctgaggagccggagggagaaaaaggaaccagcccttgccgcccccaactctgcatggctggttatggtccaagggttatggctctagggtggctggtccccatggagctcaggctgttggcttggggaggggcagccactgcctaccccttggagtctgtgcccaaggcccgacagagcattaatggggcaggaaggcaggtgtgtgtgggtagcattggaggcactcgagcgccaaggctgagggtgctgaaggcaggtgggcggctggggcagaatcctttttcccagggacagtgtgttctcctgatgtcctgtgattgggccaaggtctgcggagggaagctctcccacaagctgggcagctgcacctgaggggggggtgtcatgggcagaacactgggtggaggggccagtcttgccatcagcagcaaggagggggcggagattccttttcttttttttttttttgttttttgagatggagtctcgctctgtcgcccaggctggagtgcaatggcactatcttggctcactgcaacctccgcctctcagggtcaaacgattctcctgtctcagtagctgggattacaggcgcttgtcaccactcccggataatttttagtagaaacagggtttcaccatgttggtctggctgagtctcgaactcctgacctcgtgatccacccgcctccgcctcccaaaatgctgggattaaaggcgtgagccaccgcgcccggccaagggggcggccatttcaagaacacattcctcttccctcccggtgcgcctgagaggaggcgcttcatgtcgaagtcagccctgggatgcagagagttggggggctcagggtcctgggatggtctcgcagacactcctagttcttcgcctgccccttctcatctctatttctgtgggggcggggagggcagacaggaacagggctacccttgaagcaggttgggggagggggatcctaacaggaccccggtgcctgtggacagtgacagggtcgacagctctggggctccactctcct

SEQ ID NO: 40641 - DNA, 1670 bp, Artificial sequence
  DNA replication origin
ggcatttgtccccgcgacagcaccgctgccgccgtctctaaggtcgcccgggtcccaccgccgccaccatgcctcggggaagccgcagcgcggcctcccggccagccaggtgtgagggggacaagggccctgtggggagggggttagggaagtgtgggcactcccctaagggcgtccgcagagtgaccttggctgctgctgcgccatcttggcggggggaggggtgggggtgcagcacccacgtgtggagacgtgggtcgtccatctctccgggggtcgtttccaggagctgcagccctccagcctggggtctggccaggattaaccctgcttcctcccacccccgcagccgcccagccgcgccctctgcccacccgcccgcgcacccaccgccctcggcagccgccccagcccccgccccttcgggccagccggggctcatggctcagatggcgaccacggccgcaggggtagccgtgggctcggctgtgggacacgtcatgggcagcgccctgaccggagccttcagcggggggagctcggagccctcccagcctgctgtccagcaggtgagcagcgagtccaagagaaactgaggcaggattatctcgaggccacacagggagctgcccaagtgtccagtgaggagtgtccgcgtgtattcaccattgcttcagcccaggactctgcccgggaagggtcctagtccactggtcttgagttcactgtcacttagaggcaggcttcccggcctctcccttgaggccagggtccctaagctcccagggagagacaccaaccagccctttaaagatgggaaacccaggccctgagggctcagagactcgcccaaggtcacctcaccctagcagaggggagggatgttggatttcctgagcccctgttctccccacacccaggtctgggcactgtggccgctgggcgcaagggcgaaggggagccacttccctgatgacctttcccctgctaggaaccccaccgccgtaagccaaatgtggctttgtggctaggtcaggggtcatgaggattagtgtagctgagccaggaaggtgctagaacttgtgggggtggggctcatactctgagagtacaggcagagtactgggctttcctagagccttctcctccctctcctgcacccgcccaaagtgcccattagaaggcagcagaggccaggcgcagtggctcatgcctgtaatcccagcactttgggaggccaaggcgggtggatcatgagttcaggagttcgataccagcctggccaacatagtgaaaccccctctctactaaaaatacaaaaaatttgttgggcatggtggcgggcgcctgtagccccagctacttgggaggccaaggcaggacaaccacttgaacccgggaggcggaggttgcagtgagccgagactgcgccgctgcactccactctaggtgacagagtgagactctgtctcaaaaaaaaaaaaaaaaaaaggcagcagaaacatgctgtctgtagccgcctctgctgctggatcactcagcctgcctaggacccttgggacacccaggctggggatgtggggaggggcaggtggccccaggtttgaaacgcacctccaggtgccaactccaagctgatcctgcagcctcttgcactgtacccccaggcc

SEQ ID NO: 40642 - DNA, 1088 bp, Artificial sequence
  DNA replication origin
aggcaggagaattgcttgaatccgggaggtggaggttgcagtgagccgagatcgccactgcactccaacctgggcgacagagcaaggctccgtgtcaaaaaaaaaaaagtaaaaagtaaaattaaaacctcaagttctcgaagagcaggaaagcattctaaatccgcgctccagctcacctggcctggaacgaagctgctaaaattgcgaggccgcaggcttcaaacttgcgctagatttgaccgagccgggcaaatgctcctaggcctttgggatagacacgctgctcggatgtcgcgtaaaggccgttagtgtcgggggttgcactcgcggggccagggactaggtgggggcggtcgggccggcccggggaatccggtggggttcagggccgcgcggggggcctcatatcccccgcgggcactgcgtaaggctgccagcattggcagcgcattttggccaacagtcgaagacgggttgggacgccccctcgtgggagttctggggatgggttgctccaggccttccccagggccgcgcttcacttccctaggccaccggagactcccaggccacgcggtggtcagcagaccctgtctggagggaggggacagacagccgagtccgggagggggcagagagcggagtccagcctggagcctcgcgtccccttcccagctggccccatcccgtcgcctccccgtctcctctcccctccagggctcgcaacaacccccaactccgctccctgccctctgcggtggtcctaacagaaggcactgtcgccctccttaagccctcggcgctttgcgacactggcccctgtccccagaacccgcacagcctgccaggcgcagggagggagcagggtcccatttccagccgagacccggagctgctggaagggagatgtccggaggacgggagaagggggatagggttgggggcagtgccgcctcccgctgggggcgtgttcctgaggccccgcccggggccccgccttttttgcgccggctgtgacaagcgctgcggcatttgtccccgcgacagcaccgctgccgccgtctctaaggtcgcccgggtcccac

SEQ ID NO: 40643 - DNA, 951 bp, Artificial sequence
  DNA replication origin
gttgcagtgagtggagatcataccactgcactccagcctgagcgacagagcaagactccgtttcaaaaaaaaaaaaaaaaaaaagttggcatttcaatgcctgcttcagtgtcatcctttcagcctcattttcatttgtgtaacccacttaagtggtcttgggtgcctccgaggtgcaaggccatgctttgtggaacctgcagtccatcagccatgggagctgaagtaacaactctctgcagtttaggcccggggaccaccatgagaagtgttcagtttgtttggtgtggcaaacaggaaccaggtggcatggactgcatgaacaagggagtagcggctggaccaggcctggtgagtctgccaggaaagaatggcccacccttggtgtgctcacctcactgggaggccaccctcaaggtgggtggtcaccccccttcagagaggagaaactgaagacagggcggggaagggccctgttcacaggctggctgaaaggactgcagtgtgagagaacacagggctgcacctgacttccatggagagcatgcatggctggggacagctgtgcacacacagaattgagcatgccaggcagggccaaacgccccagccaccactccccttgccccttgacctgctccttccttatggaggggcctcctctcttacttggtgacccacacccccacttctgggtgcttttgctcttggttgcaccctgccgacaatcccggtgtcaggagtcctctgcaggcacagcagtgatgagggacagtccctaccttcccccacctaggagtaataatatgaccactgcaaagtcacccagaaaagaccataaaaacctcaagctcagccgggcgcgatggctcatgcttgtaatcccagcactttgggaggctgaggtaggaggatcatgagctcaggagttggagaccagtttggccaaca

SEQ ID NO: 40644 - DNA, 790 bp, Artificial sequence
  DNA replication origin
ggtcccatccgtacccccacctttggaaggcgcatcccactgggtctccttggtggcctgacctctgacctctgacaggtggtcctacccacaagcaagttcccccacccctcagagcctcaacggatccttctagaagatgacacaatagcccctgtgaggaaagggatattattttattttttattattattattttttgagacacagtctcactctgtctcccaggcaggagtgcagtggtgtgatctccactcactgcaacctccgcctcccaggttcaaacgattctgctacctcagcctcccaagtagctgggaccacagacgtgcgccaccatgcctggctaatttttgtatttttagtagagatggggtttcaccatgttggccaggctggtctcgaactcctgacctcaagtgatctgcccaccttggcctcccaaagtgctgggattacatggggaagccattgcacctggccaggaaagggatattaaaatgtgtcccaggggaaagtgaggcatatggcagggactggccagttcttcagcttgggatagaccgaagtttacagatagggaaactgaggctccaagagggagggtccaggcttttccacaccagcagacaagtggaggggtcaggaggtcctctagctggtcagctgtgggaaggatgctgtcagaaggctgtgggaggtgtctgagtggagtactgggcccccagggtgtcccctcgtcagtgcccaacaagcccctggggacccctccaggctagccacctcagac

SEQ ID NO: 40645 - DNA, 1005 bp, Artificial sequence
  DNA replication origin
ccgttcacctcccccacccgggccgcggctgctaggagagttcagaacaaaaggcggcggggggcggggccgaggcgggccgggggtggggcggaagctataaggggcggcggcccggagcggcccagcaagcccagcagccccggggcggatggctccggccgcctggctccgcagcgcggccgcgcgcgccctcctgcccccgatgctgctgctgctgctccagccgccgccgctgctggcccgggctctgccgccggtgagtgcccgccactcgccggccgctcctcgctgagggggcgccgggcacgcgggctgggcccagcggcggatccggaccgaagggggcgccccgggtggcctccagcgcccggtacccgaaacgctttctggttccctctaggcgtgatagacagcgagcttgcagtccctgggggtgtgaaggggagccggcgccggcatcgttcgggctggtgggacgggactccacgctggactcacgcttgctcccagcgtggggacctgcctctcgcgctccagccgcgggtgctggagtgtgcgttgaaggaagcagcagagggagtggtaacagggccccctattcatcgcagggacaaagccgagcagatcccaggcaggtgtcagcctgcaggtgtgtggccgcagttagtacacctccaggtgtgcggtgggatgaaggataaagggagaagggagggcagcgctgtgctgcgggaaatggggtctaagcctggagatgtcccccgcgggcacctgccggcagcagttttgggaggcttggagccaggagaacatgagtatgaaatagtatgagtgcagtgtgtgtgtgactgagaggtggctgtcagaaagaagcggggagagaaaggaaagggagaaaatgtgtgctcaggagaggagaagaaagcccaggtaagagaggacagcagagtgaggagaggagggactgtcatggagtgtgtgtgacagcttgcatgtgtccca

SEQ ID NO: 40646 - DNA, 1247 bp, Artificial sequence
  DNA replication origin
tatgaaatagtatgagtgcagtgtgtgtgtgactgagaggtggctgtcagaaagaagcggggagagaaaggaaagggagaaaatgtgtgctcaggagaggagaagaaagcccaggtaagagaggacagcagagtgaggagaggagggactgtcatggagtgtgtgtgacagcttgcatgtgtcccaaaagctgccccttccctggggcgcttccaggcaccagtcacagggcctggggccagagcctgggccactccactccacagcggaggcatccagacagctcgggcagggaagggagcaggagggtgtgacaggcaggagtctcaggactggcctggtgaggaggcaggcctggccaggctgggaccctctgtccagccactctggctctgctcagggcagccttgtcctgtgctggctatgggagcagaaagggatgggatgggtggggtagagtgaatggggggcatctcagtctggagtcttgcctccttcccagcccctcttggttcctaggacttgggacagagtcaggaatcactgtgggtagacattgaaccacaggtctggaaattggagagatctgggtttgaaccatgtgaccctgggtgaatcctgccatgcctcagaatctcacccactccatctctaatgggagtgcaggtgggagggggcaatggtgcctactgctgtgtccactgttgagcaatgaggtgatgccaggctcactagaaacactgtcacctgtagctgccactttgacgcttgtgcatggtcagtgctggagctgggggccagcttggggtggggtctgagctggactgtggtctgtcactctgcaaacacgcagggagcatgtggggtcacctctgatgtgtttatcccccggctgccttcagcaaggctgggagagctctgtaaatatttatccagcccagttcccagctttcagggttgatggaagccctgcagtccgatggatgggacgaagctaccgtccctcctggagccagcagcagaggggtgagaataggaagattaggtggaagcttgagggagaagatatccctgcttgccacctggctgtgtgagttgggcaggttgcttgacctctctgagcctgcatggtgatgctcccgtcttcctccatagcctaacaagtgccctcctcgaagtcttgcctcccaccgacatcagaaggcatagctatgattaattatacccactagaccaactgcaaactg

SEQ ID NO: 40647 - DNA, 1160 bp, Artificial sequence
  DNA replication origin
gcgcgcgcgcgcgcccgcccgccccgatgaatggagacgcgcgctctcggcgcatgggcccgccccggggctcccgcggggccgagcccggggagggcgagaacgcgccccgggctacctcggagccgatcatgtagaactcgccgtcgtcctccagctggaacttcacgggcttctgcccgaaggtcttgctcagcgccatcatcatcattgcggcggcagaggcgggcggccggagccgggctgcgagggatcaggagggctggggcggggccggggcgtgctgggccgagggaaaccgaagccggaaggcgaaatgcggaccgggccgggtactggcgcctcagccgggctcctcagccgccgccgccgccgcagacgacgaccaggccgccctcagtgcgcaggcgctggcgttgacgctgacgcgcgcgccgccgctcaaacaaaaggccgggcgcgcctccgcggaccccttaaaggagccacgactaatttctctttctcccaggctgcctcccaagtcgtggtgtagaggacttctcacggacaaaaatagccaatgaggtcctgactcaagcagtggctttcccagtcttacagccaggactggaactgagcccaggggaaaagcaacgaagtgaggcctgaaggaggaggacctagtatctggaagcctgggtggtctgggcatgctttgggaccccaatctcgtgccttagcttccccacccctaaaacgcagtgcagctgagcagataggcaggcccctaggaagagatatcccagttccgggcctacggctgtccctgcagctgtggaggtgggcaaaatgacaacagcggatgaggcttggcaatgttcaaaggcccaggtggtatttggtttggctggtgcatcagatgagcgttggaagggagagacaccttccaccttctccattcctctcttagcctacactctgcttaaccgagccctgcagtggggagtgaaaccaggcagcccagccctgtggctctgcctcttggctcttacagcgcgaagctagtgaaactaatgaaagtctgaaagcaatcatgattgaataatgcagggagtaaaacagtggcccactactgatgatttcacaccgttcaatctaatgaaattgcagctgtggct

SEQ ID NO: 40648 - DNA, 964 bp, Artificial sequence
  DNA replication origin
gctggaggacacaggacacctaagggcgtctgggagcatggagagggctgcgaaaggcccccagtgaccttgggaggtagatggaagacagagaaaagtgagctgagtgccaggcatgaatgcgctgggaaacagacagggaaaggggcagggatgctgcagaaaaggggtggccactctaagggagaaggggacagtcaactagggatgggaagaggagatagagggaaggaagacagaaggaaaaggaggagggggtaggatgggagggagggaaggaggaatgatggaaggaaggaaggaggaaaggaaagaggggaggagggagaacggggctaaacctcagcagaggcaactgcagggcaggagctctgggaggtctgacagcaatgaggacgttctcaggcctgaggcagggtgagtggggcagagtgcagcggtggcagcaccaggccaggttgggcctggcaccccagtgagaactcctgcttctgctccgagggtgatggggagcctggaggattctgcgtggagaggtgacatgatctgcctggagcagaggccacaccagctgcagagctgagaaggcagcagggaggggaggtaggggctgctagagaccccagggagagcagtggggggctgtctgaggcagtcccaggggagaacctggagagactggacttgctgtgtgaggaaaaggcaggccttgggaaagaaacctacagcctgagcaaggagagggctggatctccacgcgccgagatggagaggtcttcaggcagcatgaggctgagggggtgagggcagctgaggaagtctgggccacagaggtaaaaaacagaccccgaagacatctacaacttaatccccaaaacctgtgactgtcagctcatatggccaaaaaaggagactttgaagatacgattaagtgaaagatcctgagagattaaccagaagggcc

SEQ ID NO: 40649 - DNA, 1121 bp, Artificial sequence
  DNA replication origin
aagaagctgaatcccaggggcccgaagaagaggaagttggtgacgagcctccagacctacgggggacgggcggtcaggtgcggggtgggtgggtcgggcccacaggtgcgcggcgcggggcggcctcacctggaacttccggaacacaaggtgcgggttgaagtagagttgaaaggggctgaggagctccagctgctgtggaaccaggggccagtcaagagctgcccgggagccacgccgtaaccatggcgaccctcacccctcccgccagaggctgtaaccaaggcgacgtccggtccgcccggccgcttaccaccgcggcggtggtgaggacacaggctgcggtgtaagcccgcgtcaccgccggcacctgcaggaactcggccgctagtccctgccacgccattgaaccttctcaagcacgcgtggcccagccagcaacgcgctctttaacccgcctcccagccccgccttcggccaatccgcatccgaggcgctgcgcgccccaggctgaaaagagagcccctgagcccgacagccaatggaaggaagaagagggaaattaggggcggaaagggagagtgggcgggtagaggctggtggccaatgggcaggcgccaaggttgagcacgtggcggttgttgtggctgcggtggtggcgcgggagaacgtgtggccaatgaggaactggtcatttcgcggctttctaggagaggaccagtagcgtggacccacgacaccacgggggcggggctaagatcgtatgggttacaggagcgaagacccgagcaggcgaggcaaaactggaaagggcggggcgcgtgggcggggcgcggagtgtggcggctcagaccgtgctggctcactaactgacgacctagccacaacgttgtcctcgctgccagcccaagacaggcccacctaacccacagcagggaggcattcgggaatgtgtccaaacctccccaaacgtccagggccccactcaaatgtgccggccgctgtcggggttcttccccgggggcccaaggaaggagaggcaggactgcgggattgagtccaggtggggcgcgagggttgagaggcgcaccagagcaagtggacaggcaggagaggtcctc

SEQ ID NO: 40650 - DNA, 1318 bp, Artificial sequence
  DNA replication origin
cggggcggctggccgggcagggggctgaccccccctcccccctcccggacggggcggctggccgggcagggggctgacccccccacctccctcccggatggggcggctggccaggtggggggatgacccccccacctccctcccgggcggggcggctggccgggcagaggggctcctcacttcccagtaggggcggccgggcagaggcgcccctcacctcccggatggggcggctggccaggcggggggctgatccccccacctccctcccagacggggcggctggccgggcggggggctgaccccccacctccctcccggactgggcggctggccgggcggggggctgacccccccacctccctcctggacggggcgtctggccgggcagaggggctcctcacttcccagtaggggcggccgggcagaggagcccctcacctccaggacggggcggctggccgggcggggggctgaccccccccacctccctcccggacggggtggctgctgggcggagacgctcctcacttcccagacggggtggttgccggacggaggggctcctcacttctcagacggggcggttgccaggcagagggtttcctcacttctcagacggagcagccgggcagagacgctccccacctcccagacagggctgcggcccagcagaggcgctcctcacatcccagacagggcggcggggcagaggtgctccccacatctcagacgatgggcggccgggcagagacgctcctcacttcctagatgggatggcggcggggaagaggcgctcctcgcttcccagatgggatggcggccgggcagagacgctcctcactttccagactgggcagccaggcagaggggctcctcacatcccagacgatgggtggccaagcagagacgctcctcacttcccatacggggtggcggccgggcagaggctgcaatctcggctctccgggaggccaaggcaggcggctgggaggtggttgcagcgagccgagatcacgccactgcactccagcctgggcaccattgagcactgagtgaacgagactccatctgcaatcccggcacctcgggaggccgaggctggcggatcactcgcggctaggagctggagaccagcccggccaacacagcgaaaccccgtctccaccaaaaaaaaaacgaaaaccagtcaggcgtggcggtgcgcgcctgcaatcgcaggcactcggcaggctgaggcaggagaatcaggcagggaggttgcagtgagccgagatggcagcagtaccgtccagccttggctcggcatcagagggag

SEQ ID NO: 40651 - DNA, 982 bp, Artificial sequence
  DNA replication origin
cagtcgccccgtccgggaggtgaggggcgcctctgcccggccgcccctactggaaagtgaggagcccctctgcccggccagccgccccgtccgggagggaggcggggtgggggggggggggtcggccagccgccccgtccgggagggaggtggggggggtcagccccccttccggccggccgccccgtccgggaggtgaggggcgcctctgcccggccgcccctactgggaagtgaggacccctctgcccggccagccgccccgtccgggagggaggtgggggggacagccccccgcccagccagccgccctatccaggaggtgaggggcgcctctgcccggccgtccctactgggaagtgaggagcccctctgcctggccagccgccccgtccgggagggtggtgggggggtcagccccccgcccggccagccgccccatccgggaggtgaggggcgcttctgcccggccgcccctactgggaagtgaggagcccctctgcccggccacgaccccgtctgggaggtgtgcccagcggctcattggggatgggccatgatgacaatggcggttttgtggaatagaaaggcgggaagggtggggaaaaaattgagaaatcggatggttgccgggtctctgtggatagaagtagacatgggagacttttcattttgttctgtactaagaaaaattcttctgccttgggatcctgttgatctgtgaccttatccccaaccctgtgctctctgaaacatgtgctgtgtccactcagggttaaatggattaagggcggtgcaagatgtgctttgttaaacagatgcttgaaggcagcatgctcgttaagagtcatcaccactccctaatcttaagtacccagggacacaaacactgcggaaggccaaggccgcagggtcctctgcctaggaaaaccagagacctttgttcacttgtttatctgctgaccttccctccactattgtcc

SEQ ID NO: 40652 - DNA, 1686 bp, Artificial sequence
  DNA replication origin
gatagaggcgagaaaacattttttgttgttgttttcaactaacccagtgtttctgaaatatgctacgtttaattaaattttgttgcctctgaattctgcttgcaaactggccagttattttctgagctaattcttcatgtcttacagcaagcttagaatatgcatctaacagcaaccagttcatgctttcaacatttggagttttctttgctcaagtccataagttcactgagcccattttctttcttccgtgttactgcactatataacatagcttttcatttctccagcctcatcgccgtcctctgcctcgtcttggaactgataccatatttcacaggtctttgttacggtagcaccaactcctggtgccaatttattgatcagctttctattgctgactaatagatgatcataacatctcggtggtaaagaaacaaaaaaagcaattatttagcctaagcctctaagtcctctgggctgggctgatctaggatggttctggctgatggctctgctgatcttggtcattcctgcaactgcagctcagctgggcattggctggctgatctagaatagtcccagtgagggtggcttagctgggcccctttggctgtccatgtcttgtcatcctcctggctagcctggaatgttctcatgaaggcagaagagcaagtagaagtgagcaaggcctcttaaggcttaggctggaacatggtacgccctcactgcagcctcatcctattggccgagcccagagccaggagcagggatgtaggcagtacttgcccctttagtgggaggaactgcaaaatcacacagcaagcagtgtgggtgcagggaggggtgaagaattgggtttgataatgtgctgcaatagtcatgtcctgtctgatatgtccgcagaaccctgcgtttctttctaaagccttttttcatccatggtggcaacaccgcaacagccctgagaaatgtcagggcaaggaagatcatctccatctgaccagggaggcaaacagagacagagagattgagagagacagaggcagagagagagaaacacacacacacacagacagacacagagacagagagattgagagagacagaggcagagagagagagaaacacacacacacacagacacagagacagagagattgagagagacagaggcagagagagagaaacacacacacacacagacacagagacagagagattgagagagacagaggcagagagagagagaaacacacacacacacacacacacagagacagagagattgagagagacagaggcagagagagagagaaacacacacacagacacagagacagagagattgagaggcagagagagaaacacacacacacacagagacacacacagagacagagagattgagaaagacaggcagagagagagagaaacacacacacacagacacagagacagagagattgagagagacagaggcagagagagagagaaacacacacacacacacagacacagagacagagagattgagaggcagagagagaaacacacacacacacagagacacacacagagacagagagattgagagagacagaggcagagagagagacacacacacacacagacagactcagagacagagagtgagccaagaaggaaaggaatggtgggatggag

SEQ ID NO: 40653 - DNA, 1312 bp, Artificial sequence
  DNA replication origin
acttcgggcccgagccaccgtcctccccccgccccgccccccagctccgttcaggagtcgcctccccagctcccagcgcggaacccctcgtccggtgggcacccccctcttcctgtcccctcccggcaaacctgggggggcttgccggtggcctgcgccagctgctgggtgagctcggagaggaacccgtccggcacggaggcgcggggcacgttggtgtttacgatgaacatcggcatgatggcagaaggaccaggagacccgcgcagaggcacagacgcacgcgccgcggccgccgctgagctacgtgcctgacttctcggacaccactgtggtcccgccttttgtgacgccaccgccggcgccaggccccgcccccgcgaggctgcggctccgccccgagtggggaagtcaccgcctgcctcggctcgacccccgcagggcaggaccctgggcgactccgcccgttcctccagcaaccgccgctaagcccggcgcaccgctccaacctgttctccacttggcggctagaaatcggcctgttccggcctcgcctcgggtctttcttagtcctttcactaagtcaccgatgttagtcgccaggaggcgctgtgccgggggtggggatgcggcggtgaacccggaagatggccccttacccttccagagatgaagcccagttcattccactgcacgcactgagcccctgtacctcctgtctttgggccacatgtcctcaagggctccagtcccgcatgcgtgagcttgtgtgtttgagatggggcggggtagtcatcgcggcaggtgagaggggagctgcccctgcgaatcaccatccagggaacttccctgaacccctgctctttaaagaggataggatgctgggaggcaccgaagggaaggaggcgaggtccagagcaggttcagtggttcaaacgtgctcagctccccttctctgggcctctgggcaacttcagctcctcagggaagccacaccctagtcaggtccaccgtgtatggcctctcatagagcccttggtgaatttcttaaatgtcttttccactaatggtaaactcggggaccatctagcaggtgccaggcatacaagagacattgactaatactgctgaatgaatgaatgaatgaatgggtgaaagaagataagccatgacatagcaggaagaggacaaggcagcaactggatcacaggccaggtcctcagagatttccagggaggtcctgtccttggtctctgataggtgcaatccatataccagtctcagtgaaggccatgtgatataggaaggacac

SEQ ID NO: 40654 - DNA, 1691 bp, Artificial sequence
  DNA replication origin
cacccagcagctggcgcaggccaccggcaagcccccccaggtttgccgggaggggacaggaagaggggggtgcccaccggacgaggggttccgcgctgggagctggggaggcgactcctgaacggagctggggggcggggcggggggaggacggtggctcgggcccgaagtggacgttcggggcccgacgaggtcgctggggcgggctgaccgcgccctttcctcgcagtacatcgcggtgcacgtggtcccggaccagctcatggccttcggcggctccagcgagccgtgcgcgctctgcagcctgcacagcatcggcaagatcggcggcgcgcagaaccgctcctacagcaagctgctgtgcggcctgctggccgagcgcctgcgcatcagcccggacaggtacgcggagtcgcggaggggcgggggaggggcggcggcgcgcggccaggcccgggactgagccacccgctgagtccggcctcctccccccgcagggtctacatcaactattacgacatgaacgcggccaatgtgggctggaacaactccaccttcgcctaagagccgcagggacccacgctgtctgcgctggctccacccgggaacccgccgcacgctgtgttctaggcccgcccaccccaaccttctggtggggagaaataaacggtttagagactaggagtgcctcggggttccttggcttgcgggaggaattggtgcagagccgggatattggggagcgaggtcgggaacggtgttgggggcgggggtcagggccgggttgctctcctccgaacctgctgttcgggagcccttttgtccagcctgtccctcctacgctcctaacagaggagccccagtgtctttccattctatggcgtacgaagggatgaggagaagttggcactctgccctgggctgcagactcgggatctaaggcgctctgcccgccggaatccgttgtacctagggccaccacgtggggtgctggaggtgagccgaccacggaagagggggaggaggagttggagttgggaggagtccgaggtcttctaggcctagacctttctctcagccccaccttccccagccttcttgttgggcagagggtagccagaggacagaaagatcccacccagagccactcactgccatccactttgttaggtgacttcaggagagttttcaggcgggtgggtgggggaggtgcagagttcttggtcataccgccccgtccacccccgaaccccacgccttgggttctgctcccctcagacacccaccaagcctccgccacagcagttccctgaggaaattgggcgtggggtttccattgggaccgttcgtgttctgtggtgccacagacatgtctgtaaaaccttcagttatgtttgggcgcagtggcacaagcctgtgatcccggcactttgggaggtggaggtgagtggagtgtgactcctctgcttctctcagtctccagccacatctcgtctccagtcccctgttcactcggtcatcccgcgcagtactggacagcgagctctccttccagaagagcaatggggctgggtggggtgaagattaggaagaggaaggagaatagaagctccagggagtctggaagggtggcacccatcttgggatggggcaccccttccatgaaggtctctaaagcaaggccctcctca

SEQ ID NO: 40655 - DNA, 1296 bp, Artificial sequence
  DNA replication origin
cactggcctcctagcacttcccggctccatctggagacttctaagtagatacctaaccacacttcctcattgtctctgtccctgcctccctatccactgccatcaaggctggcacatcaggaacaatagtgccctccgaggaaggggtgagggagagatttcacaatttatcaagacctgagtgcaggcacaggccacctgctgtctcctcccttcccatggcattccttggattaaccgtgcctctgaggatgtgagatgtccctgtcatgcctccgtgattgagtatgtgggaaggacttctgatgaatcccttcatttcacagatgggaaaaactgaggccagtagaaggagcagagtgggagcctgatcctgatcttgctggaatcgggctcccagaagggagtggggtctggaggctggcggtggggggtggtggggagggagtctctgcaacaaagcaaaattcctggaggggatgaggtgggacacatgcagggtgggaagtcttgggaaaagcctacattgctgggctgtccagaatggacaagtaccgaggggcccctggtgccaccagcccaacggatcacagaactgggtggagctatgtccagaaatggaaacctcagctaacaggacctgggctgaagcaaaggggcctgtgggtgttgaccaggtggcctcagggaaggtatcccagaagaatggtgtgtgtgaggcttatagtggacagatgggggacaggccttgaacctacaaaatgaggttcaaggcctgccaggctgtctgtctgttgcaaacagtggccctgaggagagtgagggtcaccctgtaggccgggggtctttctcagcagatgacatagtaccaccagagtgatggagaacaggcagatggaccccacacctgtctgtcctgtacctcagagtttgtggcgttacttggaaatgcatttccaaggctgaccctgcaggtcctggggcagtcaaacaggggtttgaggaagagacccaccacctggtgggcagtggagcctgtgctttggaggaaatggagctggccatgggatgggggtcaatgggggcaggtgtggcttgaaggtgggatgtagcagctgacctccccagcaggcaggccggttattagtcccaggggacttaggaacactttgggcagggcaagcggataggtccctgacccacagacaccccctttgttcctggagtccaaggacccatgaccttgtggatgcccccagggggccacagaacctcagacactcacctgcttttgga

SEQ ID NO: 40656 - DNA, 1041 bp, Artificial sequence
  DNA replication origin
acctctctctacacagacacggcaaccatccgacttctcaatcttttccccacctttcccccctttctattccacaaagccgccattgtcatcctggcccgctctcaatgagctgttgggcacacctcccagagggggtggtggccgggcagaggggctcctcacttcccagtaggggcggccgggcagaggtgcccctcacctcccggacggggcggctggccgggcggggggctgacccccccacctccctcccggacggggcggctgccgggcagaggggctcctcacttcacagacggggcggttgccaggcagagggtctcctcacttctcagatggggcggccgggcagagactctcctcacctcccagacggggtggcggccgggcagaggcgctcctcacatcccagacggggcggcggggcagagccactccccacatcccagacgatgggcagccgggcagagacgctcctcacttcctagatgtgatggcggccgggaagaggcgctcctcacttcccagatgggatggcggcagggcagagacgctcctcactttccagactgggcagccaggcagaggggctcctcacatcccagacgatgggcggccaggcagagacgctcctcacttcccagacggggtggcggccgggcagaggctgcaatctcggcactttgggaggccaaggcaggcggctgggaggtggaggttgtagcaagccgagatcacgccattgcactccagcctgggcaccattgagcactgagtgaacgagactccgtctgcaatcccggcacctcaggaggccgaggctggcggatcactcgtggttaggagctggagaccagcccggccaacacagcgaaaccccgtctccaccaaaaaaatacgaaaaccagtcaggcgtggcggtgcgtgcctgcaattgcaggcactcggcaggctgaggcaggagaatcaggcagggaggttgcagtgagccgagatggcagcagtatagtccagcttcggctcggcatgagagggaga

SEQ ID NO: 40657 - DNA, 939 bp, Artificial sequence
  DNA replication origin
atgtgaggagcccctctgcctggctgcccagtctggaaagtgaggagcgtctctgccctgccgccatcccatctgggaagtgaggagcgcctcttcccggccgccatcacatctaggaagtgaggagcgtctctgcccggctgcccatcgtctgggatgtggggagtggctctgccccgccgccccgtctgggatgtgaggagcgcctctgcccggccgccaccccgtctgggaggtgaggagagtctctgcccggccgccccatctgagaagtgaggagaccctctgcctggcaaccgccccgtctgtgaagtgaggagcccctctgcccggcagccgccccgtccgggagggaggtgggggggtcagccccccgcccggccagccgccccgtccgggaggtgaggggcacctctgcccggccgcccctactgggaagtgaggagcccctctgcccggccaccaccccctctgggaggtgtgcccaacagctcattgagagcgggccaggatgacaatggcggctttgtggaatagaaaggggggaaaggtggggaaaagattgagaagtcggatggttgccgtgtctgtgtagagagaggtagacatgggagacttttcattttgttctgtactaagaaaggttcttctgccttgggatcctgttgatctgtgaccttacccccaaccctgtgctctctgaaacatgtgctgtgtccactcagggttaaatggattaagggcggtgcaagatgtgctttgttaaacagacgcttgaaggcagcatgctccttaagagtcatcaccactccctaatctcaagtacccagggacacaaacgctgcggaaggccgcagggtcctctgcctaggaaaaccagagacctttgttcacttgtttatctgctgaccttccctccactattgtcctatgaccctg

SEQ ID NO: 40658 - DNA, 883 bp, Artificial sequence
  DNA replication origin
aagatcacaccactgcactccagcttgggtgaaagatcaagatcctttttcaaaaacaaaaacgggggggcacgatggctcacacctgtaatcccggcactttgggaggccaatgggggcagatcccttgaggccaggagttggagaccagcctggccaacatggtgaaaccctgtctctactaaaatgaaaatacaaaaattagctagttgtggtggcacacacctgtaatcccagctacttgggaagctgaggcacgggagtcacttgaacctgggaggcagaggttgtagtgagccaagattgtgccactgtactccagcctgggccacagagcaagactctgtctcaaaaaaccaacaaagaaaaacacatgctgaaatacgagggtaaagggagcaaggtaaatctgaagaaaagagagtagggggttgcaactggaagaagggtgggggtgattggggagtgatgaggcagccagagacactgtggagtccacgtagggtagcccctggaggtgcagggaggttatggacttaatgcttaagattaggcattatataagccagggcatgaaaggatccatctctctggtgctggatggagggtgagcccgagggggcagaatggacaatgagggggccagcaactatcgggaaggttgtggtgtctgggaatgttggaggccatggggacagagggaaggggatggaggggagacatgcttcggaggggatgtcctaggccttgctgattgatggctggtgtgggaacctccgcagaacaagggctcctttatcatcaccagcagcaaccatgccaaggtaaaaaggtcagggcatggagagagctatcggttaaaaagtggcaggagagacagcaa

SEQ ID NO: 40659 - DNA, 1613 bp, Artificial sequence
  DNA replication origin
attctaggcacctcagggcggcggcgagagccatgaagaggctcgcgaggcagccaggaagcccggcctcggtttccctgactggggctctaaagctgcccgcgaaacccccagcttcctcacgtaacccagcctcgcgcctgcagcccctccggcctgtgccccgggctctgctgagcctcacccccaccccggcaccgccttcaaaccagccttccaggaactcaccaggcgtctccacagcaacggccagtctgtcccgaccaccgcgccgtccggctgcgcgcctgacaacaaggcgtgctcccattggctccggtgccggttgtgccagccaatcagcgggggcgcacgcgccgctcgctctccgcgggctgcttagctggggccctgcagacggctacccttgggcggcgcgcgcgcgcgtgcgcgcgtgtgtgcgcgtgtgtgcgcgcgtgcgcgtgtgcgtgtgcgtgtgtgtgtgtgtgtgtgtgtgtgtgtgtgtgtgtgtgtgtgtgttgcgggagtggagcttgttgtttccggatccccgtcgtcagtcctagcgtgctggaggcttagagcaccagctcgtagtcggactctcttctccacagcttgcaccctgagcagtcactaaatgatgggctgtgtgttattacctgggacatgtgctctgaaaacagtggaaacttggggaacacttagagcggggtgtccaatcttttggtttccctgggccacgttggaagaattgttttgggccacacataaaatacactaacactaaggatagctgataagttaataaataaataaataataaaaataaaaatcaccaaaaaatctcaaaatgttgtaagaaagtttatgaatttgtgttgagccgcattcaaagccaagcagaccagcgcgttggagaaacttgacttagagggaaccagggaggaggagcatcctcattcattatattacctgtgcctctctttccaaaaaggatgtgaagcccaaaaggaacagatacaataggatattgaaacaaaaggaaaaaaaggaacaaaacctagtaaatgaacaagaagaggggtcatgggtggtgtcagaattccagagatgaaaaaaggcgacagagttgaaggggttctgtcaagggtcttgggctgaaagatggtactctcttgggagctagaataacaataaagcattgtagggaagaactttacactgtggttgaattcatagctgcttgagtcttgcacagatgattcaaataggagtgaatgttgggggctttttaacctcaaagacagtaacagcatggtgaaaaactcagttcagtacaataaagctatactgataagctagaagttctgaaaattgttgagtcaccaaccttgactttgagtattggggtaaacagtatttggggggtaaacagaagcataaacagatggtttcaaagctgcatggataaccttcagcctcggatacagcttccactcaagccttatcatgaaagatgcgctggagagaaacagttgaaaataggtgggaagggtggtccaagcagcaagaaagttgtgtggggaaggtccggaggtgagaaacatgca

SEQ ID NO: 40660 - DNA, 834 bp, Artificial sequence
  DNA replication origin
gtgaggagcgtctctgcccggacaccatcccatctaggaagtaaggagcgtctctgcccggccgcccatcgtctgagatgtggggagcgcctctgccccgccgccccatctgggatgtgaggagtgtctctgcccggctgcccattatctgagatgtgaggagcgcctctgcccggccgcgaccccgtctgggaggtgaggagcgtctctgcccggccgccccgtctgagaagtgaggagaccctccgcctggcagccgccccgtctgagaagtgaggagcccctccaaccggcagccgccccgtctgggaagtgaggagcgtctccgcccggcagccaccccgtccgggagggaggtggggggtcagcccccgcccggccagccgccccgtctgggaggtgaggggcgcctctgcccggccgcccctactgggaagtgaggagcccctctgcccggccaccaccccctctgggaggtgtacccaacagctcattgagaacgggccatgatgacaatggcagtttcgtggaatagaaaagggggaaaggtggggaaaagattgagaaatcggatggttgctgtgtctgtgtagaaagaagtagacatgggagacttttcattttgttctgtactaagaaaaattcttctgccttgggatcctgttgatctatgaccttacccccaaccctgtgctctctgaaacatgtgctgtgtccactcagggttaaatggattaagggcggtgaaagatgtgctttgtcaaacagatgcttgaaggcagcatgctcgttaagagtcatcaccactccctaatctcaagtacccagggacac

SEQ ID NO: 40661 - DNA, 1055 bp, Artificial sequence
  DNA replication origin
tttttcttagtacagaacaaaatgaaaagtctcccatgtctacttctttctacacagacacagcaaccatccgatttctcaatcttttccccacctttcccccttttctattccacgaaactgccattgtcatcatggcccgttctcaatgagctgttgggtacacctcccagagggggtggtggccgggcagaggggctcctcacttcccagtaggggcggccgggcagaggcgcccctcacctcccagacggggcggctggccgggcgggggctgaccccccacctccctcccggacggggtggctgccgggcggagacgctcctcacttcccagacggggcggctgccggttggaggggctcctcacttctcagacggggcggctgccaggcggagggtctcctcacttctcagacggggcggccgggcagagacgctcctcacctcccagacggggtcgcggccgggcagaggcgctcctcacatctcagataatgggcagccgggcagagacactcctcacatcccagatggggcggcggggcagaggcgctccccacatctcagacgatgggcggccgggcagagacgctccttacttcctagatgggatggtgtccgggcagagacgctcctcactttccagactgggcagccaggcagaggggctcctcacatcccagacgatggcggccaggcagagacgctcctcacttcccagacggggtggcggccgggcagaggctgcaatctcggcactttgggaggccaaggcaggcggctgggaggtggaggttgtagcaagccgagatcacgccattgcactctagcctgggcaccattgagcactgagtgaacgagactccgtctgcaatcccggcacctcgggaggccgaggctggcggatcactcgcgattaggagctggagaccagcccggccaacacagcgaaaccccgtctccaccgaaaaaatatgaaaaccagtcaggcgtggcggcgcacgcctgcaatcgcaggcactcggcaggctgaggcaggagaatcaggcagg

SEQ ID NO: 40662 - DNA, 1634 bp, Artificial sequence
  DNA replication origin
gcccacctgacgctgaaccgggtgccagcccgccctgggcatgggggcgcagcaccccgccgccggccgatttcctccgcgggggcgccggggaaaccacagcccacgggcttcctgctgcgcctggtgcgccgaggcggggggcggccgccagagcccaccaggggacgattgagcaaaagcgccagcaaagtggagacccagacgggcagcggaggcgaagcggttgcgcagccccagccccggccccagtcccggccccagtcccggcccccgcccccgccaagttcctacccgccggctccgccgtggcatctgtgcagtggagctagggcgagcgccgggccatggccgcggaggctcgttcgctctctcgctcgcggcgggccggggcggggcaggcgcggccggacggggcgccggcactctactggaagcgggcccaggagcgcaactgacttttgccggccaatcctctccggttccctggactggccgctggtggcgggctgtggaccgctgccgggcaaagtgggtgcagctctcactgcaggaagctgtggggccccagagagcatggtgtaggggtggccaggagtgcggcaggccgggatggcattggccaactgtgtgtgagggttatatcccccctctgcaggcggtgcctatgtgaatggcgccccctggagttgtgccagtagtgccctgtggcaggcagaagtgtaggtgtgtgggggaaacgactggccacagccgagctgtccttgctgttacagttgggcaggggggctgcagtgaagaccgctggagtaatgtcctcagggcggagggcaaaaaagagatgccatggtaagtgggttttacagctggaaggggcctcatcttccagctaggctgtgaggcccacagagaaagcactgggtttgaggggtagggttgggagtagtaggcagctctcaggacaccccttcccccagtttcagtattccaagaacagcaacagtaccccatccccaggacatgagcagctttgcagagctcagggagggtcgctctccggcctggaagcgggtactgtaccctgctacagatgagaaacaggctcaggaggggagggcctcactcacagcgtctggccaatgcccctggtactcacagctccagtgtgcacacagcatcttcctgatttcccatgaaggtaggctgcactgggacagtctaccaactcctggctgctcctcccactccagctgaggggaggccaaggaaaggcagggatgggccaacctgcacgggctaggtgagagagatgctgccccaagccctggcttacccacccccaaccctttgcccccatgagcttctctcttatcacatagcgagcttctctcttatcacatagcgccgttcctccctccacagacacccaggggcctcagacccatttagcccctatcctggtgacacctgtcctagtgacatctcctctctgagctggctggtttccacctggcctacccctgggctggttcctggagccagcggtccaaggcttactctgtgccccttccaggtacccctagtccaaatcagccccaggtccaacctgccccttcagcctgggtaatgtcaca

SEQ ID NO: 40663 - DNA, 1064 bp, Artificial sequence
  DNA replication origin
cttcgcctccgctgcccgtctgggtctccactttgctggcgcttttgctcaatcgtcccctggtgggctctggcggccgccccccgcctcggcgcaccaggcgcagcaggaagcccgtgggctgtggtttccccggcgcccccgcggaggaaatcggccggcggcggggtgctgcgcccccatgcccagggcgggctggcacccggttcagcgtcaggtgggcggccaagccggcttgggcggcggcgcgcgggggcggcaggcgctggtgaagcccgcacacgcgccagcgcatccagccctaccaagccccgggctgggagctggctcgtgggggcgtgcgctgcgcgaaagcgaaagccgcccgccagagcaactttgcggcggaaggcgccgacgaggagctgtgccgtgccgctcttggggatggtgagctggccgcccggccgggtgggcagcgcgtccgggcgcggtgcttcgctagctataaataggtgctgtgcggggacaggaagatggttccagccctttacaagcaccggcccgttatgtgcgctgggctaggaccttgccccgcagcggagtgggaggagtgaggttaggggtaacggttgcatgggatggggggtgggcacatagagcctacagcagagttggcggcggggctctcccatgcacttggttgtttgtcgtttctgcttttcccgggagggggaagggaggaacagcccggcagttctggggaccttagcgctccacgtcttatttggcaggagaggctggaaacgagcgggcgccagctgcaggcaaattgcaggctttcccagcccttgtctgcagagagaatcattacctgtggatggcgcggggaatcccttgccctcagtagccccgcctggagagacaggaccgcgttgtggggggtggggtgtaggagtgggcggaggccagggcgcccctggtggcctgtgtacaaccctgcggccagagaggcccgccctgataggtttgtggtagaagctgcaggaacttcctgtccctaggggtgttcaacctggcctgct

SEQ ID NO: 40664 - DNA, 978 bp, Artificial sequence
  DNA replication origin
cacgtcttatttggcaggagaggctggaaacgagcgggcgccagctgcaggcaaattgcaggctttcccagcccttgtctgcagagagaatcattacctgtggatggcgcggggaatcccttgccctcagtagccccgcctggagagacaggaccgcgttgtggggggtggggtgtaggagtgggcggaggccagggcgcccctggtggcctgtgtacaaccctgcggccagagaggcccgccctgataggtttgtggtagaagctgcaggaacttcctgtccctaggggtgttcaacctggcctgcttctggggcccctttcctcccaaccttaggggaggaacaggactgcgggaggggccagaccctcagctcctcagggcatcaggaagatagggagctgctggtctggaaactcagtcctgcctctaaaggcttcgggactcctgagtagggaggctccagaaggggcaatctgggccagggctcggaggggtgctgcccagccggcctggctctgtctgtgatgctcatcttccttagggacaagccgggtagagtgcaaagagcatgataggcttagttcagctgtagtcttggctccctgcaggctggctgccctggaacaagtctctcccccagcaaggtgtaagtgaaatcatgtgttaaaggagctgggcaggcagcctgtgaagacggttggccccaggagatgaagtttgccctacacgccccacgccatcccctccttttcctccaagctgtttcgccgctttggtgacttgtgtgggtttgtgggtaacaggggtctccccaggactgtagaggattttggtattttccccacagctgctcctgacctcagggccagattccatccccttcctggctccgcttgaggtgcttaagaataggctggaaccaggaggaagtttttatgcttttctgggggggcggggaggcccctaatctcctct

SEQ ID NO: 40665 - DNA, 1468 bp, Artificial sequence
  DNA replication origin
gtatgaccgcaggaagtatctgcgagatgctgaccgccaggtcctggcgcagcgggccttcatcctcactgtgaaggtgctcgaagacacgctgagcgagctcgcagaggtatgccacctgtgtcctcctctcctccacggcccatgaacacgcttccaagcccttcccaggtggtgggcccgatccctctatttgcatacccttaggcaggatgtgcctaagggtccccatctgtgaggtagcacccatcctgtcttcctaggcagggaaggtcagccgtggtaatgaatgcacatgaattcagtgagtcatggatgcacttggtgattagtaagagccatagtgactccatgaaactgagctccccaagggctgcaccacccagggcggggtcccaagccctctccctggcaggctgaccaaggcctatgagaacaccatgtgtgtgcatcgtcccttttcagccttgaggcaggtgcagcagtacctccttctcacagctgagcacctggaggaggccagggaggttaagcagccagcctacgaggtggggctgttgggagttgagccaggactgcctccaaagcttatgcctggtagggctggctgtggcttggtagagggcatcaacttgaggctgttggggaggagtccttgccagcccccaaccccaggcctcgtgcattaagggccaggaagacttggctctgcagcaaacatgcttggtggccctgggcaggtcccctcccataaaatgcccagagctgcccggagttcacgtcatggagtcaaaggggagctgggcaatgctgccccagctcagcccaggcctgttattcaggagcagtgccacctccagagtcccgtcagccccttgctacctggaagagtgtggtggggtagccagaggtgcagaggagggaaggcctttctcaggcaggtctctgggcccagtgtccttctctgataactgaaacacagccctggccagctggcagatgtccggagccacacagatgtcaggtgggagaggcccaggttgggctcaccagcccccagaggtgactcattgcagtggagacaccagcgacacagcttcttacctttggtttctttgtaggggtcagaacgcccagggcccaaggtctgtggcctccccggagccaggatgaccaccgatgtctcacacaaggccagtcctgaggatggccaggagggcctcccccagccgaagaagccccctctggctgatggctcagggccagggcccgagccaggaggcaaagtgggcctcctcaaccaccggcctgtggccatggatgcaggagacagtgcagaccaaagcggggagcggaaggataaagagagcccacgggcagggcccactgagcccatggacacgagtgaggccactgtttgccactcagacttggagcggacaccacccctgctgccaggtcgccccgc

SEQ ID NO: 40666 - DNA, 1358 bp, Artificial sequence
  DNA replication origin
ggaacatggcccgtccagggcgccacagcgcatggagcagctctcttgggcatctggaggagaggatgctgagggcctggcccggcgggtactggactggctgccccatgtgcagggcctgtctctgtttctcccacagcccattagacagcagcatccccaggagaacgctggccaggaactgcacaggccaccaggtggacacagtagaaagccacagggcccgtggggatgggatgaatcttagcacagaccatctggctgttgccctgactgacgggctagaatgcagcgagaagaggcaaaaagctgcatccgctcagccctgcagggtcaggagaagcccctgggcatgactgcccttcagccaccaagtcctctatcccacaggcaggggtcctcagtgggccacggtagctggagccctcgacctctcttggctccccagggtgtctgtggtcagcacgccttctgggggccctgaagcctgcagaagaacccctcttgcttgcctggactggggtgggggatatggctgccaagagtctcatttgaggcctggtagggaatggtgcagggtctgaacgtgacacttctcgctctcccaggggctgcaattgagaccccaaagagagctccgtgctcagggcagaaggccagggccgctcccctcctttctggggagaggagggacatttcaagcaggggtcccagcagtggggaaagggaagtgggggtgcacaccacaaggggctgtgggcgccgggcccaaaacttctcctatgggccataagaccggtgggcaaggccatatttccaggggctggcatgaaggaagggttgcagggagggactggggcaggtgcatgcacccaggctggaattgcacttccctggcccttccccatcccccatcaaaagaggccagtcgagggccaggcctgggcctgagccaccccgctggccccacttcaccaagtgcagtgcctggcacttaaaagcaacaataaatatgtactggccaaggatttggtggcgcacaggggtcgggggaggaggccgagagatgcttgcaagtgagataagtggcaagagggtcgatgggaaatggggtgggggacggggggcagcctgggaccagtgtcctggttctggagttcggggctttccctagactttcctggattcagccccaccctgatgaggacccacaatcctggctccccctccgtgatcccgccctgtcagggctggggacacaggcggaggcctctgctggtctcccccgcctccctcctagctaccagcaggtttagggtgggcccggctcagacctcccatccccatgggctgcccct

SEQ ID NO: 40667 - DNA, 1277 bp, Artificial sequence
  DNA replication origin
gtggtgatttgtaatggcagacacaggacactaatattaagccagcgcaggcagccccaggcctcagcactgccagaacccccctgcaggctgccttgggctaggctggcttcgctcccccaggtgcacgcccctgacaggcagctcaccacccacacagcccacctgcttctgtgtctgggactggtcacccagtgggaggaggactctggacgaatgatatcacgcccttcagcaaagcctcacgtatgggtcgagctggaggccagctctaaaacccaccatcctgattggtttccacagctctgtcttcatattgtgcatctgtgaacccggtttatggaggaggaggctgagctgggccttggctgggcttgggcttggagtctgagttcccgggggccgggggtgcgggggagggggtgggcgccagggctctgggcaggggctttacctcttagcacgttgaggataaagctgagaatggcaccccctgcaggcggcggtggtgagtacagggtatagtcccccaggggcacctccagggcatccaccacctcgggctggaacttggccaggtcctgcagcgtcagctggctccctgggatgagaaggagagggctccatgaacagatgggaaactgaggcggggaggaatagccactgctgtcaggtcacacaatgggattccactcatgcttttgccttgtggacacaggatgatggtaggtctgtaggcagtggcctcaggactggccccttggggccaggcgtggaggggtggacagagaccagaggcagggaggctggggaaaagaaagggaagatgggagagggagctggcttatgagagcctgtgagaatggtcagctcggctacccagacctgccgtgaccatcggtaacgcccctctgctggccctaacccgcaggctctgctctctgaggtcctggaccacaggggtccttgggccggcagagctaggtgcatggcctctcggggtcccgggcactgcctgcactccctcagggcctgggaaggagcctgccctcaacccccagtgcccagaacttggctcttcctccagcagggatggggtatggaacctcagggaggctgaccttccttggcaatgtcctccaccagcatctggcccagcctccccgtgtagaagacctccacgccctctgtggccacggtctccagggtggtggccagtgcaggccatgggagtgggtcctgaggcctcaggggttctgtcccgttgaagaagagct

SEQ ID NO: 40668 - DNA, 1519 bp, Artificial sequence
  DNA replication origin
gaagatgggcttgtccacaccactgcgtaaccccttctccagccagtcccatcaactcaagcccgtttctgggtgttcttgggccccctgccctgccccatttgcctcagctgtgcaaagcccttgtgtcaactcctgtccctgtgttagcccagagtccatctcataatgcagagatggaaactgaggcctagagcaggccaggggctgtctgcagggtccatgaccactcacctgccctgccctactccagggaaggtggaggtcatcaatgcccgggagacggtgccggccagccacgccccgagcctgctggaccagtgtgcacaggctctgccactgggcacaggtgacgccccatggaggtcccccactcccaccccccaggccactaggactaatcagaacacccccgcaaaggagcagcgcctcacggacaggctgtgactccctggcacggggggacacggagcctgtggggaacccccagccccaacctgcagggattgagaaggtcccccttgggaacgggctctctgaggtgatccagggagagggaccaggctggacaaaggcctggagggttcagtggagatgggttggcggggcagggtggggctcctggggccagtttgtgtagggccccttgggcttggccatggactttgtggggagccacaggtgatttgagcagggagggacgtggtcgggtgtgggctccagaaagctcactctggctgctgtaactggggggccacatgtaggggtgatggcaaacctgggaaggcctggaagccacagggttgagagctgggatgtgccatgcaggggcccagtggatcggggtgcccggggagctccgtggctatgccgaggcccaccgccgccatggccgcctgccctgggcgcagctgttccagcccaccatcgcgctgctccgaggggggcatgtggtggcccctgtcctcagccgtttcctgcacaacagcatcctgcggccttccttgcaggcgtcaaccctgcggtgagccccacatggtggccctgggttcctgggttcaaggccatatcctgtctgggcccagtccacaccccagctctgcctcagtccctcttacactggaggattgaccctcggggtgctggccaggacaaagagtacttttcatggcccttccagctccccgtggcagagcctaacttggggttaggctgcggggagtttattgcccaagtgataggactccaaggtgtggatttgggctctgccacccgccctggggccccggcctccttcttcctctctctggcatggcaggagggcttcaactgccactctcacctgccccacccagcccactgacaggccctcccaggagtgagatgacaggccctaggtggacccaggccccactgggaaatttgccttccctggaccagggccatgagctgggtgagtggtgtcagtcccaccacctcctagagaatcagttccccggtgtccaccccagtgcctcgg

SEQ ID NO: 40669 - DNA, 1158 bp, Artificial sequence
  DNA replication origin
ccatggccaagcccaaggggccctacacaaactggccccaggagccccaccctgccccgccaacccatctccactgaaccctccaggcctttgtccagcctggtccctctccctggatcacctcagagagcccgttcccaagggggaccttctcaatccctgcaggttggggctgggggttccccacaggctccgtgtccccccgtgccagggagtcacagcctgtccgtgaggcgctgctcctttgcgggggtgttctgattagtcctagtggcctggggggtgggagtgggggacctccatggggcgtcacctgtgcccagtggcagagcctgtgcacactggtccagcaggctcggggcgtggctggccggcaccgtctcccgggcattgatgacctccaccttccctggagtagggcagggcaggtgagtggtcatggaccctgcagacagcccctggcctgctctaggcctcagtttccatctctgcattatgagatggactctgggctaacacagggacaggagttgacacaagggctttgcacagctgaggcaaatggggcagggcagggggcccaagaacacccagaaacgggcttgagttgatgggactggctggagaaggggttacgcagtggtgtggacaagcccatcttccccatggcagttcacatgtgggcccacctgttgtcacattgtagatggtgaagatgacccctccgcccaggcccatgctctgagggttgacgacgctggtgcagaccagagccgcgatggtggcatccacgggtgagccctgctgctggaggatggctctaggggacatggcacagagtcgctgtggggctcccctccccctgcctccccaccaggcttgctcagctggcactcattggagaatggtgacggaggcggcacgtcggctgccaccaaaccgcagattaggttgcagaacacaaccaggcttccccatcaaatccagctgctcacaggtccacaacacactacggttgcaaagtgtgatgccatttacactgacctttgccatatacaaggtgcttctcagtttgcaaagtacttctgttgccattgttcccagcagcaccagctcatatgctacaggcagaacgaggcctcggccacctctcagtcc

SEQ ID NO: 40670 - DNA, 1715 bp, Artificial sequence
  DNA replication origin
gggtccacactcacagaaagcttaggagcttgcacccaggggctccggctgtagcagaatcccaagaataaaacctagtgctgaaagagtaggagatggggctgggtgccgtgactcactcctgtaatcccagcactttgggaggcggaggtgggcaaagcacgaggtctagagttggagaccatcctggctaacatggtgaaaccccatctctactaaaaatacaaaaattagctgggcgtggtggctagcacctgtagtcccagctactcaggaggctgaggcaggagaatcatttgaaccaaggaggcagaggttgcagcgagccgagatcatgccactgcactccagcctggtgacagagcgaaacagcatctcaaaaacaaaacagaaaaaagagcaggagactggactctgggagggcctcctggtgagaggtgagcacagaggggagagatgatggagtcaggagcatgggcttctggtggccccagcagaccctgtggcagtgtggccaggggcctctgcaaggagggatcttggccaggatgacgctgcagcaggcctcttcctgaggccccccagccagtccggccagggtcccagtgtccaatgacccctgttccgcagcagcagctggggccagccccaggctctcttccactcccagcttcttaagacaggaagtggagagagttgtttgacaaaacactggggcaaaccacatcctctctcttcaagggacagtttgaggggatgccagcagagggagctttagagtagagacccctacccaaccagtgaccgtcacgcacacagcagggcacgctatggagacccccagacagtcactcagggagacccagcaggtccagactccacctagaaatttgtggcagcaggtccccactcccaaaggccacatgcccacgggtggtctctggtgcctgagactccagtctcatttgcatctttgcaacttcgagtttaagtgggtgtcgcatcctgaatgtcctcctgagcagaggaggggcacagcctggggtggcggctggcgtcaatccctcaaatcccctgagagccactggggagactaagcagtccccagccccgacttgtccctgagctgccattctcagccctgtgggaggagacagaaagacctgaagagaaaccaaaggaccaggtcaggaggggcggggggtggcatgagaaatcagggcagggaaggatggacagatgggggaatggagggaagaaggaatgaatgaaaaggtgaatgaatgaacagagagagagagcagccactcctcccttgctttaatttacaaagcactgggatcctcccaacagcctgcaagacagaacttctgggaagcagaccaggtggctggcagggaggggaggcttgccctggcttttgtgggcccagtgggaggcagggagcaggaaggggcatcctgtatgtgtcctctgcagcagcagcagcggaggcctcccttgggctgggcttcctggaagagggtcaggaaacacccgctgtggcccctctccaccacgccctcatccaggacaccaagtatcagtcactcagctcacgagacccaggccctgactcagggagagaggatgtgaggggtggggcaccgggctcctcaggactgagagacccgagatgtggccccaggctgggtgttggggcagactggctatgg

SEQ ID NO: 40671 - DNA, 1036 bp, Artificial sequence
  DNA replication origin
ccactccgtagtgtgcacttggtgagggcagcagctcgccacagctgccagccatctgtccattcacccatctgtccatctggcagcccgctgttcagacctgtctgtctgtccgcccatctgtaagcccatctctgtcccattgtctatctgaccatctttctcttactgtcctctttgtctagctatctggcctatctgtcgatccatcttcgtgtctgtcttcagcccccacctgtttgtccatctgtccaattacctgtgactctgtgcatcttcttgtccattcatctgcccacccatccgtccctccgtctgcccaccagccgcccctctcctcctgggctgcagagccatggcccggggctacggggccacggtcagcctagtcctgctgggtctggggctggcgctggctgtcattgtgctggctgtggtcctctctcgacaccaggccccatgtggcccccaggcctttgcccacgctgctgttgccgccgactccaaggtctgctcggatattggacggtgagtgagacgtgggaggaagctgggtggcccttggcagccagcccctcctggagaaggcgtgtgtgtgtgtgtgtgtgtgagtgaatgtatgtgtgggtgtgtgtgtgagtgtctgggtatgtgtgattgcatgcatgtgtgggtgtgtgtgagtgtatgtgagtgtgagtgtggggagtgtgggtgtgtgtgaatgtgtgtgattgtgtgtgggtatgtgtatgtgtgggtgggtgtgtgtgtgtgtgtgtgtgcacgtgcactggcccaggaagcaggagccgtgtgtgtgtgggcttcagcacctgcaggtcttgggcgcaaggaggcagcctcagggcccttgcacagaacaggtggcagggtgtgctcgtggggcagatggggacttggggacaatggtggtgtgtgagtccacgcctggctccaggattcaggaggcccatttgcatatcccaggtgggaacctgtctggccccgcctgaccctgctggccggtgcaggc

SEQ ID NO: 40672 - DNA, 1972 bp, Artificial sequence
  DNA replication origin
ggccgcataaaaaacccacagtctgaggccagcctggggctttcagacctgggcgggatctgcccaggccacctgtccttctgctttgggccgctgtctcttggcagatggcctgacacctgggggtggcccaaggatgcctcagaaaatcttgattcccactctacagatggcccgattagccagaggtttccaggccatctgtccgcctccaggagatggactgggacctttagacatcggtggagaacaggatgctctgtctcttgctgtccagggcagggatggcctccagccgcaagaagtacagcagcacctcgacctgccctcgcagagtggggaagaggagagtggctcagagcggggctcacagctgctggtggggaggtctttggggcccaagtccccaagtccacctcaggtgctagaaacccctgctggtgtcatgaaccccttacagtgagacgggggtggggtggggtcctgacaaggcatgacttgttgggtggggggtggttatttattttagagatgcacagggccttgctctgtcccccaggctggagtacagtggctccatcatggatcactgcagcctctaactcctgggctcaagcaatcctcctgtgtcagcctcccagatacctaggattacagatgtgtgccacaatgcctgcctaatttttctttgtattttttctggagatggggtttgctacattgcccagactggtctcaaacacctgggttcagttgtcctgcctcggcctcccaaagtgctgggattacaggcatgagccaccacacccgaacacttggggtggttttaagcccccagcaaggtgcaccagcaggaccaggaggtggcctgggcaccccctatcactcccatccatgcaaacctaggcaagtccctctctctgaatctcagccaccaccacatacaatgcaagtcggaagatgggcaggactgggggtggggcaggcagagaccacctctgtcaggctggggttgcatgggctggagactgtcttcccatacctgagacatgacctccaaggacctgctgtcagtcatggtgatgggctggctggggttggcagggagcttgctctccttctcggagggccggagcagcgtggggccaaagacagtggcgaggttgtgcagggacatcttattgactgcttccttctctgccaccctgtagaggacggaagcagagggtgctgtttcaacgccaccaccaggagagaggcagaggggctgtgccgtgctagagtcctcagggagggagtgacctcgaccctggctgtgctgcaagctgactccagccttggtacttctgggtctcagtggcccaggacaaggggccagctctgggctgatggggaggtcttcatgatgtgcttgggagggaagaggcgggtccaagtgcactgctggccacggccaaagctctgagctctttgttaaggccacagtgcagagggaggcgggtggcaaagaggagaggcaggggcgggggtggcagtggtgctagtccttagaagcagtgagttactgcagacaggggtcgggggaaaaggtccttggtgctgggggtctggtgggagcagaggggcaccccaacggcctggagacctggagtcctgggcagccacaagagagctgggctacctttccaggcggtctagaaggaaaaggaaggtgagcaggttggcctccggcagggacaacaacaggttgagcatgcagctcttccttgcaactgggtctgaaagagctgcaggaggcagtgggtgactcccctgggttacgacaagccggagacctctcccgaggtggtcacatggagcgcccgggacacgagtccttgcgcagtttaggcttgtcatcatcgtcacacccacagcgctggccgccagtgaggaccctgtgaggggcacctgtgtggggtgtgaaccacct

SEQ ID NO: 40673 - DNA, 897 bp, Artificial sequence
  DNA replication origin
gaggtggggggggtcagccccccgcccggccagccgccccatccgggaggtgaggggcgcctctgcccggccgcccctactgggaagtgaggagcccctctgcccagccagccgccccgtccgggagggaggtaggggggtcagccccccgcccagccagccgccccgtccaggagggaggtgggggggtcagccccaccgcccggccagccaccccctccgggagggaggtgggggggtcagccccccgcccggccagccgccccgtccaggaggtgaggggcgcctctgcccggccgcccctactgggaagtgaggagctcctcggcccggccagccgccccgtctgggagggaggttgggggggtcagccccccgcccggccagccgccccatccaggaggtgaggggcgcctctgcccggccgcccctactgggaagtgaggagcccctctgcccggccaccaccccgtctgggaggtgtacccaacagctcattgagaatgggccatgatgacaatggtggttttgtggaatagaaaggggggaaaggtggggaaaagattgagaaatcggatggttgccgtgtctgtgtagaaagaggtagacatgggagacttttaattttgttctgtactaagaaaaattcttctgccttgggatcctgttgatctgtgaccttacccccaaccctgtgctctctgaaacatgtgctgtgtccactcagggttaaatggattaagggcggtgcaagatgtgctttgttaaacagacgcttgaaggcagcatgctcgttcagagtcatcaccactccctaatctcaagtacccagggacacaaacactgcggaaggccgcagggtcctctgcctaggaaaaccagagacctttgttcact

SEQ ID NO: 40674 - DNA, 1581 bp, Artificial sequence
  DNA replication origin
ggggctgaccccccccacctccctcccggacggggcggctggccaggcggggggctgaccccccccacctccctcccggacggggcggctggccgggcagaggggctcctcacttcccagtaggggcggccgggcagaggcgcccctcacctcccagatggggcgctggccgggcggggggctgaccccccaacctcccggacggggcggctggctgggcagggggctgacccccccacctccctcccggacggggcggctggccaggcagaggggctcctcacttcccagtaggggcggccgggcagaggcgcccctcgcctcccggacggggcggctggccgggcggggggctgatccccccacctccctcccggacggggcggctggccaggcggggggctgacccccccatctccctcctggacggggtggctgcccggcagagatgctcctcacttcccagacggggtggctgccgggcggaggggctcctcacttctcagacggggcggctgctgggcggaggggctcctcacttctcagacagggcggttgccaggcagagggtctcctcacttctcagatggtgcggccgggcagagacgctcctcacatcccggacggggcgacagggcagaggcgctccccacatctcagatgatgggcggccgggcagagacgctcctcacttcctagatgggatggcggccgggaagaggcgctcctcacttcctagatgggatggcggctgggcagagacgctcctcactttccagactgggcagccaggcagaggggctcctcacatcccagacgatgggcggccaggcagagacgctcctcacttcccagacggggtggggccgggcagaggctgcaatctcggcactttgggaggccaaggcaggctgctgggaggtggatgttgtagcaagtcgagatcacgccactgcactccagcctgggcaccattgagcaatgagtgaaggagactccgtctgcaatcccggcacctcgggaggccgaggctggcagatcactcgcggttaggagctggagaccagcccggccaacacagcgaaaccccgtctccacccaaaaaatacgaaaaccagtcaggcgtggcggcgcgcgcctgcaatcgcaggcactcggcaggctgaggcaggagaatcaggcagggaggttgcagtgagccgagatggcagcagtacagtccagcttcggctcggcatcagagggagaccgtggaaagaggggagaggggagagggagagccagattttcttttttataaggatttttgatttagataaggatgtggtaccacttgcagaactagggaaaggaattaatgttggggaaaaaagttaccccagccaggtgcgatggtgcacgcctgtaatcccagcactttaggaggccaaggtgggcagatcacttgagcctaggagttcaagaccagcttgggcaacatgcccaatgtggtgaaaccccgtctctacaaaaaatacaaaaattagctgggtatggtggcgtgtgcttgtagtcctagctactcgggtggctgaggtggga

SEQ ID NO: 40675 - DNA, 1380 bp, Artificial sequence
  DNA replication origin
tgggtaagcaatggtcactgccatgggccccatgcttctcctaacacactggccaggtgcctgtgtgcccatttcccacccaccctctcctccctgcagtgagtggtagctgctgtgatagaggtcatgcccccattctgccttcagccttagggtccagcctggccctgggcaagcccctccaccctgggcctctagccaggaccccactggtccccagaggttctagaatgcaaggattcccaaaagcctttggccaccaatgccccggctgtctgacatagcctgtcctgtcgtgaacagttgggattagtccacatccctccagatgcaagggtagaaggcgggtccccttggacagcttggagggctggacatgaagttgttcccagttggaagtctccagaaaataggcgagtggggcggggggatggggggggaattcccagcctcaggctctaaaattcccagttagtctgtggtgcagacaggactccctgcctccttgttcagggaagtaggggaggatcaaggccacactgggcaccaggagctggaagaacaagagggtctctggcccagagtctgggatggggagaggcagagggggcattggaaattggggacacatctttgaactgagataacagctgttgccaagaccagcacctgggccaggctaaggaagggcagggctaaaggtgggggagctaagggtcaggcagggccttgaacgccgtgttcaggaggctggcctttatccctcaggacctggggagccatggaaagatctgaggagcaggcattgggcacagctggacactggggaacgggtgacacaggggcatggatccagcccaactctgataaggaacagcagagttccacaggaccatagtggcagaggcagcagtgaggacttcttttttatttatttgtttgtttgagacagagtctagctctgtcccccaggctgcagtgcagtggcgtgatctcagctcactgcaacctccgcctcccgggttcaagcgattctcctgcctcagcctcccgagtagctgggactacaggcgcatgccaccacgcccggctaaattttgtacttttttagtagagacagggttttaccttgttagccaggatggtctcaatctcctgacctcgtggtccgcccacctccgcctcccaaagtgctgggattacaggcgtgagccaccgcgcccggccggcaatgggggcttcttaaaaaagagggaggctgggcccggtggttcacgcctgtaatcccagcactttgggaggccgaggcgggcggatcacgaggtcaggagttcgagaccagcctgaccaacatggtgaaacaccgtctctactaaaaaa

SEQ ID NO: 40676 - DNA, 1148 bp, Artificial sequence
  DNA replication origin
gtcctgggtgccgggtccggggtgcggggtgccgggggtccggggctggtggccgggcggcgtggggccgtcgggggtgcggggccgggaggactgggaggctggggttctgctcccctcagggttcctttcccgccgccccgagaccagttccccggcgcggggtccgagtcctgccccgcggcggctgccggcactgcctgtgaagggcccaggcacagtcacgtcccaggcgcagttgcggcgccgcgtgcgggaccctccgagctgtcccaaactgcaccggaaggcgcgcaggggtaggcggggagggaaggcaagtgcggcggccggcgcggcgcggggtgcggagccgcaggtagcgggcggggagcgtccgtccgtcagtccgtccgtccgtccatgcgccgcagaccggccccgcgcgctcgcatgaaccttcgcgagctcctccagcagggatggaccgggggcgcagaggcgcttcctgaggggtggcgggccgggccccggggcgagggagattccccaggtggaggagccgggcggagaccggttccccgggaaggtgaggcgcgggcagagatacccgagcgcccgggacgcgccgagaaagggggaatcaggaacgctgggccgagcgctggcgtcttccgtggacagtggtggcgggaactgggtttgggggacccaggagacgacgggggacggatgggggtgggtgcgcgcctcggactggccccggccgtctgtctggctgcccggagcggaggtaggaatggcgggaatggtggcggctctcgagggatttggcgcaaggcggcccaagggcttgaggaggaggccgcgggccggcagagctgaggtccctgtgtcccgcactcagactttagttgccccgactgtaccatgggaggaagagggagacccagggctgggtcctaggctgggggagtcggggccctgcaaagacgcgcaggtgtttgtggcccttgttggagggtgagccgcaggtcaagccagccctccgtcgccatcctgaagcacctcctctcttgggctctgccacacacagggccttctcccctattgccaggtgctcaggccgcctccaccctgcctctgctgccggctccccctgggttccc

SEQ ID NO: 40677 - DNA, 1358 bp, Artificial sequence
  DNA replication origin
ctgtgtcccgcactcagactttagttgccccgactgtaccatgggaggaagagggagacccagggctgggtcctaggctgggggagtcggggccctgcaaagacgcgcaggtgtttgtggcccttgttggagggtgagccgcaggtcaagccagccctccgtcgccatcctgaagcacctcctctcttgggctctgccacacacagggccttctcccctattgccaggtgctcaggccgcctccaccctgcctctgctgccggctccccctgggttccccggcggggcaccctgccgatactccatgacgcgccagggctgccccagggtgccccagccctggggaccatggtggagggttctgtggagcaccgcgggcctgggaagctgttgcggggtcggggcttcctcactggccctgctttggccgttcctggaggccttgggtggggctgggaaggccgggccctgtgggcagcaccccccccccccccgcccaacatcccggcagatccatggcaggggcgcctcacaggctggtccacggccacggtgtcagtccctccttgttctgcgcttgctttttggggtctcccagcctctccctagtcctagagtttctcaggcaaatcccagccactacccctccatccgtgtcccctgtttccccagtgctgagctggctgagctgtgagctttcctgctccttgcctcaggaagccaggggcagcccagtcacctctggccagaggcgggccttaggccaaggctgacctggctggtctgagagctgtgctgggcttcttcccatatcagtctgtgaattacagatccccaaatatgccctgcgtcgcgatggaggagggcaatcaatggcaatgactgcctcatgggcaacgcgatgtgctggagatttcagtgctctcgtctgggttctggtcttgcctcctcgacccactcgctgagcaggttgctgtcccggggaatctgatatctcatctgtagaacaaggatgatgatcttagcaatgcctaatgtggaaaggccttggcttgggagcaagtgggggaaggtttagggcagaccagagggccggtgaggggtgtgtgctggagcggggaacccgggagggagggtgttaggcttgagggtcaggggacaccacagggattgctgttggcagagggacatatgaatggtagttggcctgggagccagcatgtgacttgagagcatcacgtcctgcaaagtccaggtgaggcctgggcagtgcctgctgtgtgggaccacagcccctggtggctctcagctgtgtcctgacactccaaagaaggtcttagtaccctctcacagaccta

SEQ ID NO: 40678 - DNA, 870 bp, Artificial sequence
  DNA replication origin
ggtcttgcctcctcgacccactcgctgagcaggttgctgtcccggggaatctgatatctcatctgtagaacaaggatgatgatcttagcaatgcctaatgtggaaaggccttggcttgggagcaagtgggggaaggtttagggcagaccagagggccggtgaggggtgtgtgctggagcggggaacccgggagggagggtgttaggcttgagggtcaggggacaccacagggattgctgttggcagagggacatatgaatggtagttggcctgggagccagcatgtgacttgagagcatcacgtcctgcaaagtccaggtgaggcctgggcagtgcctgctgtgtgggaccacagcccctggtggctctcagctgtgtcctgacactccaaagaaggtcttagtaccctctcacagacctaatacccgagccacctaaccccaaatgagctagaactgccttcccaaccgtgtttgcggggtctgtcttgtctattgcagcgcaaacagagccctgagcacgcaggagagcagaggaaggacagacagaagatggatggatggatgaaggcgggaagcacaggctgaggggatttagggcatgtgtggtgggggtgctgtggagaggagactgcacaggcaggagctgagctggtgaatgggagggttctagctcccagaagggtctgggccattgacaggaggggcttggtcctaggaggtgggtggtccagaggttgcaaggagcagaggagcccagatggggaagggaatggagctggggtgcagagaggagcccccacacaactgcccacatcctgtgcagaacctggggctctgggtggtgggaagaggcagtttcatggcggag

SEQ ID NO: 40679 - DNA, 1395 bp, Artificial sequence
  DNA replication origin
tttaacgggcagaggtccatttggatccagaccattcacaggctcgaaggggacactgggagttggggctgggctcaggcctgctggggaaccaaaacttctgcttctgaggggtgtcagtaattccattttgactctgggggagccattttaaatctgtttatttccttctcatagaatcatgggtgagagctggcatggcccctagaggtcatttggggtccagctgcctcaccgtatcaatgaggaaactgaggcccagaaaagaaaagcatttttgcccagagtccctcagtgagtcctggttccgtacctgctttctgccagggaccaaactcccgttagtcattcctggtgtcagccaggcagaggagcaggtgggggagagggcgtgggaggagggaggtgaggcagctccctccgagtggaagctcacagtcagctgcagcgccgcccctgccctgactgcagctgactggcaggggcacctggaggcagcgggttcgggcgcagtatgagagggcttaccctctgcggcagtgggagacaggaccaggcagctccccacatccttccacatccgagctccaggggtctctggcttgtcctttcacagggcggctggtgtcccttaggtgggtgctggtagttcctgggagagttgacgggatggagcaggccaggggggctgagaagttggcctggcgagagaaggtgggtgggactgggagagcctgggcagggaggggcctttctgggagggagtgtcatggggctggccgagatccaggacccaggagactggccaagctgccacaggaggcctgagaggctgagcatgggggggccaacactgacagactttaacaagtttctggctcccccaggaaaaaaacagaccacatctgatccttggccctgagtccagagtgggaggcaccgtgacaacaatgcgcagagcagggaatgcagggagccatggatagtgctggggtgagctggagtcctggcaggggcccagctagggcagtactcattctgcagagcctgggagaaggggctgcctccttgggaggggtttgtgtgggagtctcagcgggaattctattggaccaggggaaccagccttgctcagtgacttctctgggtgtcctcctctaaagtgagggtcaaattcccacctctctcgcctcctggctatgaccacagcagaccaggcagggcatggggctaggcggggtcaggggccatcctcaggctgacacctggcctgtgggtagggtgggatctgaaactatagggtcttcagggggccaagtgtggggtaaggggtggcactttccgcagggctcgccctctgcagatggttcagcttctcatcggctgtccctttgc

SEQ ID NO: 40680 - DNA, 1408 bp, Artificial sequence
  DNA replication origin
gctgccctacggtgcggacaggaggtcgcggtcgggaggggccctgcccggcggttgctgctggaaccagcccccgcaagggcccgcagcggccgggccgtttacctcagacccgcgccgcagcctcccggagcccgcgcccaggactccctcacgacctctccagggtcccggcccgacaccaaggggcaggtgaggggtggaacctggaggcacccgcgccagggcccctgagggaggcgggagggggacagcctcagtcctgactcgcagccgaggcgcgacgactccgcgcagtcccgcctgtggaggggcgtgcctcatcgcttgctaaccgagaggcgaagggcaaggggcgaagggcaagcgccggatcctttcgccccctccccacgtgaggccctggaggctgattggccgtgtgctgcggaggcggcaagaggaacgtgtcctggcacgtgccgaaggagcgctaaaggccaggggcggtcccacccgcgaagccctggaaggcggattggctgcgcgaggaagtggcgtgtcctcacttgagctgtctgggagcgagagtaagagataaaggcaagggcgcctgaccgggcctgggcacctcctcccactgcgggcaaagggcaggcagttcgtgcgcggacacaagcactggcggaccgtggccatggcgggcgctgagtggaagtcgctggaggaatgcttggagaagcacctgccgctccccgacttgcaggaagtgaagcgcgttctctatggcaaggaactcaggtccgcagccaagaggctaagctaatggggtcttggggccacagagtgtgggtctgggggagcaggcagggagggcctcagggtctgaagggctcaggggaggcggtgagaagtcctgagttggcgggcagagaccatagtaggtcttgatgggacggccccggggtccttgggggttgcagaatcctggcgtgacctttacaaatctcttctcccccacgttgcccagaaccggaaggaaaaggacgggattttactctccagggctttctctgtggccatcccaaccctcctccccggagccgggcttgtcttctggatgtctggctggatcactgtctccaaccagagcacccagcaggtgtactgattgtccggccccagaccatccttcttgcggtgacccgacctctggctgacccttggaaatagaggctgtctgcatttagttggcgagggaacctttcccactggcaagccatgggcgctggtttttccactccctgcaagcttgtgcatcaccaggactttctgagggctgtatactgctggacactgtgtccacaaagctgaaaaagacacttcctggccgggctcacacctgtaatctcagcactttgggaggcca

SEQ ID NO: 40681 - DNA, 1328 bp, Artificial sequence
  DNA replication origin
tcttctcccccacgttgcccagaaccggaaggaaaaggacgggattttactctccagggctttctctgtggccatcccaaccctcctccccggagccgggcttgtcttctggatgtctggctggatcactgtctccaaccagagcacccagcaggtgtactgattgtccggccccagaccatccttcttgcggtgacccgacctctggctgacccttggaaatagaggctgtctgcatttagttggcgagggaacctttcccactggcaagccatgggcgctggtttttccactccctgcaagcttgtgcatcaccaggactttctgagggctgtatactgctggacactgtgtccacaaagctgaaaaagacacttcctggccgggctcacacctgtaatctcagcactttgggaggccagggctggaagattgcttgaactcaggagttcgagaccggcctgggcaacatagtgagacacccatctctataaagcatttaaaaaaatagccaagcatggtagcatgcatctgtagtcctagctacatggcaggctgaggcgggaggatcacttgagcttgggaggtcgaggctgcagtgagccaaaatctctcctctgcactccagcctgggagtcagagtgaggccctgtctcaaacacacacacacacacacacacacacacacatacacacacacacacacacacacgtctttggatttggagcttacttggataatcccggatgatcttatcttgagatcctgaccttaattacgtctgtgaagaccctttttccaaataaaatcacaatgacaggttccaggtgtcaggatggagacacagctcaacctgctacagtagcttcagggtctgcaggtggaaataactcaggggctatttgctatgtggaggtgggcctcaggtgggcgaggctgggcttgttgagctgccctggagatggtcattccaggtgaaggaggagcaggtacaaaagagggcgctggagagaatgctggaaaacctggatattcaaggggtcagagaaagagactttgtgggagattctggaggtgaggactctggggcaggacaggaaagaagcatcagatggctcagaaatgtctagcgggtgaggacagcaggaagtctgctggatttagccatgataaggctgttggcagttcctgagatggggccaggaggtaaggcctgagctgaggggaagcatgtgtggaagctccctaggcagcagggagagacagcaagtgagtaaacacatggacatatgtggaacactgtccctctttctctttcttcctcacc

SEQ ID NO: 40682 - DNA, 1247 bp, Artificial sequence
  DNA replication origin
ggggatggggtccgagggcctaggcgcaccaggctcctgctgtcagctgtccaagtagacaaagaggatgtcctcatctgtgccatagctggttctggcctcctcaaagttactgatgctggtgctgcacattcctgctgggggtggggaaggcagaacggggtcagtgggttgtgagagagcacctacaccaccgacacagtgcccaggggagctgagtgaggtctgtttcccatccacatggccattcctctcaactcaagtcctccacccccaggaagccctccttgcccatcctggtcttcatgaggtttctctgactcctccccagtaaagcagttggagaaaggcccagagaggggcagaaacgtgctccaggccacatagacggggtaagtctatgtggtcagggcgtccaggggctgtctatgtgaatccagtctatgagagtcagggcagcccttccctgtgcccggagggcagtaggcaggccaggatgggtctagagcaggggctgggtctggccgggcttttctttctgaggaatgtgccggccatcctggtggttgggggaggggtgcagcctgggcagcatgaaagggtaaggcagggacctgggcagtggcgtggggcctgtggtgtgagagggaggggtggccagggtgtagaggaggctggcacagtttgcggcaggtttgcctgcatggcctgaggggtggccacagtgacaagagcccaggaggagcaggggctttggggaaaaggtagggagggaggccctggccacactagattgaatgggtgggaactgtgggcactgggcatacagaacagtgaatgtggaccactctgcctcacccaccccacccagcactcacggtcggcataggctgggttgttgtagaagatgcagccagtggcccggttgtagccacgcagcacgatgaagtggccctggtagtcaggagtgcggcagaagcagtggtggccactgggggtgaagcagcagtacttgacagggctggagcacaggtcacagtgcagcacccccgagttcaccagcacgatggccacatggccctgagccaggtgcgcctggatgtccttcacactcactgtgctgtgggcgggaggggggtcagctggtgctgctgggcccccattccccatccctcaaatggatccctgcttgtgcctgtttctctgttacaaagcttggggatcggctccttttccctttgccctga

SEQ ID NO: 40683 - DNA, 1341 bp, Artificial sequence
  DNA replication origin
gttttgtcttgctcttgttcttcactttcgttctctctgccacgcggtagcctgagcccctttggggcggagacccggactggtattcaatgtcttggccgttagtttgcttgcccaagacgtaggggagggggaagacgtgattcctgtcctgctgaaggcgcggggttgatgacaaacggagttctagctagtaaactctgaagtgaagtgccaactgtggaagaggtcaacagcatgtgggaccctgaccttcaggtgtcactcccagggagtgttcccttttgtgtctgctgtgtggagttggtgggggatttacaaccctcctcctccagttgtctagccctgtggtctgagacaagatacttgcctttcctgagcctcagaggaggaatggcttacattcacagggagtgttctatgaggcaggcgcgcgctgcgtgcagttgtttacatgcagtgcctcattaatcctcataacgaaccagtgaagtaggtgcccactgtgatttgcacttttgcagctgagcagactgagtctgagatgggttaagtattaaaggctagtgcactgcttgccttccttagtgacagccactaactgagctcaggccagggccttccaggcagccctttggctccaggcagcaacgtctggctgtggctttgtgtttagaaggctaaagctgttatggggacagatgccaaggcctcgcctaaccttatcacccccaacatgagcacctctaggtccgatccgcccttgccgaggctggagatggccctgtggggcctgccaggcctcaggatcaaggagttctagagcgcagggcaagaggaggaggcgcagctgagtctctgagagagagctgctgtcttgtgccacattttatagctggacatggaaaggcatggacagtcatagcctggcagaagatagcccagctagtcagtgtcacagcccaagccacagagtaaggagggagcctcacacagagggctgtagtctggaagcctgggggaggaggggtgcagagcagggaagtgacaagtaggcctgggcatctcaaggtatgaggtctttttggaaaacgccttccattccccaagcatatctaagtgcctactctgggctgagggttggaaggaggcaaatgcaacctcatccccatctgccactgaagaattctcattgcctctttaaggactccatattgaggggccctgagagtgagagggattagagcatggagacaacattaacatttcagactaaggctcatcagctatcattagtgatagtgtagtttatgtgtggcccaagacaattcttccagtgtg

SEQ ID NO: 40684 - DNA, 856 bp, Artificial sequence
  DNA replication origin
cttccaggagctagtgaggcgacgctgatgtttgggtggcccaagcttcccgctttcttccctccccgagccccgcagagttccatgcagcaagtctttctccagcccctggcccctcacaggcgcctcgacctcccctcgcccgtccccagcctcaccggctctggcctacttttcttctcttcggtccgctgcgaaagatgctacggcgaaggcgtgagtcaagcgaatggcgggcctaacacccagaattccactctttcccaaaatgctgcgcgcagggcccgcctccttcctttccccagtgttgagcgcggtctcgcctccgcttcctcctcactccgcctgccggctgggaaactagggcaccagtacgatagttccggcaccggaaaagagggctgatgactgggcccgggggccgccgcaacgacccttggggccggcaaagagccagagagggtgctcacacttccaagcaccccacaccaaggacaggctggacggcaaggcggagacgcggggcttgggccctcagaccggggacagcaggaggttgggccaagggccaggacttcccgtcacaatttcatttgttgatcccggcaccgccaggtaaggggggccctgagtgaggctaggtatctggtacggataaagttaggtatagagtagagcggctgcccgctcagggttatccctaaagacagttggaggagagttgcttggggcctcggggatgcactgggcgggatcagggcttacacctaggactggcaaaagagcgggacccggcagaggcggggcttgccgaagggacgagcctctattcaggaaatgcacgagctttggggcg

SEQ ID NO: 40685 - DNA, 1078 bp, Artificial sequence
  DNA replication origin
tgcctggcccaacttcctgtgcttgggacccacgcacagagcatatcacctatggattggagaaggcccacatggggtctagaggcccctcctggctgtggctgccccatcagctctcaaaatgtcctctaaagagaccctctgggccagatgcagtggctcacgcctataatcccagcactttgggaggctgaggcaggcagatcacctgaagtcgggaattcgagaccagcctgaccaacatggagaaaccccttccctgctaaaaatacaaaattagctgggcgtggtggcacatgcctgcaatcccagctactcaggaggctgaggcaggagaattgcttgaacccgggaggcggaggttgcggtgagctgacctcgcaccactgcgccccagcccgggcaacaagagcaaaactccgtctcaaaacaaagagaccctctgaaagagtattcagccccacaccagtcctgtgggagtagacaggaggagaaagtggaggagtgaggcaggaaggccagggcaggtctatgcaggcggtggggtgagggatgggtaggagaggaggctggaggcctgaatcttggcaggagtggtggggagagagaagggatgactaggtgagctgggggagagaggaggacggaagagtgctggggggttccagagcttctggccccagtgcctgggaagatggtcatggaggtgccctatactgagctggggcatgggtggtgaggctggcttcagggtggcatgcctttgagacatctgagagagaggtccgcccccaagggaaggatccatacctgtccgcaaacagatgctggccgcagcttaggaaaaccaagggataggtgggaaggcagaggatctgaagggaacactgggggacaggggaatttgaggggtcataagaagagcaaacccccccaccataagacgaaagaccccaaagaatcccactgacaagtcctaaccccagagaaggcagtgtcacagcacaacactacctcaagggaactggtctaagggttctgggattcacttaccacttccctgagggctcccatgtcc

SEQ ID NO: 40686 - DNA, 1839 bp, Artificial sequence
  DNA replication origin
aggccaaaccgaggaacccactggcctcgctccggcgcggggtggggcgggcgctcagccttcggacccggacggggcagggccgcggtgattggaggcggggcgactaggggcggccccgggagcggggcgcagacagcccggcctcctgtgggttcggcgaccatcgcgcggcggccatgggggcgcggctgggccggcgggccgggcccgaggctggctctgaggccggggcggcggccggctgcgggcccgcgccctacgagcgccgggtgcggtggctccgcgagatccagtccacgctccgcgagcggcggccggagcgcgcccggcagctgctgcgcctcctgcgccaggcgagagaaggagccgtccgcccctgggctggcggccagggagggtctgggggtctgggggtctgggaggcgcggggctatgggttgtgggcctgtatccgccgggaggcgaggcggagctggtctctggcgcgcgcaggcgggttccgagggcgcgacaggctgcagcacgcggggtcttgcgtgggcgagagggcgaccgcctggagtgagggctgggtgaggtcggcggaccgtgtggaggagggggctgctgagtgtgtccgggtctttggggtttgagaggggttgtgtgtgttgagggtggcccggtagcctggacctaagagcccaaattcaggccctggcaagatgggaggggcccgggaggagtggcaagtgaggtcaaatcatcttgtattgagagacaatggaagagggtaacttccccctcctccaggatccgggagacagtggaccctggagagaggacccagggctggtctagggatgcagcctcaccccaagacaccatggcagcccacagagagccatccatgcatcaccagttctccaacaggcggctcatgcccttagagtacacatccccagcatctgtgcatcacaacactcggtccggtggtggctctgctcctacacacaccaggtacactaaacccagatcccaacccctgggttgtcccaggatgctggtccccccaatcacctgggcatgccacttccctcaccaccccgtccccaccccctacagcagctaccaccactacctgccccatcctgtgagcaggaagtcagccatgcaggtgttcggcctgcagaaggtagattagaaatggggaaactgaggcatggagcgaagtggtcaccccagggcccacagagaaaatgtggggcaagccagggccagagcccttcttcctcccttcccttctccacctcctccaactctggattcagcaggctggaaaaatggagctgtccgtttaagaggagctgtctagacccatggaaggcaggctggcaggttgcggtctggggccctgtctgggtctgccaggctcatcagccagccttcctcctggatcttccctagctggcatctgtggcaaacagcagagcagcactgaatcagccagacaaccagaggcacagatctcagtctgggatgctgcctggagtccaagacaccagttgggcattttagctgggaaactagagggaaagaaggatcctcagagaccacctctttgtgtctcagaggttgggatttgaggtccagccggggcctatcctgctccataacctgcagggaccctgcagctgtgacccacggcctcccctgcctggcccaacttcctgtgcttgggacccacgcacagagcatatcacctatggattggagaaggcccacatggggtctagaggcccctcctggctgtggctgccccatcagctctcaaaatgtcctctaaagagaccctct

SEQ ID NO: 40687 - DNA, 1253 bp, Artificial sequence
  DNA replication origin
gcgcgcgccagagaccagctccgcctcgcctcccggcggatacaggcccacaacccatagccccgcgcctcccagacccccagacccccagaccctccctggccgccagcccaggggcggacggctccttctctcgcctggcgcaggaggcgcagcagctgccgggcgcgctccggccgccgctcgcggagcgtggactggatctcgcggagccaccgcacccggcgctcgtagggcgcgggcccgcagccggccgccgccccggcctcagagccagcctcgggcccggcccgccggcccagccgcgcccccatggccgccgcgcgatggtcgccgaacccacaggaggccgggctgtctgcgccccgctcccggggccgcccctagtcgccccgcctccaatcaccgcggccctgccccgtccgggtccgaaggctgagcgcccgccccaccccgcgccggagcgaggccagtgggttcctcggtttggcctgatcacactggaggaggccctgcttgcgtcagtcttggcgctagaacccgagggcctggagccgccaggggagacgcggagctcggccgagacgaggtggcttttggcacctctttaccctctggccccagtgctgactggggaatagtcgctttgaccgtgcaaagagcattctaggcggggtgggggggttctgctgtgtgtgccagtgttaggtattgcccccattgcttttagaaatatgccctgcatggtgaatctccgtctctactaaaatacaaaaattaggccgggcatggtggctcacgcctgtaatcccagcactttggggggccgaggcaggcggaatctaaggtcaggagttcaagactagcctggctaacatggtgaaaccacatttttattgaaaatacaaaaaattagccgggcgtggtggcgggcgcctgtaatcccagctattcgggaggttgaggtaggagaatcaattgaacctgggaggcggaggttacagtgagccgagatggcgccaccgcactctaccctgggtgacagagcaaaactctgtctcaaaaaaaaaaaaaagaaaagaaaagaaatctctgcagctggcagttgtggtgtaggacctgctcacgctacatggacactcctgcactggcaaatatttactgcctcctgcttcttggtttggggcaggcccccacctctgaccccagcctgggaaataaaccggacgaagagtcaggttaaccgttaagcc

SEQ ID NO: 40688 - DNA, 1176 bp, Artificial sequence
  DNA replication origin
agacgggccagcagccctccgtgaagaacacatgtgggctagcgaggtggaatcatgcccccatgcctgaggggagagctgtgcctctgggggctgctgtccaagtcaggttaggccagaaattgtctccaaaagcccactcgccctaggcaccccacaagcaggcagagaaaagcccatccaaggatctaggcccagacaccaccctccctcttttgctggaaaaatgtcctccaggaacctctcggccagggacacagagggtgggggatgagaggcaggggctggggcagttctctgccttccacaggactctaagctctgagcactcccccataccgctgcctaggttgcccctttcatgcctccaggctcagccctccattccctcctttctcccctccccctgcccagtattctcacatttgaggggacagtgcccaggcctggctcagcctctgggaggatatggtcaggatctgggagccctcccagctgtggctccagccctgaggctgcaggggaagaggaggagggcttaccgggctgcctgctctgggcaggggggtctgagaggtccctggggcatcagagctgcagcttaaagctctgaccgggtaggttgccacttcagttcagcaacagcgccttggccctgggggagggcacgcaaggccgtcatgcaggtttgccagggaggaaacctgtggtgccaaggtggccccaggacaatgctggctgcactggagtgggaggagaggctgttgggtccagctggcaggtgccaggggagaagggggtgcaagcactgctccagcaggggttgggggtccgtggatggtcaaggggctaagacatcctgctgtcctctgccttgtctcaggggcccagccccacaggatgacagagcctagcaccctgccctctccccactgccatctctgggcaggcagtgcttaacccaaaggaaggaaccttgaatcttcatagggtaattagcagacacacacacacacacacacacacacacacacacatacacacgggtgcttggctgtcgtccctcatatatgccctcggacagtgctcagcccttcctgcacaacaggtaccagtcctcacaggctaaacacgtgctccttgcttagagaagtgggaactgcagatcagtgcctc

SEQ ID NO: 40689 - DNA, 1910 bp, Artificial sequence
  DNA replication origin
ggcccctgagacaaggcagaggacagcaggatgtcttagccccttgaccatccacggacccccaacccctgctggagcagtgcttgcacccccttctcccctggcacctgccagctggacccaacagcctctcctcccactccagtgcagccagcattgtcctggggccaccttggcaccacaggtttcctccctggcaaacctgcatgacggccttgcgtgccctcccccagggccaaggcgctgttgctgaactgaagtggcaacctacccggtcagagctttaagctgcagctctgatgccccagggacctctcagacccccctgcccagagcaggcagcccggtaagccctcctcctcttcccctgcagcctcagggctggagccacagctgggagggctcccagatcctgaccatatcctcccagaggctgagccaggcctgggcactgtcccctcaaatgtgagaatactgggcagggggaggggagaaaggagggaatggagggctgagcctggaggcatgaaaggggcaacctaggcagcggtatgggggagtgctcagagcttagagtcctgtggaaggcagagaactgccccagcccctgcctctcatcccccaccctctgtgtccctggccgagaggttcctggaggacatttttccagcaaaagagggagggtggtgtctgggcctagatccttggatgggcttttctctgcctgcttgtggggtgcctagggcgagtgggcttttggagacaatttctggcctaacctgacttggacagcagcccccagaggcacagctctcccctcaggcatgggggcatgattccacctcgctagcccacatgtgttcttcacggagggctgctggcccgtctccctggggttaccctgagcagcagagctgtgtttgttgagactccatggggtggagggattgcgatgttgtcctctcagttcccggggctgatgtggaagctcaagggcttgccctggattcttcagggtagccctgccatccctagtgagtcagtgagttgggaggttgggggctggagaatcaggtagggaggacacagctagacctcaggccctgatgggaacgtactaggctccaagtgggacctgccaggagacaagaattgatgacagccacacctttggagtctcaagccctctgccacccatgcggtggcctagttcaaatgacaggaacacaaggtccagctggcccaatgggcaggtagagggctgcagccagggctggaactggccttgcactgcctctgggcccttctctacccacccagtagtattgttcaagcccaggagggaaaaaggccagctcagggttaatgttacctcagcaagtagctgagtggcactgagcctcctggtagccactgtaaagaaggacacagaatggtttgggggcattcgctaggaggaaggaagcagatggatactctatggagacagaatgtcctctgtgtttgctctacaggaacgggttgtcaaccttctgcagggccaggaattgtcatgaggctgtagtaggcagcagagcttggcggggtgaggcgagatcacaggtataggctcagggcctggattcaaatcccctgggctgccacttgttggatgtgtaaccataggcagagtaaggacctgccatagcaaattaccacaaactcagtggcttaaagcaacagaatagttctggaggctaaaagtctgaaatccaagtataggccaagccacactccctttgaggactccaggggaagatccttccttgtctcttcagcttctggtggctcctggcaatccttggccttccttggctgctgctgcatcactccagtctctgaaaccatctaccctatgtgtctgtgtggcc

SEQ ID NO: 40690 - DNA, 1874 bp, Artificial sequence
  DNA replication origin
ccaggccacctgtccttctgctttgggccgctgtctcttggcagatggcctgacacctgggggtggcccaaggatgcctcagaaaatcttgattcccactctacagatggcccgattagccagaggtttccaggccatctgtccgcctccaggagatggactgggacctttagacatcggtggagaacaggatgctctgtctcttgctgttcagggcagggatggcctccagccgcaagaagtacagcagcacctcgtcctgccctcgcagagtggggaagaggagagtggctcagaggggggctcacagctgctggtggggaggtctttggggcccaagcccccaagtccacctcaggtgctagaaacccctgctggtgtcatgaaccccttacagtgagacgggggtggggtggggtcctgacaaggcatgacttgttgggtggggggtgattatttattttagagatgcacagggccttgctctgtcccccaggctggagtacagtggctccatcatggatcactgcagcctctaactcctgggctcaagcaatcctcctgtgtcagcctcccagatacctaggattacagatgtgtgccacaatgcctgactaatttttctttgtattttttctagagatggggtttgctacattgcccagactggtctcaaacacctgggttcagttgtcctgcctcggcctcccaaagtgctgggattacaggcatgagccaccacacccgaacacttggggtggttttaagcccccagcaaggtgcaccagcaggaccaggaggtggcctgggcaccccctatcactcccatccatgcaaacctaggcaagtccctctctctgaatctcagccaccaccacatacaatgcaagtcggaagatgggcaggactgggggtggggcaggcagaggccacctctgtcaggctggggttgcatgggctggagactgtcttcccatacctgagacatgacctccaaggacctgctgtcagtcatggtgacaggctggctggggttggcagggagcttgctctccttctcggagggccggagcagcgtggggccaaagacagtggcgaggttgtgcagggacaccttattgaccgcctccttctctgccaccctgtagaggaccgaagcagagggtgctgtttcaacgccaccaccaggagagaggcagaggggctgtgccgtgctagagtcctcagggagggagtgacctcgaccctggctgtgctgcaagctgactccagccttggtacttctgggtctcagtggcccaggacaaggggccagctctgggctgatggggaggtcttcatgatgtgcttgggagggaagaggggggtccaagtgcactgctggccacggccaaagctctgagctctttgttaaggccacagtgcagagggaggagggtggcaaagaggagaggcaggggtgggggtggcagtggtgctagtccttagaagcagtgagttactgcagacaggggtcgggggaaaaggtccttggtgctgggggtctggtgggagcagaggggcaccccaacggcctggagacctggagtcctgggcagccacaagagagctgggctacctttccaggtggtctagaaggaaaaggaaggtgagcaggttggcctccggcagggacaacaacaggttgagcatgcagctcttccttgcaactgggtctgaaagagctgcaggaggcagtgggtcactcccctgggttacgacaagccggagacctctcccgaggtggtcacatggagcgcccgggacacgagtccttgcgcagtttaggcttgtcatcatcgtcacacccacagcgctggccgccagtgaggacc

SEQ ID NO: 40691 - DNA, 1960 bp, Artificial sequence
  DNA replication origin
gactgtgtgttctgattggatgagagaaaagcctctaggcctactctgattggactttattatcatgttctgactggatgagagcaagtattaggacaaccaaacagagcatgaaaataaagtccaatcagagtaggcatagaggtttttctctcattcaatcagaacacgcaatccaggaaccccattgcctaacatcagcatagtgggccgtcaggccattccaggattttctgcttagcagtgacctgctgttccgtgctagcttaggaagccacctactgcacgctggaggctggaggctggaggctggagcctacgggcactgtggctctcctcatgccttgcctcgctgtggtaggtggtggctactgagactgcagtgccccaggagcggtaagagggccaccagcagggaaggctgctcctgtcgggctagaggacgaggacatgggagagctacttgccccacgttgggggctggggcctgtgacatggcacctcgccttgctgcagttggtggcagccacagagacggcagcgcagctgaagtggtaggaggggagaaaatagttttggggtagatggaggggtaaagagggtggtgagtgccaaagggaaaaaaggatggcgagcaggagaaggcgttgcagacagagggtggggaaaaagatggtgggaaaataagttttggggtagatggagggggagaagagggtggtgagtggcaggagtggagagaaggctttgagaaaagatgggggaaaatgtttttgggtaaatggaggagcaaaagagggtgatgagagcgtgaggggggaaagagggtggccagggagaggaggaaaagatggtggggagaagggtggtgagcgggagagtagagggggctttgcgaaaagaaggtggggaaaaatggtggggaagaagttttggggtaggtggagaaagacaaaagggtggcgagagggagggggctgaaggcagttgggaaaagaaggtgggaaggtaatggtggggggacaaaggttttgggtagatctttttctgatttttaaataagattatttgtatttttgcttttgaggagtctttctgtattttgtgtatgaaccacttgcctgatgcataatttgctaatactttcttccgttctctggattgtttcttcattctattgattgcttcctctgctttgcagaagcttttaagtttaatgtaattccatttgtctatttttgcttttgttgcttgtacttttgatgtctgtttgaaaattccttgtcctaaccaatttcattaagcatttatcctatgttttcttctctagtagtttcataatttcaggtcctccatttaaatctttgagttgaattttgtgtatgataagataacggtctagatttagtcttctacatgtgggtgtcgggttttcctagcacagtttgttgaagatattgttattccagagggtgtgttcttggtacctaggttgaaaatgagttgactgtaaatgcgtgaatttatttctaagttctctattctgtttcatttgtttatgtctgtctgtctctcccctgccccttttttgatagtaccatgctgttttgatattatactatggatttccagttactatggatttatagtatattttgtagtatattttgaaattaggtagtgtgatgcttccagcttttctttttattcaagattctttggtctctctgaggtgttttgcatttccacatgaattttagaatagttttctatttctatgaagaatgtcttcgtaatttaacatggattgcattgattctgtagatcacattgagtgatagagatattttaacaatattcttctagtgcatggacgtgggatatctttccattttcttgtgtctgctttaatatctttgatctatgttttctagttttcattgtaggatctttcagcttt

SEQ ID NO: 40692 - DNA, 1148 bp, Artificial sequence
  DNA replication origin
ggcccagggcttgctccttgagccgccaggtggaaagagggcagctgaggccccttgatgcggaggcctctgggatgcggctcactgaccactgctctgcctttccccttcccgggacctgaggggaccctgccctttcctgtgagtcaggcttcaaagagctgcccctgagggtctgagcacctctgggaagccccaaggaggctctggatgttgttggccatgaagccgagctctctccatggtcactgacttaatcaggctttgaatatgaagtcaggaatgacccacagagctgctcccaggaccagggagaccatggtgactttatcacagtagacttaacagctgcagcaactcttgctactctaaatgacacggcactgaaaccaaatgccaggaagccggggggagggggaagagggggaggagggagagaagggggtggaggaggagaaaggggtgggggaggaggaggaggaatgggaaggaggaggaagaggaggaggagggtgttagtagtggctctggcagggctgcaaagctggttggggaggggagtcaggcaccccagagggagggaggggcccgtgggcacgggggtgctggccaggcagggacggactggcacctgcaggaaggacaggggcttggctgagcagagcatggccagcctagccgagggcagccagcatcctacactcactggtctcgaggtgcccaagccaggggcccaggactttgggcattactgggaaatgatgggaacccagggtgaggtggcgtgaaacaagatgagatggtaagatctgctttcactttaaaggaatatttctggttgttgcttggaaaagaaatgtcaggggcaagaatggtgcaggagggccggcctggaggacggggtgggactgcagggcgagggcaggagcctgcgctgggtcaggagcctgcgcttacatcggaggtggctgggagaccctggctctggggcagaggcctgagtaagggggccttgctggggatttgggggcctctgcgtgctggtgccttcccgcctccattcctctcagccctgattagctctgtcttggaacggggtaactacctttattcgagaacttggggcaagccctgggctattctgaaaa

SEQ ID NO: 40693 - DNA, 1107 bp, Artificial sequence
  DNA replication origin
gcgggggcggatgtagcgtgagggccctccaggtgtggggcacacctggatgtatcccgataggacctcctcttgtggaggagcaggtgggcgcggctcaggaaggggaccttccaagagagagaagctgctagggggacgccccccacagggtgtgctggaggaggggctctgaatggggctgccgaaggtggggcacgcttcaggaaaaggcagaaggaaaataaaacctcccttcccagcccccgaattctcagtccttggagccacctccaagagccaggggactccctccctgagagtcacgggtcagtgagctgctcccctggcagtaggggtcccttcactccccccgccccactcccaccccacattcagagggtgagaatcagagaggttctgccattcctctgcccctccactctccttggggtcagcgcgtggagaggggggcagtctagtctttagggctcatggccaatgacctcccagaaccccatagacagaatttatagtccttggggtagcatctcgatgcctggactgcgtgctctggtgtgtatacctgcatgggtgaggacctgtggctgtgagtgtgtgcgtatgagaatgtctgtgcatctgtctggagatacctaagtgtatctctttgcactgtgtgtacacgtatctatgtgtgtctttgtatctgtttttgtgagggtgggtctgtgtgtgtatattgtgtggtgcatgagtctgtgaatgagtgatgctgtgagtgtgtgtgtgtatcttgagtaggtgtgtggcatgtgatgcatgagtctgcatgaataactagggctgtgactccgtctgtgtgcgtgtgtcttgtgtgttgccctccccattcttcagtctcagaccccattgctgctgtgtcttcatcacttttgaaccttatcagcgcttagcccaaggccttgcatggcagcagacatcgtgggctggcctggtttctgggcctggctttcagtgtgtgtgtgtgtacatgcgtgcatgtgtgtgtatgtgttgggggtgttggctgaggtggcagcatcaagcatcactgatgacccctccttccctgcacagtggcagaca

SEQ ID NO: 40694 - DNA, 1044 bp, Artificial sequence
  DNA replication origin
gggcatggtagcgtgtgcttatagtcctagctactcaggaggctgagacgggaggattgcttgagcccaagagttggaggctgcagcgagctatgattgtgccactgcatttcagcctgggtgacaaagtaagaccctgtctaaaaaaatataaaggatggaggggagatgacaaagtatcgagaagtgtgggaagcataggagcaccagactggccctttctccctggggtaatcagaaaagttgaaggagaggagaaagcagaaagtttctgtagttctgtattataaggacccatgctagtgaaatgtctgaagttcatctcagtactagtgtgaggcccctccacacttcacccatgcctggtggcttcctggggagtcagtaactgacaactctgatgtacagagccccgtattcagagctggggatgcagaagcacattaggtgaggtccttcccagtttcatgggggttgtggtggtcactggtgggattgaggcaaccccgagggctgcaggagcatatgggaagcacctaagacgggcaggggtgaaggcagtcagagaagactcctggaggagctggttgttcgtaaattctcagaaggaattacttttcgggccaagagggtgaagaagggaagagaagacagcacaggcagaggtctggaggggagaccagcgtggtgtggtgtgtgtgtccgaatgggtttagggaggggcaggaagggcatggtgggtgtgagttgctgagacatgaaggagtaggatggtggaggcagcagtgagaggggaggctggagaggaaacaaggatcacgactgctaagtggtgcacggttcagggggcggggtggtcaggctgcaacagagacctggatggaggctgctggggccatgcatctaggtgaaagtggtgtaaccctggcccaggatggcactgggaattgggaggtgggcagggcttggaggagtctcagggaggtgggcaggagggagtggctcaggcgaggcccttgggcaggatggaccctcagtccccct

SEQ ID NO: 40695 - DNA, 1298 bp, Artificial sequence
  DNA replication origin
aacatttgctgagtcaattgatggagacatgatccttgtcctaggcttgcttgcagtgtctagtttgttgggcggcggggggggcgggggttggagggcatcagtcagtggatatttcacatggtggggatgagcaaaggatgctagaaaaaactccaggaaacacctgacccagtgcatggatgggcccagtgtatgcatgggttaaggcaagcttcttggaggaggtcccacctgagccaagtctggaaggatgagtagaagttagccaagagtacaagggcatttctggtaatgggaacctgaagaataaaggcatggaaaaaagggagcaaggcatgtgcagggaactgaaagtagacaagggtggctggagagcagcaagggaggccaggggatcttctgatttcttttatgagtgccttggaagcaagaaggtgtccagtcatttcattagtatcattaatgcccactgcagcacctctaacagttttgatgaatgaacacgtgactgcatgggtgagctagtgaatggatgaatgagtgtgttgataagtggatgaatgaactgttggatgaatagatggatacattggtagatggatgaatggatagatggatggatggactggtggatggatgaatggatggatgcaaggataggaaaaattgatagaatggaatatagttggatggatgtaggatgagagatgggtggatggatggattggtgggaggcaagtggctaagtaggcagatggacagatgaatggatgagtgaataaataggtggacagagggatggagagaataagtggagatgaacatggctgagtggatggatgagcagatggacagaagggtggaagtgtagttgagtgagtgagtaggtggataaaaggagacatgagccaataaataagtgaatggatggatgggtgggttagggaattgcaaaaatgagtgggttgttaagtggatggatgaacaatgaatgaatgggtggatattttagtggatggatgaggaaaatgggtatactggatggatgaatggaagatgagggtggatgatgggtgagcagatggatgggtggcaggcaggtggttaagtaggaagatggacagaaggatggatgtgtgaatggatatgtagataggatagagaaaataagtgggtaagagtatgtttgaatggatgggttagtgaagggacagatagttggaagcgtagttgaatgagtgggtagacaaaaggagagatgagccaataaataagcaaatgaatgaatgagtggg

SEQ ID NO: 40696 - DNA, 1047 bp, Artificial sequence
  DNA replication origin
gactggggaacatccagggaacgcgggagggtacccggagcaaagttcccaattggacagagcggggtcgggcctcgaggggcgggagcgcttccggcaggggtgtccaagcgagtcgtgacctctgacccgccggagaggtcccaggcccaggcgccactgcggactcgggtcctgcctgctctgctcccctccgcgcaggcgcggccggcggcagttcccatggtgacgggggcgcgtccccgctcgaggccccgcccccagcaggctaggctgcgcggggctgcgggctcccagggcaggtgccgcgggctgcgggcaggtggcggcgcggcgcgggctggcggtggctccacggtaggttgcgcagcggctgcgggcagtgggggccggctggccgcctcctgtccccggccgacgaggtagctgggggtgacggcggctggcgagggccgccaagtttctgcccggccgaggccccgggagaaaagttggcaaagttggccggggaagaggcggggagccggaggatttccccagactccgggtctgcagggagggaggatcccggtttgggagccggggaatccgtctcccgagacttgagagtggatcccgcgggaagatcccgcacagggcaaccaatggatcacgtgccacctggttggcgacttgggagtcgatccctggaggggatcgggcgctggaggcctggggtcccactggatccccagtcaggggtgacggcgaagggtgattcgagactgggagcgagaggatcaatctcctcccatgccagcctgagccttgggaatggattcagagagatcccgtggctaggagctgagggatcgctggagatctgggttactcagcctggagctgctagggtctggacatttgtgcgggttggaggccccggaggtggaagtgggaagcaagggcggcgagcgagacggaaccctggtcgaggggagcccggaggacagcgcggtggttcggggggcgtgagaggggcggcgcgcggggcccctcggacgcggaggc

SEQ ID NO: 40697 - DNA, 1124 bp, Artificial sequence
  DNA replication origin
gccagcctgagccttgggaatggattcagagagatcccgtggctaggagctgagggatcgctggagatctgggttactcagcctggagctgctagggtctggacatttgtgcgggttggaggccccggaggtggaagtgggaagcaagggcggcgagcgagacggaaccctggtcgaggggagcccggaggacagcgcggtggttcggggggcgtgagaggggcggcgcgcggggcccctcggacgcggaggctccggacacgtcctctcggcctggcctgcgccccccctccgctcgtcttcccagggcggaggcgccctgatgggattaagcctcagtccccctgttaccaggcaggcccgcgtggtccccgccccgatggcggcgcggcccacccgggctcacgggtggggccctcgggatgggaagcggctcgttgacccccacccgagcctgaccttttcacaccctgctggcacaaactcgcctgggagtggggacgccgcgccttaaaaccctgctgtttgtccagtcccggagcaggcgtgtgacctccaccgcgcgacgcctaggtggctagggcttcctgcctgccgggactgaactttctctagccaggagcagccattatcttttggaagggaaaggactgtacctgttgcacaaagaaaaacactttctttgcaccttttttgtgaccttgggcaaaacacttaacctatctgaatccagatggggaccctctgggcaaaatgggcttggcctaggatggatcggaatgaagggtatgaaacaggtaggggctctataagtatcagtgcctccctcagtctatggcctctcctttcccgtgccccatcccctgtgcttgccttacagtatctaaagattccagaaaccctacttgctatcttttgaaaccgcaggattagagagctatttagcttaacctttcttccaaatgggttaattgcccctctgatccccccttgcagagagaagctctgaggtttggctaatgagtaaccaagacatttggacaaagcttctcccttggtctggctttccctctgctaatccatcaaggttcctggacaaacgtgtgcacccccagactctggcg

SEQ ID NO: 40698 - DNA, 996 bp, Artificial sequence
  DNA replication origin
caacactcctctataagaaaaacttaaaaacaaacccgggcggtgggtcctcctctcactttctgaggatgctctactctgtaacagggtagctttcaatcaaccatcccttcttactgcactccggaacttgctttgaattccttcctgtacgaaatccgagaaccctctcttggggtccgtttcaagaccctcttctctggtaacaatggcatatccacttcagcccccttggctagcagagcaataagagggagcccaaactggggccagcccatcagaaaagggggttatctgccccaaaaaaaggcatctctgagccaatcccagggcagagccaacccacagagcccttaagagtgttgtcagctgcagcacatttgaaatcactgaaaacacacaactagggagtggcgggtggcggggggcgggggtgggtgccggttgggagggggggaacagcaaacacattttccatcctctcagttcccagcctgacccaacaactgccctcctggccccaatcggttctctccaccatgcggaggggcagatggggtagatggggtcagcgaagacaggacccagcaagaagcagcagcccagtcgaaaagcctgaagtcctgatacaaccaacgcagatgcgtaaaaaaaatgccgtgctgcgtgaaaggagccagacacaacaaagccatgctgcatgagcccactgacaggaaatgtgcagaaaaggcaagactgcagagacaggccgcagacgagtggctgccaggggcttccgctggatggggtgggggctggggggagtgcctgctaataggtacagtgcttccttctggggtgaggacaatgttctgggctagagagtgatccctgggcaacttggtacatttactaaaaattgctgtacacttcaatcgagtgaattttatactctgtaaattatacttcaataagctattggaggaggaggaggaagaagaaaaaagaggagga

SEQ ID NO: 40699 - DNA, 985 bp, Artificial sequence
  DNA replication origin
gatggcacagtcggaaggctggccctgctccctgacggcacagtcggaaggccggccctgctccctaactgccagacagtacagctgaaaagccagccctgctcaccagctgacagtaccagtcagaggacagccccagctgacagcatagccagagcactgggtcctgctgaccgacaaaagtgcagcaaaagggctggttcctctgcactggcggcaccgctggagggatgatgccagctgcctggctgtacccctggcgctgcgtgtcctggctgactggctgatgagtgtcaagtctggggttaggccccgctaactgagggattaatagaagtggggcatgcagcgctcgcggctgccctactgaatgactgttgccataaacacaggggcccgccagggcctttctgacaccccttggctgacaggggccacagtcagcatggaggctgctaagggttgactgtctggtctcctatcagcccaggacagagaaatgcccggagagaaaggggctggaaggaggcagacaggatgccagagacaggcgggatggagagaggaagagaggatggcaggccaggcgcagggcagagggaggaaggtgggaggaaggagaaggaagttacaggcaggaaaggcatgagacagggagggaagggcaagacagggaacacagagggtgaaaggagaaaaagagaaagacgagagacatggagggagaggagagggagatgggtggggtaggggttctgatgggagagcgacaggcagggcaagggatgaaccccaaaggaagtcagagaaagtaagccagactgatggcccgggaggcgggcagggacaaagagcaccaggaacagccggggagaaagctggaggtggcagtgacaatggtgacagggcagggggctaagaataaaaagagacgttcaaaggtccaagacccggcgagtccaaggtggagacagagccaatctag

SEQ ID NO: 40700 - DNA, 1082 bp, Artificial sequence
  DNA replication origin
aggagaataacaacttcagccgccaggcggaggagaagctcaactacaaatggagctcagcaaggagatccgcgaggcgcacctggccgcactgcgcgagcggctgcgcgaggagctgcacgcggccgaggtgcgcaggaacaaggagcagcgagaggagatgtcgggctaagggcccgggacgggcggcgcccatcctgcgagagaacacgttcgggttttggttttgtttcgttcacctctgtctagatgcaacttttgttcctcctcccccacccccgcccccagcttcatgcttctcttccgcactcagccgccctgccctgtcctcgtggtgagtcgctgaccacggcttcccctgcaggagccgccgggcgtgagacgcggtccctcggtgcagacaccaggccgggcgcggctgggtcccccgggggccctgtgagagaggtggcggtgaccgtggtaaacccagggcggtggcgtgggatcgcgggtccttacgctgggctgtctggtcagcacgtgcaggtcagggcaggtcctctgagccggcgcccctggccagcaggcgaggctacagtacctgctgtctttccaggaggaaggggctccccatgagggaggggcaacgggggaggcgggtgatggtgtctgggagcctgcgtgtgcagccggagcttgttgaactggcagggggtgggtgggggctgcagctttccttaatgtggttgcacaggggtcctctgagaccacccggcctgaggtggacaccctgggccttcctggaagcctgcagttggggacctgccctgagtctgctggggagtgggcattctctgccagggacccatgagcaggctgcatggtctagaggttgtgggcagcatggacagtcccccactcagaagtgcaagagttccaaagagcctctggcccaggcgcctccgtgggacagccccgccgcccctccccaccagggctttgcagatgtccttgaaagacccaccctagagccctttggagtgctggcccctcctgtgtcctctgccctggtggaagtggcagccacaagtcctcctcag

SEQ ID NO: 40701 - DNA, 671 bp, Artificial sequence
  DNA replication origin
atagatgaatggaaggaaggagggaagaaaggaaggaaggaaggaagatcagatggacacattgatggacaagtagattgaaagaaaaattgatggataagtggataaaaggatagatagaaagatgcgtgagtggaaggaaaaatggatgaattaatggaaagaacaaatataggaagatggaaggaagaatgaatggatggatgggtaagtgggtggatgaatggatggatggatggatgcatggatggatgaatgggtggtaggtagttggatggatgaatgaatgggtagatgggtgggtgggtggatggatggatgggtgagtagatgaatggatgggcacatgggtgggtgaatgggtggatgaatgggtgggtggatggatggatggatgggtgagtagacgaatggatgggcacatgagtgggtgaatgggtggatgaatgggtgggtgggtgggtggaaggatgatggatggatgggtgagtggatgggcagactgacagacattcagatggaaacatgcagcagcagacaaacacaagatcagggcagtaggggcacatggctctgcctgaaaggattagagcctaggatatgggcaaatttcccagccccttcctgggagtctcagaacactcaagccccagcctccttcagcacgcctc

SEQ ID NO: 40702 - DNA, 895 bp, Artificial sequence
  DNA replication origin
tcccatctaggaagtgaggagtgcctcttcccggccgccatcccatctaggaagtgaggagcgtctctgcctggccacccatcgtctgagatgtggggagcgcctctgccctgtcgccccgtccgggatgtgaggagcgtctctgcccggccgccccatctgagaagtgaggagaccctctgcctggcaaccgccctgtctgagaagtgaggagcccctctgcccagcagccgccccgtctgagaagtgaggagcccctccgcccggcagccaccccgtctgggaagtgaggagcatctctgcccggcagccaccccgtccaggagggagatgggggggtcagccccccgcctggccagccgccccgtccgggaggtgaggggcgcctctgcccggccgcccctactgggaagtgaggagccccgctgcccggccaccaccccgtctgggaggtgtacccagcagctcattgagaatgggccatgatgacaatggcggttttgtggaatcgaaaggggggaaaggtggggaaaagattgagaaatcggatggttgccgtgtctgtgtagaaagaggtggacatgggagactttttattttgttctgtactaagaaaaattcttctgccttgggatcctgttgatctgtgaccttacccccaaccctgtgctctctgaaacatgtgctgtgtccactcagggttaaatggattaagggcggtgcaagatgtgctttgttaaacagacgcttgaaggcagcatgctccttgagagtcatcaccactccctaatctcaagtacccagggacacaaacagtgcggaaggccgcagggtcctctgcctaggaaaaccagagacctttgttcacttgtttatctgctgaccttcccttcac

SEQ ID NO: 40703 - DNA, 1260 bp, Artificial sequence
  DNA replication origin
agcgtctgtttaacaaagcacatcttgcaccgcccttaatccatttaaccctgagtggacacagcacatgtttcagagagcacagggttgggggtaaggtcacagatcaacaggatcccaaggcagaagaatttttcttagtacagaacaaaataaaaagtctcccatgtccacctctttctacacagacacggcaaccatccgatttctcaatcttttccccacctttcccccctttcgattccacaaaaccgccattgtcatcatggcccattctcaatgagctgctgggtacacctcccagacggggtggtggccgggcagcggggctcctcacttcccagtaggggcggccgggcagaggcgcccctcacctcccggacggggcggctggccaggcggggggctgacccccccatctccctcctggacggggtggctgccgggcagagatgctcctcacttcccagacggggtggctgccgggcggaggggctcctcacttctcagacggggcggctgctgggcagaggggctcctcacttctcagacagggcggttgccaggcagagggtctcctcacttctcagatggggcggccgggcagagacgctcctcacatcccggacggggcgacagggcagaggcgctccccacatctcagacgatgggtggccaggcagagacgctcctcacttcctagatgggatggcggccgggaagaggcactcctcacttcctagatgggatggcggccgggcagagacgctcctcactttccagactgggcagccaggcagaggggttcctcacatcccagacgatgggcggccaggcagagacgctcctcacttcccagacggggtggcggccgggcagaggctgcaatctcagctctttgggaggccaaggcaggcggctgggaggtggttgtagcgagccgagatcaagccactgcactgcagcctgggcaccattgagcactgagtgaacgagactccgtctgcaatcccggcacctcgggaggccgaggctggaggatcactcgcggttaggagctggagaccagcccggccaacacagcgaaaccccgtttccaccaaaaaaatatgagaaccagtcaggcgtggcggcgcacgcctgcaatcgcaggcactcggcaggctgaggcaggagaatcaggcagggaggttgcagtgagccgagatggcagcagtacagtccagcttcggctgggcatcagagggagaccgtggaaag

SEQ ID NO: 40704 - DNA, 1598 bp, Artificial sequence
  DNA replication origin
ggcagaggctgcaatctcagctctttgggaggccaaggcaggcggctgggaggtggttgtagcgagccgagatcaagccactgcactgcagcctgggcaccattgagcactgagtgaacgagactccgtctgcaatcccggcacctcgggaggccgaggctggaggatcactcgcggttaggagctggagaccagcccggccaacacagcgaaaccccgtttccaccaaaaaaatatgagaaccagtcaggcgtggcggcgcacgcctgcaatcgcaggcactcggcaggctgaggcaggagaatcaggcagggaggttgcagtgagccgagatggcagcagtacagtccagcttcggctgggcatcagagggagaccgtggaaagagagggagagggagaccgtggggagagggagagggggagggggagggggtgagggggagggggagagggggaggggaagagggggagggggaggggaagaggggagaggggagagggccagacacagttctaagcactttttacatgttacagcattgctctcacggcaatcccgttaacaacactgaggcagagctgagacacagagagattagacaacttgtctaaggtcacacagctcagaaggactggtctcgggcttcttattcaggccatttgacttttgagcccatgctctgaaccacaacaacaacaacactgtcacttttctttagagtgactccctgaccagcagtccccatagagaaatgtgtttccactcacatatcgaaaggagagtacttctctactgaacatcgtttcagtgctaatagctaatagtttaataaaaccaaagcttggcatcataccttttggcagatctttttaaagttgtcatatatagagctgccattaaagtttgtaaagctttgtggataaaagtagcatgaaaagcagctcgtatgatgtgtgtgacaacaaacagaattgtgatccaaattacaggtgaaacgggacagtggcctcccagggaggctagaaatacctgcagaggcttacagagtgagatgtttgtaaataaagccattcaaacatcaattgtgtgtggttttcttgagaagcaactgtatttaagggactccttatataaaatcaagttcttcttagcaaggattgctttaaatattcggacttgaatgaaggccagccatgttctgccattttcaaaaatcttgtaattgaagtcttagagttgattttcttttcatttgtgattaatttcccagaataacattcccagctcccaccccacccagcatttacagtccagagattgagtgtaggaagtcttagtaaagcccgaaatctaaaacaaataagaccagtcagttctctagttagcttttttcctttcaagtcgttagcaatataaactctggaaagcctaaactttaatgcacccatctcagcaacatctcctataacgatggaaaggcatagaaaagaagaaaagggaacattattaatcttgtgggaacgctggagttttgtctattttcacaaacagcgtgagccccaagtcatttaaatcctctgggggtgggagacata

SEQ ID NO: 40705 - DNA, 1459 bp, Artificial sequence
  DNA replication origin
ggacgcaggaggtcgctgacggccgcttggggacggcggcgtggggaccagcgcgggccggggcagctggtacctgggatcgggcaggacggtcctcttgctggcgcgggcggccggagtcgccttgctcttctccatggccatcaggtaactggcatctgccagcacagcctccgggtccgccacgttggcgagttttggcggcggcggcggttactcggacccggatgggacgcgctgccgccaccgccgccgccgccgccagctgagccccgacctggtgggactggggcagccccagggcagcccctgctcggcgcgccccaccagcgccctgcaagcgccgcaggctgtagcccgccggggtcgcagtgcgccttccgctccgccgcctcgcgcgccgccccccagctcattccgcgagggtctgcggggagctcgcggcccgacggtcggtgcacctcagcgcacagtcccagcggccaggcttgtcccgcgcctctcgaccaagtctctacggtagccctccctcccttcggggtggccacaagggactcctcctcctcctcttcttcctcccccacctctccttcggcctccgcctactccttctcctcctcgttcgctgctccgacctcctgcccccagctccatgcgttctcatgcccgcccagctcatccagagaagccctgggccccgtgcccactactcaaggggcatcggggaggcctctgctacctggacacagtagttctcaaacgggacagcatcaatcagcatcctccaggaggtctgggatgaccccggaaatgcatgtgtcccacctgtccccgcaggtaatgatgaagcccctgctctggtccaagctacctgtgaacagcgcccagcgggccgggcccccaacctcgctcctgaacgtacccgcaagcccgccgtgagaattcagcgaagagtaaaggctggagaaagttgcgtgtctcaggctaagcagagcaaagtggggtgagggcttcgccgctaggaacagagatgcccttagggagccccctgatggaagagctctctgcttaagaaggtcagcacgcccttacactcaggtgagaggttttagtttgggtgttgaaatagaaggagagagagtattcctgcccttagggttttacggtcaatacaagagacaattagggagcatctgctgcgagcacgctcgcaccacgagggtgatttagggaagtggaaaagcaagatacagcccaaacaccgaagctggggggtaatttccagcttcccaatcttccgtctcggtgtctttcatcatcacaccactccgctgcctggggttttcagttgcttctaatttttctacagtttgcacacaagtccgcattcagtattcatgtgacactcaggctggagtggtggtaagggacacgcaggcagtcttaggaagacttaacc

SEQ ID NO: 40706 - DNA, 863 bp, Artificial sequence
  DNA replication origin
gtggggcgcgccgagcaggggctgccctggggctgccccagtcccaccaggtcggggctcagctggcggcggcggcggcggtggcggcagcgcgtcccatccgggtccgagtaaccgccgccgccgccaaaactcgccaacgtggcggacccggaggctgtgctggcagatgccagttacctgatggccatggagaagagcaaggcgactccggccgcccgcgccagcaagaggaccgtcctgcccgatcccaggtaccagctgccccggcccgcgctggtccccacgccgccgtccccaagcggccgtcagcgacctcctgcgtccgggagggtcgggcattgagtcgtcgctgtcctgggtgcgggtgacaccgcggaactggcgatgcggggccggcctccccgttccagtctctgaaatggggcatcggatggccggtgggggggactccgggagagagcgctccaaagtgcccagcgcggcgccctgcgcgcagcgagcgccccagggaggggctggttatgacttggctggaccagctccatccctgtcgccccctccccccggccctgtcctgtcctgtcccatccccgtggttcttcctgttgcattggtgtggtccctgtgggctcgttgcctgtcactcctttgcgctccttcttggtcgctgcttcttccccggctctgtggtccccctttccaactccatcccctcagctccctctgggccgcttatctggggactgcaggcttgttgcttactgtccgaggtagttaaactgctgttttcagtgcttgttcttcttgaagtccctaagtctagtcaccttcttaggctcttcttctattttgtgcccagg

SEQ ID NO: 40707 - DNA, 899 bp, Artificial sequence
  DNA replication origin
ggtctaggggccagggcatgagggatgctctgggctggctcagccccgggcccccatgcggattgtgactgtgggggcatggccacatgatgttgaggggggatctctgaccctgaccttcttggctctgtgcatccttgaaaccagaaaggtctggaacaaatcagtgaacaatgccctaactcggggagggagccacatcctgaccccagcagcctcagaaggatccgtgtcagggttatggggcaccctgggggccccgagtctgcatgggtctccacatgcaacttctgccggaaactctgaaaaatcccaactggggggtcataggacacaatcagaaatgctgatgccactgtgtgtggatccccgggccctggggggtcaggagcatgtagaaggtgggccacagggggttcataagagaatcctgtaaccgcccctgccccccaaacttagaagcccactggagggccatgggtgaaagcttgggggggtgtcctgtggagtgggtggtggggggtctttgggtttacatgctgctgggcctgagcagcaggaccccgtccacagctgatccctgggccctgctgctcagctgctctcttgagtgttgctgtggctgccgagagagcctgagtcgagcctctcttgtgccggccgtacgctgtcaggccacgctggtgagtttggcaaggcacagatgcccagagcagagaactttccttggggatttaatatgtgcgaatcttgaggtccggcaaatctttccctcagctagagagggggtttttgagactagaatcacctcagcatcctcctgtccccagctgtgtccagcctgtctgcagggacatcctgagaggactaggctctcccctcatccacctgcgtaagtg

SEQ ID NO: 40708 - DNA, 899 bp, Artificial sequence
  DNA replication origin
gcccacccccacagggaccagggatggagatttctggctaagtcattacggaaggttaggactttgggactcgggtggcagctgttcacagagcaggacacaggagggtggggctctctggagctgtttcctgttgagaaagtcatggtcacaaaacccatctacacttggggcagtgtgagggagggggaggttcattttggtttgtttgttgttccagttaactccgtattttggggctgctacaccccagctttcccctggttagaatgaggtgctggaagcattattgagttccattcaattgctgttggtcatagaagggcttgggagagtgacaagcttggccatcctggcaagagggacagtgatcctgtggaagctgcaaagacaaaacaggccttttgcccaggagcccactgtctctggggttgccatcactaccatgcaggcaggtcttgactcctgccattttagtgtggggggcagccttgcaaaggggtgtccttatgggcctcgaggagctggggagtgttttctaatcataggagcttggtgggagggagcaggtggtgaggatgccactccatgggcaggtcacatctgggtgtgagggtggccaggaaggtcacggctggttttggggaaattgcagaccgtctggccaggctgagggcccaatgtggagggggccagcgatgaggtaggtggagtggtgcctgcggggaggtccctgatgccacttgaggctggcgtttgggcagagggacacactaggggctgtcacaggagacgaggcaggatgcgactgattcagaaataagtgatggtccttttctggaaccttctctcactctgtcctggttttcccagtccacactcgctgtgaggaggacaat

SEQ ID NO: 40709 - DNA, 846 bp, Artificial sequence
  DNA replication origin
agaggacccctctgcagggcttgtgtgggctgttctagggctcagcagtggcaaggggattcccaagggaggtcgcctcattttcaaggcccagaagaagttgcatgtatatatatatatatatatatatatatatatatatatatatatatatgcatactaagatagatatatatgtatatgtatttttaacagagacaagatcttgccgcattgcccaggctggtctcaaactcctgggttccagtgatcctcacaccttgacctcccaaagtgctggggcacagatgtgagccaccatgcttggccctgcaagttgcatatttatcaatgaataacctgctcaaagtcagcagttctcagcctgggggccacgcagggttgggacagagtccctgatggggaaatgcaccagcttctgtgacagtggggctgtggctctggggacagtggcccacccccacagggaccagggatggagatttctggctaagtcattacggaaggttaggactttgggactcgggtggcagctgttcacagagcaggacacaggagggtggggctctctggagctgtttcctgttgagaaagtcatggtcacaaaacccatctacacttggggcagtgtgagggagggggaggttcattttggtttgtttgttgttccagttaactccgtattttggggctgctacaccccagctttcccctggttagaatgaggtgctggaagcattattgagttccattcaattgctgttggtcatagaagggcttgggagagtgacaagcttggccatcctggcaagagggacagtgatcctgtggaagctgcaaagacaa

SEQ ID NO: 40710 - DNA, 1243 bp, Artificial sequence
  DNA replication origin
cctcccgggtggcctctgttctgcctggtgaaccgtgaccctctcagccctctccctctgccctgtggctccaggagctgtggggttactgaccttctttctggaagggtcagctggtgtctctctggctaggagggggcatctgcagcagtgggagaggccgaagatagcagcctgctgggagccctctcccagggccggcctgcggtcgcttaccagcggctgccgcggtcatcgtgtcgctgggacctgtgctcctcccatcctcgccttccctcccagcatgggtccctgcagctccctcacctcccaaccaggcatccagccacatttgtgagcccttgtgcaccccacacagctggtatagcccagtctctggccctttcagtgggtgggaggagatggtaaataaatagtattcaagagggacgtgtgcgtggggggataaagcagtgcctggaggctgtggcgaggggcttccatcggagctcaggtgccgggaatgcctcttggtgacttttgagccgagactggaagcagatgaggctgagaaccatgtggctatctggggaaagtgcggtccaggcagagggatcagccagtgcaaaggccctgggctagtttggggtggggcttatttgaggggctgcagcagaatgtaggggaacagggcccaaggtgtggggagaggacgaattggtcttgagcagaggaggtgccacgtctgactcgtgctggagggcatcccctgctggttggagcaagagctgtgcacatgtatgtgcctatgtgagcaggtatgtgaggtggttggcatgggggcaggagccctgtccacagttattaccgggatccttgcaacagaaggcagcagcggggacccctcacttctgggggtgacaagtggcaagatacgggatctgttctgaagggaaagccagcttgacttgcaggcactctgcatgtgggttcgatagaaagacgagacaaggatggcatggtgctgctctgtgcctcggtgtgctaggtgtgctgttgggaggtgcatgatgctcagctgggaggtgctaggtgcttgggaggtaatcggtacttggttgggaggtgtttggcacttgggtttagacagatgaataaggacatatacccaccgttacgtgtcatacaggatagttccactgccctgattttctgtgcaccactcattcatccctctcctctcctcaaacccctggcagccact

SEQ ID NO: 40711 - DNA, 898 bp, Artificial sequence
  DNA replication origin
taacctgatacctgatgtcaccaacacatctgggccatttggagtgacccagcaagtcctttgcttgtctcccaggacttcccagagtagccaggcagagccctgggccagttcccttgtggggctgggccgtgcccagagcacaggcaggagaacagctgcctccccgcctgccccagggccttggtgtcagggccatggcccccagctctgcagtggagcaccagggacctgtctggcccatctccctgttgagtgaagaccaggaggcacctgtcctgttctgtgtgctcagaggtgtctaaaaccagctacctcttttctttttatcttttgcgagtgatttcttatttcctgcttcacccccaagcgtgcccccagtatgtttcctgttcgcctgcttccctcacctttgaaatgtggtccctgctcgggaaacttgcctggacttcagttaattatggttttcctccgggctgtgtgtgtgtgtgtgtgtgtgtgtgtgtgtgtgtgtgtgtgtatgtatgtgtgtgtgtgtgtatgtgagtttgagtgtgtgaatgtgtgtgttaagatgagagagagttggatggggggccaggggccaacaggaatgggggtggctgagctgagaggccaagggcaggttccagtttgcattgggagcctgagctggtgagtgtgaggtggggagatgtaaggtgtgtgtggggagtggggtgctgtctgggtggctgggctgggagagggcaggtgggggccaagctggaagaagtggtgttattctgcagcatgtgacatgcacagaccttgggggtgcagctccaggctttctctctccccacctacccccgaaggtcccactctccaccttctgcagccagcctccgttttgtct

SEQ ID NO: 40712 - DNA, 1422 bp, Artificial sequence
  DNA replication origin
ggatccccccgccgtccctgcccgggccatccccggggacgccgcgtcccgggccggtgaggagggcgcgcgggcggcgccggccggtcctcacctgcccgcgcccgtaggaagccaggagccgagcccgcgctgggcccgtgtggcccgggccgggcaccaagttgggacttggggcccggaggcgggcctggcccgggaagccggttcgcgactctgtttccagcggccgcgcggccggcccgcgtgctccgaggaccggctgaggttgcagcgagaaagttctgagcccgggtgcggggctgcctggccggtggcgctgcccctgtgagccgtggctgtgggtttccaagcggactgacacatgccaggtgccggggcgacccgaatgccccttgtggccgccggggtcccagatggtgtccctccccgggtcggctgcccggaggggggcggggggggtggtgacatggtcccagagcgcgggacagtaggggaggcaggttcgtgcctcagttgtactctccagtggggagagagtaaggccgggcaactttgtctccaacttttggtgtttcccaaggggtggagttgaggtcaggaggactcaggacacttaagcagtttgtgaaacgctacacatgttcttttaatttggagatggccatgtggtttttgaagcaagcctcttgctgcctaaatcattctcttcggatgtgcgtgttttgcttttctggagtatggccagccaagtggcacggcccgcaagtgcctgtgcacgcctgggctcctgttctgtttgtggcagtttagctgggaggatcttgggcccctttgtctgtgcctccttaaggcaaacagctgtctccttgaatatttccagtgtggatggtgcaggggggtggccgtgtagtctgttcccctgggctgcagcctctcttctggaggtgtagggggcagcggggaacaggaggagcttggcctttgtttcaagtcctcctacctctgacccaaacctagagattctgtggacagtttcaccccaaatttgcctctctcaggagcgtgtttacattttggggccttgtcgggagctagcaaaacaaggtgaagacaaaacagcgacagtatctggggagtacaggccagcaccgttcctttttccggaaatgcgtgggtcaaggaggcaaaaggggttttgaggaagctgtttgttttaaagggggagtttctaggctgaccacgtttgcctttcacctcattgcagtttgggttttgtgcacgttttaggtgatgttgctggaatcaaatgtctgtcgttcatgtggttggagcccctaaggagaaagaactacagctgtggagttcagttgtatgtgaggcaaaaatagagttgattattttaacattaggcagcaaggc

SEQ ID NO: 40713 - DNA, 1957 bp, Artificial sequence
  DNA replication origin
tactagcagcccgcggtcccgggtcggcccgcgcccacctacctgcggcgggggccgggcagccgcacagcgccagcagcagcggccacggcggcccgggcagtgcagcctccatgttgtccagcggccggacgggctggcgccgcgctcactcgggctccacagcgcggcggcggcggctgcggcggctcctcgcgcgtgtccctgcatcttcgtcttccccgttgggcgccgcggaccaggacgactgggaggagggagcagggcgcgcgtgagcggaagcagcgccgcgtctccgccccccgctgacgcagccgcccgcgccccagggagccggccggcggccgggcgggccccacggccccagcggcccgggtccccgcggcccctccccgcgctcctcgccctgccctgggggcgccgccgggaggctcggcgcggggctggggcgcggggtttccgccccgcggggcccgggggcagatctgggccaggagcccggtgtgttacctgtggagcctctatgagtggggaaactgaggcacggggcggggctgcccaagggcacacagcgaggcagtttcagggcaggaagcctggggtcccatggtgcggccctgacacttgttctcacctgtggagggcagaggaggggacagggagagaactgcatgaagctggccagctgggagtggaggtgggtttgaatttttactttaaactaaatgtgtactctctaccttaattatgaattatgagacacgaagactgcgaaacagacacgctcctctaaaagtgcctctaggctgacaggggaaaagtcccgccaggcttccagacgccacctttgagtccttcaacaagcaggccaaggcctcttgcccaccggtgtcagctcagccactgaaccctcgaggaagaagaggtgctcgaaggggaagaatctcacccaggcacagcctggaaggggcacagaaggggctctggaaccagcaagcccaagttcaaactcccgatctgctactttctagaacgactgtgcccttggcgggtctaaatagaacctctccgggcactccttcctcccttgtaaagtgggaacagcaatggccaccttgcaggttcagagagggcttgcaatacctcacagaactgggtgcccgcgaacgtgtgcgttcctccagatttgtgacaaatttgccaggctggcgtgaggctgaacgcctctgccctcatggggtttaaattctaggaagggagaccgacaaaaacaagaagacaaaattaaaacaacaaaaggcccattgacagaacatgaagaatgtcatgaaaaatgaagggtgttgggctgcagtgttgggaaactctggcttagggaaggaaggacacttgagctgccaccaaggagcagctgtccggcagaagggcagttcaggaagagcacacatcaatagaggaggccctgcggcaggggccagcgtggtcaatggactgggaggaggaaccacatcaggccacgagctggagctgaggggtggaaggtggagctgggggaaggaagaggccagctggggccagcacatgtcagacctcaggcagggaagaggaattgataatgtaccccaccagcaatgggaagacaggctaggatttaagcagcaaaaatcctttcccttcttgcaccctgtgtccacctctacctcgacccccttccgcctgacctcatggcagccagggaagctccagggtttgtgagggccgccatctcaggagagaaacaagggtctcgggcaccttcagggccggctccagccacacttattccctgacctctcagcctccttagccactctcccttcccacatctcaccctgctacagccacagtggcatccctgtgggttctcaaacacactaggcacactcctgcctcagggcctttgcacttgctgttctct

SEQ ID NO: 40714 - DNA, 2034 bp, Artificial sequence
  DNA replication origin
tgcaatcttggctcactgcaagctccgcctcccaggttcaggccattctcttgtctcagcctccagagtagctggaactacaggtgcctgccaccacacccagctattttttgttttttttttttctatttttgtagagacggggtttcactgtgttagccaggatggtctcgatctcctgacctcgtgatttgcccgcctcagcctcccaactgtcttcctgtttttaaggaaaaaaaaaaaaagtgggtagaagatgaaagtttgatatttcgctcatgcatagctttgtctcattaatatattttgtgcttgcctgtcatttcagctttctgctgccagaccaagctcctttgactgccattcctacttctgacactcctcttgtccttttcaggacaactttatgcctattgtgccttggatcttgagaaatatgtggtaaaactggccagtggtgatggcaggcatagcagggaatcagattgaggggggctgccgggtgagagagaaaacaaaagagggaaacaggctacttgatgacggaatcaggctgcttctgcaatgacattacatgaaataatctgaaatacgatcttaactgtatctggtgggtcccgttaaccctgtaagttatggacagaacatttactcaaattgtagccaagtctaggctcatgggaacacgtgaccaattcaggtgaatgaaagggactttaaaacattaatttccagcttaggtcttcctaagactgcctgcatgttccttaacaccactccagcctgagtgtcacgtggatcctgaatgcggacttgtgtgcacactgctgaaaaataagcaactgaaaaccccaggcagcggggtggagtgatgatgaaagacaccgagacctatcgggaagctggaaattcccccccagcttcggtgtttgggctgtatctcgcttttccacttccctaaatcacccccgtggtgcgagtgtgctcgcagcagatgctccctaattgtctcttgtatttgtagcaggatgagcagcaaacaaaactcctcagacaccgagttaaagaaggaaggggtttattcagccgggggcatcggcaagactcccgtctcaagagccgagctccccgagtgagcaattcctgtgccttcaactctaagtgggtgcgtgtgagagggtcgtgattgattgagcaagctgggggtaagtgactgggagctgcacgcactgctaagtagatcggaacaaaacaggatagggatttcacaatgcttttctatacaatgtttgtaatctctagataacataaccgattaggtcaggggtcgatctttaactaccaggcccagggtgtggcgctgggctgtcggcttgtggatttcatttctgccttttagtttttactttttctttctttggtcgcagaaactaggtataagacaatatgagaggtggtctcctcccttatattgacagtaaaaccccaagggcaggaatactcttatttctcaacaccatttcaacaaccaaactaaaacctctcacctgagtgtaagggagtggtgaccttcttaagccgggagctcttccatcagggggttccctaagggcatctctgttcctagcgggggagccgtcaccccactttgctctgcttagcctgagacacgcaattttctccagcttttactcttcgctgaattctcaaggcggggttggggggatgttcaggctcaggaaggaggttgggggcccggccgctggacgctgttcaccggtagcccggaccagagcaggagtttcatcaccacctgcggggacaggtgggacacatgcatttccggggccatcctagacctcctggaggatgctgattgacactgtccagtttgagaactactgtgtccccggagcagaggcctccccattgcccttgggtagcgggcgtcgggcacagggcttctccggatgagcggggcgggcatgagagcacatggaactgggggcgggaggtcggggcagccaaggagga

SEQ ID NO: 40715 - DNA, 1399 bp, Artificial sequence
  DNA replication origin
ttgtattttttttttaatagagacggggtttcaccgtgttggccaggatggtctcgatctcctgaccttgtgatcggcccatcttggcctcccaaggtgctgggattacaggagtgagccactgcacccagccgacaagggcagatttctaatggatcatgttcaccagtgaattcctggcacggtgccaggcacatagaaggcactcaataaatagtgaatggatggatgaatgggcagatgggtgggtgactgaatgggagtgtggatgggtggatgaagagatgcatagatgaatggatgggtggatgcgtgggtggatgtgtgggtggatgaatgggtaggtgagtggatgggtgggtggatggatgagtggaaaggtgggtgtaagggtaggtggatgggtggatagatgaatggatggatggatgaatgggtggaagggtgggtagaagagtgggtgagtgggtggatggatggatgggtgagtgaatgggtgggtagatggatgggtggatggatggatggaaaggtgcgtgaaagggtggatgggttggtggacagataaaaatggatggatgggtagatgggtggttgaattggtgggagagtgggtggatggatgggtggatgggtaggtggacggatggatggaaaggcgggtggaagggtgggtggatgggtagatggatgcgtaagtggatacaaggatgggtggatgatagatggatgcatgaatggatgcatggatgagtggatggatggatggatggatgggtagatgtgtgggtggatggaagtgtggatggatgggtggatggatggatggatggacggatggatggatggatggacggatggaaaggtggatagaaggatgggtgtgtgggtggatgggctggtggatggatggatggaaaggtgagtggaagggtgggtggatgaatggatgggcgggtggatggatggatggaaggatggatggaaaggtgggtggaagggtgggtggatgggcagatagatgcatgagtggatacaaggatgggtggatgatagatgaatgcatgaatgaaggtatggatgaatggatggatgggtgaataggtggagatgtggaaaggtgggtgggatgggctgggtggatggatttgtaggaaaaaaaatgtaagctttgatttctgaaaacctagatctccagccttggccttatgctcgtgtctctaattctcctccctctctcatcttggtgtgcatagcccaggtagctgtgagtgcaaagaacaataggataaacattcagcactctcctgtgggtattatttttagtttccatgctgcagaggtcagagtgtcaaataacaaagagagatcttttcttttctctctcaaggaaagaatc

SEQ ID NO: 40716 - DNA, 1587 bp, Artificial sequence
  DNA replication origin
ctgacatcggccagcacagcctccaggtccgccatgttggcgagctttggcggcggcggcggcggttactccggacctggacgggacgcgcgcccgccgccgccgcccgccgcgccccgacctgggggggccgccccggggcagcccccccctccgcgcgcccccgccccgcgcgcgcgccgcgcgccccactagcgctctgcgcgcgccgcaggctgtagccggccggggtcgcagcacgcctccccgctccgccccctcgcgcgccgcccggcgccccgcgcacgcgcgccgccccctgctccttcagcgagggtctgcggggagcgcgcgtccaacggtcagcgcccctcagtgcacagtcccagcggcctcgctgggccggcgcctcccgaccaagtctctacggtcgccctcccctcggggtggccacgagggactcctcctcctcttcctcctcccctccctccccctcggtctccgcctcctccttctcctcctccttcactgccccgacctcccgccccaggttccacgcgctctgatgcccgccccgctcacccagagaagccctgggccagacgtccacaacccaaggggttatggggaggcctctgctccctggacacagtagttctcaaactggacagtgtcaatcagcatcctccgggaggtctggggtggccccggaaatacatgtgtcccacctatcccagcaggtaatgatgaaactcctgctctggtccgggctaccggtgaacagcgcccagcgggccgggcccccaacctcgctcctgagcctgaacatccccccaaccccaccgtgagaattcagcgaagagtaaaagctggaaaaagttgcgtgtcttaggctaagcagaacaaagtggggtgacggctccccggctaggaacagagatgcccttagggagccctctgatggaagagctctccgcttaagaaggtcaccactcccttacactcaggtgagaggttttagtttgggtgttgaaatggtgttgagaaatagaaggagagagagtattcctgtcgttagggttttacggtcaatacaagagacaattagggagcatctgctgcgagcacactcgcaccacgagggtgatttagggaagtggaaaagcgagatacagcccaaacaccgaagctggggggaatttccagcttcctgatcttcggtctcggtgtctttcatcatcactccaccccgatgcctggggttttcagttgcttatttttctacagtgtgcacacaagtccgcattcaggatccatgtgacactcaggctggagtggtggtaagggacacgcaggcagtcttaggaagacctaagctggaaattaatgttttaaaatccctttcattcacctgaattggtcacgtatttccatgagcctagacgttgctagaatttgagtgaacgttctgtccataacttacagggttaacgggacccaccagatacagttaaggtcaaatttcagatatttcatgtaatgtcattgcagaagcagcctgattctgtcatcaaatagcctgtttccctcttttgttttctctcccac

SEQ ID NO: 40717 - DNA, 999 bp, Artificial sequence
  DNA replication origin
gcgcgcggcgcgcgcgcggggcgggggcgcgcggaggggggggctgccccggggcggcccccccaggtcggggcgcggcgggcggcggcggcgggcgcgcgtcccgtccaggtccggagtaaccgccgccgccgccgccaaagctcgccaacatggcggacctggaggctgtgctggccgatgtcagttacctgatggccatggagaagagcaaggcgaccccggccgcccgcgccagcaagaggatcgtcctgccggagcccaggtaccagctgccccggccggcgccggccccaagccgccgccccctgcggccgccagctaccccctgcttcctggagggtcgggcgctgagcctccgctgccccggggcgggtgacacagcggagcgggcgatgcggggccggcctcgtcgttccagtctctgaaatggggcatcggagggccggtggggggcaccccgggagagagcgctccaaagtgcccggcgcggcgccctgcgcgcagcgagcgccccagccagggtctggttatgacttggctggaccagctccatccctgtcgccccctccccccagccctgtcctgtcctgccctgtcccatccccgtggttcttcctgttgcattggtgtagtccccgttggctccttgcctgtcactgctttgcgctccatcctggtcgctccttcttcccgggctcattggtccccctttccaactccatcctctcacctccctctgggccgcttacctggggactgcaggcttgttgcttattgtccgaggtagttaaactgctgttttcagtacttgctcttcttgaagtctattaagtctagtcaccttcttcggcttctcttctattttgtccccgggcaggattttgacccactcagtattctttttggtgccaagtgtgtcacctgagctgctttcctcaacttgtagatctactggtggcactttattaaaaaattgaaacaggagtcacttaaaaa

SEQ ID NO: 40718 - DNA, 918 bp, Artificial sequence
  DNA replication origin
attttgtcgtgtcccctcctgctagggaggaaggacagaaatctcagagtggaacagaaaaaatacagggatttaggcacttaggttatctttacctcctcctgtgtgaccttgatccaatttgttaacctttctgatcccaactaccacacgccctgtgctgtgactaacaccaaacagatgctaagtaaataccagtgccccctgcacactctgccctacccctgaatgtacctacttgagccagcttcctaggcttccacagcttgccaccacgacatagggcacgtctgaggcttggcctggcacccacagattggtcctctcttatcatcactgatgtggagctttgatgggaagctgagcatgtgtgggaggagtcaggcacaccttggggtaagtctcaccttggctttcttgctgggggacctcagacaagtgtctcgacctctctgagtctgtctgttctgtgggagtgatgccaaccatgtggtcctattgtgggaatgaaatgtgatcatggattttaatataatgaaattccaggtccagtaggaatataagggtcatgggggagtttaggagtaaggatctatatcggtgcttggcacacggttggttctccctaaatgttctgtgaattgtcttgtgctgggtgctgggctggggtcttcagtccggttttaaccgtggagtaaagggaaagtgaaaatctgattgagagaggttaccagggatccagcacatgcttgttatgtgggtgtcctctcactgcacggctaggaaaactgaggctcagagagctccctggggtgtcaaaggatgtgaactcaggccatgataaacatgctttcccattatgtgtggatgcagacagcacagggggacatcagaaatctctgcccacagacttgctgc

SEQ ID NO: 40719 - DNA, 1806 bp, Artificial sequence
  DNA replication origin
actctggccatgcttgaggagcccctctctaggctggccgaggccggagccggctccctctgcttgccgggaggtgtggagggagggacgcaggcgggaaccggggccagtgcgagttccgggtggtcggaggctccgtactcggagcggccggctcgcgccgctagccccggacagtgaggcgcttagcacccaggccagcagctgcggagggtgcgctgggtcccccagcactgctggcccgcccgcgctgcgctcgaattctcaccgtgcctcagccgcctccccgcggggcagggctcaggacctgcagcctgccatacccgagccccccaccactggttaggatcgcgcgcggccagagcctccacggcaccgcgtcccatggactgcccaagcgctgatcagtgcgggaagctcagcccgtggccccagcgcaagatccacaaggcgaccccagctggcctcccggtcggcaggggcgggtgtggggggggcgggggttgctggattggagaactttcatgtctagctaaaggactgtaaacgcaccaatcagcagtctggcactctgtgtctagctaaggatttgtaaacgcaccaatcagcaccctgtcaaaacagaccagtcagctctctgtaaaacggaccagtcagctctttgtaaaacggaccaatcagctctctgtaaaatggtccaatcggcaggatgtgggtggggtcagataagggaatgaaagcaggctgccagcaccagcactggtaacccgcccgggtctccttccgcgttgtggggtggttgtgttttcgctctttgcaataattcttgctgctggtcgattgttgggtctacgctgcgtgtgtgagctgtaacactcaccgcaaaagtctgtagcttcactcctgcagcaggcgagaccacgaacccatcaggaggaacgaccaactccagacgcggtgcctttaagagctgtaacattcaccgcgaaggcctgcagctttactcctgaagtcagtgagaccgcgaacccatgagaaggaagaaactccagacccgtccgaaagtcagaaggaacaaactctggatataccgtctttaagaactgttaacactcactgcgagggtccacggctttattcttgaagttagcgagaccaagaacccgccaattccagacacagggtctttatgttgcccaggctcttttggaactattggcttttaagtgatgctcctgtcttggcttctggaagtgctggtgtttcaggtgtgatctgctgtgcctgaactaacaaatgttgattgaaagctaagtatgtgctaggcactaaggactacagtaagtgaagagaacgcgttgagaattctggccttcataggggctgctctggaggaggagtagggtgggattgggagttaagctgcaatttaaatagggagtgagcacaggcacattgagaagactttaggtgacgatgtgagccatgcagcaggaaaagcatttgaggcagagagaacagcatgtgcaaagttcttgaggtgagaatgtgcttggaagggcgtatcctggaggtcagtgtaattgacagggaggatagaaagggagggtcgctaggacaggtggttatggcgggggcgctacaaagacttgggaatgtattctatgagacaggtgctatgttacaactggacattgtggggtagtgggggaaagccttgagggtcccatggaaccactactcagatccagtatgtgtacgcggaaaacagtttcaagtcatctcctggctttggggttgcgtttt

SEQ ID NO: 40720 - DNA, 1650 bp, Artificial sequence
  DNA replication origin
tagttggaagaagcagacataaacagcgcaaataagtaacaatataatattcagatgctgagacgtgcaatggggaaataaaacagcgcaggaggacggagagaacatggaacaggagctgggggcagatgaagaggcatcgcaattttaaactccttgttcagggaagaccttgcagagattcgagcaaaacctggataatagagttgtgtgttctcttgttcatgtctccaaattccattttgcaggtgattcggtttatagggttgttgtgggaacaggatctgacacttaataagtacgcaataaatatcatctggaaaacgagctcgaaggagccgccattcagatgccaagtcagctctgggtgtgtggggagcgtcagtgctcaccctccaatcccaagctgtcacaccgaggctgctgcatctcagaggccccatgcagagcaccttctccttcaggtcctgggaactgctaaggctgaggcctcagaagttgttgggccttcagatcaccagaccctgacccagactgctctaattagggacatccaacagagatgggggcaggtggggagagagagagggaaagagaaaagtggggagaggaagagaaagaggaaagagagggaggagagggagaggaaagtgagacagagaaagaggaaggaggggagaagagagaggaagagaaaggagaaataggaggaagagagagagaaaaaagagatggtggagagagaagaaagagaaagagggggagagaggagacagagagataaagaaagggagagagaggtgagagacagacagaggaagagagaagagagaggggaagagagaggaaagagggaggaagggaagtaagagagagtggaagagagagggaggaaagagaagaggagagagggaaggagggggagagagcaaagagggagagagaaagtagaaagaggtaagaaaagagagagaaaagagaaagagggatagaggaagaaggaaagggggagatggaggaagaagaaggagaggaagtagagggaaggagggagggagagagaacagaaaagcagtgcactaggaggtaggggattgtaactcattggagagaagcaggtagaactgtggggcctctgaagtgggttagtggctttgacccaggtggctagggtacagttcctccaacatctccagctcctccctgctgccctatcctgactacattcaagaaatggtccagggcatggatttgggatataggtgaacctgggttctcctgggttcgaaccccatctctgccattgcctggacaggtgaacttgagcaatcccaccactctttcattctcaactgaataatatcaacttcacaggttaaagtgaggatcatgatgtggtttacggaaggcatgctggcatgtgccaagcacacaaggggtgcttagtcaacattcgatgctgctgttatcactctaaccaggtttggggattagctctgtcctggctctgggtccttggactctggggtgaactcagcccctgaggagattcctggtctctgaaactttcatgcaaagccatggttatggttctgaacaggaactttctgtgcagtggttcttagtcccagctgcacaccggaatcacct

SEQ ID NO: 40721 - DNA, 1581 bp, Artificial sequence
  DNA replication origin
caggcttaatacctggttggtgaaatcatctgtacaacaaactcccatgacacaagtttgcacacataacaaacctgcacaagtacccctgaacctaggaattaaaaatagtttccttgcctccaagtatggagctaaactacctcttcgtttttctctcgctcgctttcttccctttcccctcctcctccatcttccttgcttctttaggtttccattgaacaagtctcactgagcacccgctgcatgcctgcattatactatacagagcctgagcgtatagccacaaacaggcaaggtcattccacagagagctggcagcctcatacagtaaagcatggagtgcttcatcttctccaaaggagaaatcagcactcctgcatccctgcctcagccaccttctttataaaagccagttgggtttactgccaggaatggaaacctcttgcagctgaagataggattttatgggggggctctctgtcccccaaagcctgaggcaggtctgggcctatagtcagtggcctgtaaaagagcattgtttgagtgagtaaatggggaagctctgggtgtggagcgtcttctgaaaccctgggccagagtgcttctccttccctcctccatccagtgttcacctcccccacccattctttctagggactcccggctccaccacgctgctaaagacatattcctccccctgttgctgcctgcaaccttctctccatctgctccctctgcctgttcaggctgcagtgtgtagatagtatggcaaggtagggtagggggaggaggacagcttctaaattgggtgagaggcctgtaaagcctgaccggtctgccaaggctacgcagggagagacagtcagtctccaggactgtgcataagcttgtccccacctagctctctgccaatgtctgtccccaagtatctgtttatctccctcattgattgtccctcactacctctatttgtggagaaaagactttgcttgagaatcaggcctgggcaagaatgctgcagaggtgggccttgtagtcctgctcagatagggaagcgggtacaggaagaggcaagcggctgacctgagaggaagcctcgcagcgctagtgccctgccggcagtggggttatgggagacagggctcagattaaaaagtggaggtggatcttaatttagagttcgtgattgggcttcagaggggtccagaccccctcgtgttagatgcacgattttgtggctatgtgtagtgttctagtagattcacagctgtcaccagatccacagagttacagactttctaggttatggggactcactttggaagcagtgaggccctggcggggaagcaggctggctggatcccagagggctctggaaagaactggaactgggatgtatctggaaggctgggcaggcaatggaaagctccgggctgctcataagctcggtttccagggctccatctcaccgtctggaaaatggtccgggtgctctccagcctggcctggccaggcagagctgctgggagcgtcagcagggagagaaaacgctcggctcccaggacgcaaggggaattg

SEQ ID NO: 40722 - DNA, 1882 bp, Artificial sequence
  DNA replication origin
gaagtcaatttaaaaaatatgctggctagccatggtgttgagcagttggaaaaatagtatgaaatgtcttaaaaattaaaacacacacatgtctccccctgctcttacaatgtgtttgcagcccgtgaaggaaacagaataggaaatccttgtcttagatgacaattcaatacgtgccattaagacaatttttttttccctgcaaggtggtgtattggagagtggagttctcagaggtagaactgctttagaaaatccagtaagctgctgggtagattcaggttctttttatatgtgtgttagtcacaacacagattcaaaagggggtgggggagggagagctggactcagttcaaggccaccaagccattgttagaaagagacagctaattaagaaaggccatgctgtggtggaaacgatttgtttaaaccaaatctctttccctatctttcccagagaaactgtccagacctggtgtaaattgtggacattattgccccataaaaaaggggtgggggttcttcaatgatatgctttgttaaacaaaaggtgatgaacaatttcctttgctctgcactctgggctctacatttaaaaagacggggagatgggggataaaatgcctgatttatgctgaggggggcactccaggccaccgggaagggttgaagggaaagggacccagagccagggcccatggagctgagagctgtccagggcctttggtgctgaaagcaggtgcgcgcgctgggggtccagaactccccggagaagaacaccgcctgtcccccaactccgagtcaagacggtgcaaatgacagaggcggagccccagataagcatagtgcctgcgctccctctgtcttcagcctgggcagaccctgcagctgtctgcttttttacacgtgaggagcgcatttctgggaccttgcaagaaggccgggtcctgtggccaactaaccctcccattgattttcgggtctcctaggtgcctgagaaaacccccgaagctctgagggttagctttgggtgagttaggcgttgcacccctctctctatctggccctctcccccacccataacttttcctggggtaccttaccggggtggagagagggtatggttccaggtctgagaaagaggagctgtcattctctgctaaatttgggcccctcttccccttcaacaaacacgtggtagatgaaactaacacccctcaccccccattcctaacagtgatcagagatgctaggcagtaggggagagagtagaggggagcccgttcaggttcccaactgctaactaacatctcttctccctcccctaccaagttctcagagccctcagccccctccaccggcctctagcgaaagccacacccaagtccggtatcctgacgcttggctgagatcgatccaggaacacagaccctcggggtagcctgaaccaaaggagtcaagggtttctgtggtgtcggggggagcggcaaatgcactgtttgagtctagtcctcagttgcagggtgggtcagcttctcaccccccttcctgtcctctcccggagaggaagataattatctggcacctagccccgggtgcggttgcagagaagcgccgggaatttggggtttggaggcgaccccactccaaggagaacctctttggctgcaaaggagaatcagccccgcagccggggaagaccgaaagggagcccgcagccgaagcagggaagcgcccgagtccttcaacacatccccgcctccacactcccatcagcccgggccaaggggacgtgcggttcctagccccgattttggacagccaccaccgcttcccatcccggcgggtggtgcctgagtcgccctggtcagccccgacccct

SEQ ID NO: 40723 - DNA, 1011 bp, Artificial sequence
  DNA replication origin
cggcgtggcaacaaatcctggtgtgacgagacctcagtaaagggcacttatgctgccacctttctgacctgtgactggacaagaggcttcccaacccgggtctcagtttccccagatgcaaatcgcagaatccacaaattgtaaaaaagtccattaacaatggccatgaccaagccactgcatgcttccctctgtggagaaggttggacccacacactttccccatttccccactcaatagcaaggaaggggttgatctggggaatacaaggctttagaaataggctgctgaggcctgagttttccagacttaggggtgaccccagatggcatctgtggcccttccatgaatttcctctgtggcactgcccacattgcttcctttttctggatgtaagcttccccaggtttataaaacacggagtggaacccagggccttctacattccgggacatctaagtcagggtgcgagagctcaccttgagggaagcttgatcagctggtgaggtcggatgtgtatgtggcagtatgtgtgtttgtgtagtgtgtggcgcatgtgcgtgtggtgtgtgtgggtgtgtgtggtgtgtgtagtgtcatgtggtgtgggcgtggtgtgtcatgtggtgcgtgtggtgtgtgtttagtgtcatgtggtgtgtgtggcatgtgtggcatgtgtcgtgtcatgtggtgtgtgtgtggggtgtgtgtatggtgtgtggtgtgtgtgtgtagtgtcgtggggtgtgtggcgtgtgtggtgtgtgtagtgtcatgtggtgtgtgtgaggggtgtgtgtgtatggtgtgtggtgtgtgtagtgtcatatgtgtggtttgtgcgtgtgtgtgtgtggtgtgtatgtggtgtgtgtatggtgtgtgtagtgtcatgtggtgtggcatgtgtggcatgtgtgtggtgtgtgtgtgggggtgtgtgtggtgtgtgtagtgtcatgtgtgtgtggtatgtgtggggtggtgtgtgtgtgtggtgtgtgtga

SEQ ID NO: 40724 - DNA, 2078 bp, Artificial sequence
  DNA replication origin
taaatactaacaaatgcagagcagtggtctacagatatcatataattgcactggtcaaggacacttataggattgatagacaatattaattcataatacagtacagataagatggtgcaggaatggaacacatatttacaatataaaaatatcttttttttttcaaacctgccaggataatgctgtgatagaatgtatgactgcctttggagaattctaagtttgagcaactttctgaatgtgagatgagtcaaataccccccactccattttctccaccccacccaggctcaaccactcttaggctgacagtgaagacagacatcccatttaatgtttctaaatctgatgcctgtgttgattatccacactttgagcaaatctgtgcatattatggtttcccaatgcaagtgttttggtttattttagtagaataaaagagaaaaaacattcttcctcttttggagttgagaaaaggagagaaatgacagagatgaagaagagtctaagacatggaagaggtgtattctgggacatgggagaggtgtactctgggacatggaagaagtgggttctgggacatgacaaactgggttctggaacagggaggaggtggattttaggctatcacagtagaggcagattcttaggtcagggaccaggtggattttgggacagagatgagaggtgggttctgggacatggtggaggtgggctctgggacagggaggaggtacattctggaacagggtgaaggtggcttctggaacagggaggaggtgggtactgggacagggtggaggtgggtcttggaacagggaggaggtgagttctggaacagggtggaagtgagttctggaacagagagggggtgggtcctggaacagggaggaggtgggttctggcacagggtggaggtgggtcctgggacagggaggaggtgggtcctgggacagggaggaggtgagttctggaacagggtggaggtgagttctggaacagagagggggtgggtcctggaacagggaggaggtgggttctggcacagggtggaggtgggtcctgggacagggaggaggtgggtcctgggacagggaggaggtgagttctggaacagggtggaggtgagttctggaacagagagggggtgggtcctggaacagggaggaggtgggttctggcacagggtggaggtgggtcctgggacagggaggaggtgggtcctgggacagggaggaagtgcgttctggaagagggaggaggtgcgttctggaagagggaggaggtgggttctggaagagggaggaggtgggttctagaagagagaggaggtgggttctgtagcaggaaggaggtaggttctggcacagggtgaaggtgggtcctgggacagggagtaggtgggttctggaacaggaaggaggtatgttctggaacagggtgaaggtggcttctggaatagggaggaggtgggctctgggacagggtggaggtgggtcctgggacagggaggaggtgggtcctgggacagggtggaagtgggtcctgggacagaaagaaggtaggttctggaagagggaggaggtgggctctggaagagggaggaggtgggttctggaagagggaggaggtgggttctgtaacaggaaggaggtgagttctggcacagggtggaggtgggtcctgggacagggagggaggtgggttctggaacaggaaggaggtacgttctggaacagggtgaaggtggcttctggaatagggatgagaaatggattctgggacagacatgaggtggcttctgggccatgttagagataaattctgggacacaagagaggtgggtctgggacagagacagatggattgtgggcgggccatcctactctatgctcccagaacccacccatgcagtttccctggcgcccctaacacatcccgtagccactgttagtctcccccaggtcttagctcaaacgtcacctcctccaagcagcctccttggggcctccattcgcagctcatcagtcccctggtcagacaaccgtcctgcctgtacttcccctcctaaaccctac

SEQ ID NO: 40725 - DNA, 817 bp, Artificial sequence
  DNA replication origin
gctcccgcctccaacccctgtcctggggtcggcccagccgcgccgccctcccgccccggcagcccccggagacgaagcttacctgcgcccgggcgcgcggacggctgccgggacccaggagacgccgccgcccgagggcgcggacccgcggacggcccctgcccggcgccgcggagccgccgcctggctgctgcccagcccacgccgcgggagcccgagccggagcccgagcccgagcctaagccgcgccggtgcccctgccggtgccgacgccgcgctgcgctccgcggggccgcgaagaccacaactcccacaatgccgcgcgcgctgggccgccgggggagggggtacgggggggcggggcctgcggggcggggccggggacccccctgcacccggcacctgcgctcgcagtgcgggaggcgacccgaggccgcgcccgccgccgctccggagggtcctggcagtgcgccccgagacgcagcgcccgcccagcccgaggttgcgcgcaggcggcgacgggcgtgcagtcattcattaagaaaggctcgcgtcgcttccttcgctctttcgtttttcgctctgtgtctttctcagttctccctccctctgtctctctgttcctctctgagtcgccctcgtctccatttcctccttttcattctctttcacttcccccccacctcacttcctctcgccctaacgccttctttcctttattgatggactcaacacggacttctgaggccctcaggcacttggaatggaaccgcaaatcaaaccagattcttagtctcatggaaaactcattcgctca

SEQ ID NO: 40726 - DNA, 1510 bp, Artificial sequence
  DNA replication origin
ttagaccataaactggcagctgttactctttaggaaaaggaaagaaaatccagatgaaagatgttttgtttgcaagccatctcccaaacagaacctcagagttcctgaaattcagtgtgaaacaatcatctatgtgacaccaagcacttttactaaaaggatttcccccatcactgagctaaacccctactggaacttttcaactgagtctgtcaggaggaaaggtttttttcttaaatgttctaagagtgagacggtgataatttaacaagcacctgtaaagtgttagttcccatcagccctgctgatcacttaagtcaagcaaaatgcagacacagaaaacagggtggatgatggagaaacctctccactggacaccccagccctgtactcttctcaggaaagcctccttctgtactaagccagccatgagccctccctaaggctgagctgtaagcaaaagaatgtaaaagattctgaaccccagcttcagaccctcctcccgagatcataaatagcactgagagctcaagttaggacttttcatacctgtcagtcacttttagccaaaatatgccaacaggcccctgcacccggaggtggatttacaagctcaaagctgaactatgacaataaaagaaacacatttgcagagtgactggcagtttattaagcactgcttcaaacatttgatcctcacagctacctagtgacaactccccatctacccagtggggagaggagagactctctcccccgacagctccttgcccagtgaccacagtagcttccagcttccttcgcacatctgttcattgtcatctgtgttatttctgtcctcatcagggatggggacatctcattgcagctctgcactttaataataagcaaccccagatcttccagctcagttggctctggggaattgagtccaaatccatggccagttggagagcaagtccaatccaagacaacttctcacaccatgaacacctgggagagccggtgtcaggcctgacctggtcagcctagttcagatgtccattcccagaggctgcctaatgccaaagagtgtctgctcaccctcaggatgaggccaagtcaccctggaagccccccagtgagcagcactgggcaaggtgtgtgatgcctgtcaccctctccactcaggagccagagagatgccgtggggccagcccttcccggtgcagacctggggaccttccctctcttggccagcttctcagcacccacctgccctggagagtgggaaagaggggagggctgaagatgggttagcacagatggtgaccaccaggaggtcaggggaggagggggatgggacgatggaaaggtgagtgttgcccggaaaagtggacgatcagctcaagattgtggaaggaggtttatggcgcctcataattcgtgggacaggggaggagggtcaccacgtgaaatatgggaagtgggtgatgctgagggctgggggaggggacaggaggtgaggaaa

SEQ ID NO: 40727 - DNA, 2011 bp, Artificial sequence
  DNA replication origin
gtatggctagatccaaggactcaagtaattttagggatttgtgtctccatctcggctccaccttcctaggttggctttgctctcatgccagctttgcaggtggtgactagagatggccccacacctccagccctataccctacttgcttagcctccccgcagaattctgtaaaagtctccagttgagtttcattgacctagattgggtcaaacgtccatctttgaaccaacactgcagtctgggaatgaaatgctgtgattggccaggcctaggttatgtgtctgcaccaggggtcgaaggtggactgagaatgaaaataagaaagccagggatgcatggcacccttggggctgatagaaggtccatggggctggagaaggggtctgatcatgacacccctctaagccacgtgaagaaattgcatactgaagacagtgggaagctttgaaagtatagtgaaggcgggggtgacatgccaccatatggggacaggcaggggtggaagcatgatcaggtggcggacagtggggacttggactgggctgctggtgatggagagaaacagttggatcctgggggtgttgagtgtaatgcacaggactcagtggtgattggatcaggggttcatggggaggaagaggttcatgatcttgggtttctggcttgttccaacaggcaagcctggaagagaaaccaagctcaggagatcctattaggagtttaggttgattgtgttgagtttgaaatgctgtcaagcatccaagtgacagactagtggagaattggccatttcacggttgctatgctgagaggggccggtcaggattctgtggccttaggagaaggggtgcagagtgacaactctatctagtaaatattaattgaccacctactgagctgcaatgctccggaaacagagcattcaaggctcccagacaatgaatgcagaatatgtaagtcaatcatatgatgtgttagaaggtggtgagtgctgggggaaaaaaaaaatcacgcagggtgagggcttctggagtgccgtgttggcggggcaggttgcagcactaactggttgatcagaagaggccttgaagaagtgcgatgtgagagaggacaggagggtgagagagtgagccaagtggatgtttggggaaagggcatccgggcagcgggcacagccagggcactggcccagaggagggagggtgcttgtgtgtttgagtgacagcaagggggccagcgtggctggagaagaggcaagggccagtggggttgggggcagaaaggtaaggggtggggtcaaacctgtaaggcaaatgaggactggtttttcctgagtaaagtgggagccatgggaggatgcggagcagaggagggccatagcctgacttccgttttcctaaggtcactgtggctgcttgctgaaaatcaactgatgagacaagggcagaatcagggaagctagtgatgaggtggcttggaccagagtggtaagaagtgaacgcctgaaacaaacgtctggcagtgcgggtggtgagaaatggcggattctggctctgttttaaaggtgaagttaacaggagttgctgctggattggattagggtgagaaagaagaatcaaagctgccttcaaggtttttggcaccagcatgaaaggatggagctgctaccagctgcaggtggggtatgctgctgctaccagctgcaggtggggtatgctggggaaaggaccaggctcaacacccaggtgcagggaggaagagagtgggcaactgtgtccaagtgaggagagagatttgggttcaagatgacaattcaggagatgtcagcctgtggggagcatccaggggcgctagtatctcctgaactggagggaggagagagggccacagtagccaagtgtgacctcctgatacctgtgccagaatggctgggtttggccccgcataaggaaaaaccctgtaaacgttttcatggggctgtagagaaagaggaagacaagcagacataac

SEQ ID NO: 40728 - DNA, 1752 bp, Artificial sequence
  DNA replication origin
tccccggctggggcggctggagagccgggagtcgctgggtgcgtggggctgcctcgccgcgtctcgccacggtaggtggccctggggcggcagggggtggcctcgggttgcaaccgggggcgcgggctgggggccgtgcgggtcggcctcgggcgcctggcagccctccgtcctggcggctgcctccgggcccggcgcgactgctcgggctccggggctgggagctgggatctgggaggcaggcaggcggcgcgggcgcgcggttctgggatccgcacccgctcggcgtcccgagcgctttccgcggggtgcggcatccaccgggcccccgttaccacgcttcccgcttcggacccagcgcctgggagacgctcagcgtctgttggcggggggactgggggggagggcggcgcgtccccgcctccggagtccccaacctcgcccaggcgcgcggggacccccaggcgggcgccagggcgcgtggaagttaacttgcagcagccgtggagttgcgaggagcgtcagaagtggaggcgttgggggcggaaatcgtcggctggggaggtgggcgctgggagcactgggttggggagccctagtgaacttggaggtcactggtgaggagtggagaggaatttgacccgaggatcccaccccaacccccaacctccctccgtaaactccgcttctcggtgtgagctggatgggaggtgcccggaaagccgggactgggactggtagcaggggactgggagcatgggctcagaggctgagcacgcctgacctggcagagtcgttgttagatgggacagaggtcgaggtctggcattcccactcaaaggcccgttccctagggaaggaaccatccacctcagcagagtcattagaaagaaccgtgcctaacctcttgcccccttccccttttacagatggggagactgaggcttggagaggtcacctgcccgtgaccctaggattcacagctaggatgtggcagagctgaaactcactcacaggcctcctgacttaatgtccttggggatgttgaggaggcgggctgttgaactcctacttatcctacagaagccccctcaagcagcacctcctccgggaagccttccctggcattctcctggtattgttgggtgcttcctgttttgaaccccacagagttagccagccctttttctcacttcccaacagacattcccttgcatgtctgtctgccagactgggctgtgggtggacacctctccctagcctccatgtgataaccctttcatctcagcagggtggtctgctggcgagggtaggcttctggatttgaacagatctgtgacacaccggatttagtagtgatgtggcccgggcgacgcattttccttccgatctagtctcagtttccataactgtaaagctgggtttatttcattgtcctaaaggaactgttgggtcatttctgaatccccccaccccactgaaccccaattgtactgttgtttacttaatatacatctttgtatcacctgatttttaaaaatctcatgcaaactttttttataacagctttgttgagatacagttcacatgccgtacaattcacccttttaaagtatatgtttccgtaatttttaggatgttcagagttgcatagtcatcaccactgtctaattttagaacatttttatcatgcccaaaagaaaggctgtttcatggtcactccccaatcctttcttcccctatcccttggca

SEQ ID NO: 40729 - DNA, 887 bp, Artificial sequence
  DNA replication origin
gctttctgagaagccctccagaaccgcagcattggaagcttcaagatttagtcattcttctggcaaacatatgtggaaggcctccggggtagcacacccttcaccgtgccctggagatgctgggatgcgacaaaaaagtaggcttctcccatgatgaacctcacgggttagttgtgggggcggcggggacgtggggggtggagagagagagagagagagagagagagagagagagagagagagagagagagattgtgtacaacagaaaagcaaatggatatgtaattctaaactgaaatcagccccagaaggagcggggccccagtcaatccagggacctaaaagtcagggaaggttccctgaagaccatgaggctgggctgctcctggaagtgtgtgcctggggtgggagcgtgctgaatgatgagggtggaaccttgggctgggggccagccatggcagggtaaggctgcaagggaaggtaaaggttgctctccatcttgagaccagaggggctgcgagcaggggagtgatgaggtcagctttgcatttccagaatcttcaggctgctgcagcaaggagaacagactggggggaagcccagtaggggatgttgggggccaggaccatggtggtggtgacttggtgggatgggagggggaatgacttggcggaatgttccagagcatcgatggggcttggagtgcattgggtgtgggggccgtgggagaaggaagggtgagtgtgaaactggaggaagggtgtttttgtaaagtctcctgcagagcttgtcttccccatcccaattccttctagccccatctctggctctgtcagcagctgtccatacaggaaaaaagatgagactcatctcctgtggctgagagg

SEQ ID NO: 40730 - DNA, 925 bp, Artificial sequence
  DNA replication origin
cccgcccggccagctgccccgtctgggagggaggtgggggggtcagccccccgcccggccagccgccccgtccgggagggaggtgggggggtcagccccccgcccggccagccgccccgtccgggagggaggtgggggggggtcagcccccctgcccggccagccgccccgtccgggaggtgaggggcgcctctgcccggccgcccctactgggaagtgaggagcccctctgcccggccagccgccccgtccgggagggaggtgggggggtcagccccccgcccggccagccgccccgtccgggaaggaggtggggggggtcagcccccccgcccggccagccgccccgtccgggagggaggtgggggggtcagccccctgcccggccagccgccccgtccgggaggtgaggggcgcctctgcccggccgcccctactgggaagtgaggagcccctctgcccggccaccaccccgtctgggaggtgtgcccagcagctcattgagaacgggccaggatgacaatggcggctttgtggaatagaaaggcgggaaaggtggggaaaagattgagaaatcggatggttgccgtgtctgtgtagaaagaagtagacatgggagacttttcattttgttctgcactaagaaagattcttctgccttgggatcctattgatctgtgaccttacccccaaccctgtgctctctgaaacatgtgctgtgtccactcagggttaaatggattaagggcggtgcaagatgtgctttgttaaacagatgcttgaaggcagcatgctcgttaagagtcatcaccaatccctaatctcaagtaatcagggacacaaacactgcggaaggccgcagggtcctctgcctaggaaaaccagagacctttgttcacttgtttatctgctgaccttccctcca

SEQ ID NO: 40731 - DNA, 1359 bp, Artificial sequence
  DNA replication origin
ggtctctctaggcatgtcagccaacactgaggtgctcagagtccaccctgctcttcccacgggccgatctccttggagttttcagctgaagaagtttcttggaacaaatcagaccatgagagtgtcacttgtgcaacatgtgtttattgagcacctactatgtgcaaggtcttggggatacagtggttaactaatgaagcaaatatctctgctctcatagtgttgtggagaagagacttaatcctctacacataggaggtaaggcagaggccaatgtaggtgggaggccctggagagatgcgggtaatgggggagagggaagcaggtaggaagtgggagagaagctagactgttggagagtgggaagggaggctggtgggaggtgagggggaagttacagggatacaggggaggctggtaaggggtgggagggaggatgtagagtccatttaaaataaagttgtcaaggaaggccccctggaggaggaggtggttcctttgttttaggggtggaggagtgagccagggtctgtctagggaaagagcattggtagatctctttctgaggaggagagatcagtaaatgcagaggctgtgagaagacagcatcccagcacacataagtaacagggaagagcccagtgtgactgcagaagagtgagcgatggggagatcggggagtggagtcagggctcaggccatgcgctgccaagaccttggatttctggtgatggggaggccataggggagggttgaaccaggtggtgacctactcagatagacatttcaaaaataattgttttggatactgtttgcacaaatgactgtagggccaggagcaagatgggaggcattcctgctatccaggtgggaaaggaaggtggccaagaccaagaggtagagaggggagagatgagtgcacttgaagtcatttttggaatagagctgccaggacttgttgatgaattggacattggatgtgacaaggagggaggaataaaggttgggttgtttgagtgaaggttgagttgtttcaggcctgagcacctatttgcatgatggtgcctgttcctgaaatgaggactggaggtgataccaggttagagaaagagtggcatgggatctagattttggcgaggggttgtgaagcttgagatgccgttagtttccaaatggagaggtcaagggagcagatgaatatgtgagtctgacctcttttgggagagagatcaggctggagtgagaaaatatgaaggcatcagcctaaggatgggtttaagccatgaggtcaccaagaaccgaggacagataagtacaagggaacatctgcagctgagtcccgaagcctgcaagatttag

SEQ ID NO: 40732 - DNA, 1400 bp, Artificial sequence
  DNA replication origin
cagtgtggagaaatggacagtccacagctgttcctgacagcaaccccaaagggatgccccacagaggagtaaagcaactgtgcatggctagagttcaggggaaggaacgttccctggggctaggccagaatgggaaggcttctggaggaggtggcctcagaaccataaaggatgggtaggtactggataagctgagaggaactagggggacactggtcctgagggaacctcgatgcgtgagtgtggaggctggaaagccaaggctatttccttgcctgtaaaatgaggccaataatcacacctgctttacagaattgctggggggatctaatgcatggtatgcgccaggtaggaagtgcccagtagatgtcagagaggatgaagatgatggtgggtggggagccttgatcattccagtgcggctggaatgggttgggtagggagggggcttgtgggagagaaccagagagggtgcttggactttgaggcaatgcaaaggcatggaaggggttggggcggggcagggcaggggatgtggaatacgggctctttggggagtctgtctgcaaggcgaggttagaagcaggagcacagggagaaaatgtggcagccaaggttctggcaggaaacaggtggaatctttcgacgggaatttgaagagtagtattaaagggattatttacaaatgtggggacaggatgtagggatatcagagagcaggggcagcactggggttagtcatagcaggaagctgttactacctctaagcgcaaatgggcaagggaggtgagaggttcccagaaccacaggatagggagggtgagtgatgggaacctgcggacaggagctgtggacctcagtggtggggaccagcctgctcgagggacttccctcataggaagccttcaaccttacttctgtcatctcctgctggtccttgctgttggcttaacacaacaagaaacccttgatgcatgcacaggtggacctccagggcagagagtggggtggagaagggtgcagagtagggcagatgggctgatggaaaaattgccagcactgactagataggaaggccagagtgtgtgaagtgtgtgtgtgagattatgtgtgtatgtgtacttgtgcacatgagtgtaagagagagtctatatgtgttcatttatatgtgagtgtatatgtgtgaaagggtgtacatacgcgtgtacatgtgagtgtgtgtaagtgtgtgtatgagagactgtgcacagagtacatgagtgtgtatgtatatgtgtacataagagagggtatgcaggggagggagagtgtgtatgtgtgtgagagatggagtgtgtgtgggtacatttgtgtacgtgtgtatgggagagtgtgtgtatgcgtaagagtgtggatatgtg

SEQ ID NO: 40733 - DNA, 1060 bp, Artificial sequence
  DNA replication origin
tgtgtgagttgcatagtgtgcacatgtattgggcgtgcatgcatgtgtgatgtgtgcatatgttgtgtgtggagtgtgttttagctgtgcatgcatgtgtgatgtgtgtgtaggttgtgtgtggtatgtggtgtgtgtgtattaggtgtgcatgtatgcatgatgtgtgtatgttgtgtgtctggtgtgtgatgtctgcaagtcgtgtatatggcacatgtgctttggatgtgcacatatatgtggtgtgtgtgttgagtatgcatatatgtgtaatatgtgtgttatgggtgagctgtgtgaagtttatatgtattgtgtatatgcattgagtgtgtatgcatgtgtgatgtgtgtacgttgtgtgtaatgtgtggtgtgtgtattgagtgtgcatgtatgtgtgtgctgtatgtatgttgtgtgtggtgtgtatgcattggctgtgcacatatatgtgatgtgtgttgcgtatgcatgtacatgtgatatgtgtgtactatgtgtgagttgcgtgatatgtatatgtattgagtatacatgcatgtgtgatgtgtgtgtatgttgtgtatgtggtgtgtgtgtgctgagtgcatgcatgtgtgatgtgtgtgtatgttgtgtgtgtggtgtgtgtgtgctgagtgcaggcatgtgtgatgtatgatgtgtatgttgtgtgtgtggtgccagcatgtattaggtgtgcatgtgtgtgtcatctatgaatatgttgtgggcatgtatgtatggcgggggtgtgtactggccgtgcatatatgtgtgtggtgtatgcgtgtactggttttgcatgtatgcatggtgtgtgtgtattggttgtgcatgtatgtgaggtgtgtgtggtgtgtgtgtattgaatatgcatgtgtgtgtgcagtactctgtgtgtgtgtgctatgtggtgtgtgtgtgtatccatgcctgtgctgttgtcaccctcttcttggctaggtaagtatcctccgagctccaagaactgggtaaataggaagctgcgtgtaaatacttcctggaccctgatttctacaacttcccaccc

SEQ ID NO: 40734 - DNA, 938 bp, Artificial sequence
  DNA replication origin
gtgtgtgtgtgtgtgtgtgtatggatcaaaaagcccagataattcatgtttttcttgggttgttccaaactgtcttctttcctttcctcttcttctcctctacctgagaagatgttatttttgttttaaatggagattattatccttcaaacagaaatattgcctccaaatttggagtaagcagataatgaggccactctggcaatttcacaccgatgacaagagaaacatctacatgactgattgacagttgccacgggaaaagcagaaccctccgaaatccctcctcggctggctgcagaagggtgggtggtgcgggagggggccggggctgagagatggtctggtctgaggaagcagggaagcctggtggccctgtgacctctgcccacaatctgtggggtcttcaccacctcgtcagacatttgagctgacaactgtgtgaaattgaaaattgtggagctgattaaatgatgtatttaaggcttcatgaaaggaggaggtgggtatgggagtgaggaggggaagagtgaggagagatgaaggagaggggaagagggagggggcaggaggaagagggataggaaaagagagaaaggaggagagtggggagagagaagaagagacagagagagattgggagaggggagagaaatggagaatgggagagagaggcgaaaggagggagaggcaaggaggaagatggagaggaagggagaaaaggaaggaggaaggggtgaacggaaaacagagaattgagaatttagaaggagaaagagaagaagaagggaggaaataaaaaagatgaaacatgcaggcagaaatgacgaaaagatggagaaaaagaaatgagagagacaaatatccccaggagagaaggaaaagaggaaaaatagcggaggaggaaggaagaggaaagagaaagaaagagagagatg

SEQ ID NO: 40735 - DNA, 1043 bp, Artificial sequence
  DNA replication origin
ggcaggaggaagagggataggaaaagagagaaaggaggagagtggggagagagaagaagagacagagagagattgggagaggggagagaaatggagaatgggagagagaggcgaaaggagggagaggcaaggaggaagatggagaggaagggagaaaaggaaggaggaaggggtgaacggaaaacagagaattgagaatttagaaggagaaagagaagaagaagggaggaaataaaaaagatgaaacatgcaggcagaaatgacgaaaagatggagaaaaagaaatgagagagacaaatatccccaggagagaaggaaaagaggaaaaatagcggaggaggaaggaagaggaaagagaaagaaagagagagatgagggtgcagggaagagagacgaagagaggaagggggccgagctggggagggggaggccgcgcagacgacgctgccgggagggctggtggaggagcaggaagtctgggggctcagatgcgcgccctcggtccaccccctctctcccctgtaatgtggggagggtttatctcaccaggagcagcaggctcagtcactgatctaatcaaattattcagcattaaaaaactgccaagacattccagtacttcagctcccagagacccagctgggatcaaatgctaatcaacatcgccacgatatttattcccactgtcaggctgctgcgtgtttgttttccgagggctgcatactaaagcggaggagcgagatggatcggcccagtggccgggagatgaggagccgaggacggcagggaggaggccaggcaggtggggaagagaaggccggacccaggagaggcacccacagagctcacagggcggggcaatggccccgaaatcaccccaccaaaatgtccggcgtccttttccaagatgccctctcctcacctccactctcatgagtcccatttcaaggcaagtcagcggcgggtctggactcagagaggctgacctttgaactcagcctctgtgattccaggtacacggtttaacctctttgggctttgtg

SEQ ID NO: 40736 - DNA, 806 bp, Artificial sequence
  DNA replication origin
atagagaatgtcaaggaagggaatacatgccatgaagaaatatgaagcaggaaggaggctaggtagtgttgtcttattacatgggctggcagcaagctctccctaaggtgacagctgggactggaaaagggaaggcagtggcatgtggggaaagaacatcccaggccaagggaccagcaagtgcaaaggccctgaggccaccatgtggggcaggctacagtggggtgagtggtgggaacttggggttttcctctgagggagctgggacacaggtcggggtgtctccagcagaggagggacttgacctgacatacattttaacttgcagaatcaacaattgagaatggcataaaaaccctggggactcttggaggttgctgccataaacaggcgaaaggtgcaggtggcctggacttgggtggtggctgtggaggtggtgagaattgagtggactctgtctaaatgatgaagttggaagcaacagcgctggctggctgtatgtggactgggatgtgagcaggagagaggagtccaggatgactgccaggttctttttctgagcaagtgggagggtggcactgtcctaggctgaaatggggacacccgtgcaagtggagtaagttgtgggggtgtcaggtggggatcatggttggagtttggatgatgttaggtctgggtgttgtttagatgtcaaaggggagatgaagaggaggagaggaggcaggtgggcacgggaggctggtcacagacattggggctgatggcacccacatggcattgaaactgttagccgaatgaggtgtcct

SEQ ID NO: 40737 - DNA, 1597 bp, Artificial sequence
  DNA replication origin
aggtcagcctggagggaatagtgatgagaaagcacacatgaagcacgcccaggcacatagtaaatgttcagtaggtaatgacagagggcacgtattgagcacattcttcaggcgagaccccacgctaagcactttacaggcggcatctcatttcgtcttcaccacaggtgtgaggaagttagcatccttagttcaagtttacagagagtaagtcaagctcagaggcattagtcacttgcctgagatcatacagccacccaatgggagagccagaatttgaacctggctcgatctgacctcagaatctgcattctctgtcatcctactggaatggtggtttcctcatatataaaatgggaagagccaggccagtggtcatcttgcaaaccactgctgtatgcaaggctgacagttggaatagggcatagatgggtaaatggaaaggaggattgaagggtgaggggtgggtgggcagatgcatggatggatggagtggtggatgggtcaatgggttgataaatgggtgagtggaagagttgatgggtggataataaatacgtagatgggtatctgagtgggtgaacaggtggatatttgtggatgggtgaacaactggatactgggtaggtggatggatcgttgagtgagtgagtggttggatggatgaatggatggatggatagatagatggtgagtgaattgatggataggtgggtgggtgtttgagtggttgaatgggtggatacacagatattagtgggtgggtgaatggatagataatggatgggcagatggatagttgagtgagtgagcagatggatgagggatgagtagatggctggctggatgatgtgtgggtagatggatggttgggtgagtggatggatggatgaatggatgaatgagtgggtagatagatgggtaaatcggtatgtgagcaggtgaaagagtgggtagacgaatggatggatattggtgtgtggtagattgatggttgggtgagtggatgcatggatggatgaatgatgggtgggtgagtggatgcatggatggatgaatgatgggtgggtgaatgaatggatgtatgggtgggtaagtggatgaatgtatggatggatagatgagtgaatgagtaggtgagtgggtgggtaggtagatggatgaatgggtgggtgggaagataggcaggtgggtgactagttggatgtgtaggtaaatggatggatggatggatggatggatggatggatggatggatgaatgagggtgtgtatagttcagtgagtaggacggtggatagatgagtgagtagatgagagggtgggtggatgggaagaagaaagataaaagttgaaatactccctgcatgcccaagtgttgtttctccctctgaaaggccattcctacctctgaatggcaactgtttccctcccatttcttggtcactacaggcatttcatgcactgtcaggttcccagaacttcagctagggtcccaccatgtacatgcctctctgcacacgcgcgcacacacacacacacacacacaaacatgcacacacacacacagagagagagaacaacacaaaggctcctcc

SEQ ID NO: 40738 - DNA, 1035 bp, Artificial sequence
  DNA replication origin
gccttgctccccccacctgataaggcctggggaagggtgataaggggagaggcccttttggtgcctgccagcctttggctgggcacccagctgggggaagcaggattcaggcattcaagagccccccaccccccgcccaacacgccaagatgggcaagttttgagccctggcctctgagcagggagggggtacgctccgggagcaggccccctgctgtcctagggagcctgttaacaaagccagctctgggctttcttccaactggatgtgggggctttgcagaggggccgggtcgctgtaggggggtgggtgtgaaattcttgattagggctgactgtggcctgccccctcccctgatgttgctcttcctgccccctccccacacttgagggagagggaacagctgcacaaacacaggccgggggtgccagagggggccgggatgtgagatgccgtgtggagggggcgggagggtgggaaggttgctgcatgaatgtatttgtgtgtatgtgtgtgtttgtgtgtgtgcgtgtggcatgcctgtgtgtttcacacatgcatgtgctgggcacgtggctgtgagtgcgggacatggattaggatgtgggtatatcacctgtgtgtacatgtaagtgtgtaaatgcgagtgactgggagtgtgcttgtgtgcaggtgcagatgttaagtctgtgcatatgcatatgtgtgtgcacataggcaattgtgttgccatgcacgtttgaagcatgcacgagggatggtgtggtacattatgtgggatgataaagaatggacatgtggtgtgcctgtaggtatgattgtgtaggtgtgtgtgtgtaaaagttacattttgtgcatgcacatgtgtaggtaagggatgggtaggggtgtgcacatgtgtgtgattgttggtcgtgcctgtgtatatatgtataagctatggtatgtgcacgtgcatgtgtggatataagggtgtgtgtgtgtgtgtgtgtgtgtgtgtgtgtgtgtgtgtgtgtgcatgtgaaaaggggaag

SEQ ID NO: 40739 - DNA, 1283 bp, Artificial sequence
  DNA replication origin
cacagttccttccctcagcaaagtcaggcttctcctgggctcccatagtcccctgtccttccccgtaaaaacacatatcacactattgcaagcactggtctgcatggctgcaacctgtcctccacacggagggtgacttcctgagagcagaggccatagtctgttcctcaagttactttccatgcttggaacatagggagtgctcaataaatagacagatggatgcatgctggatagtggatggatagataacaggtgaatgggtgagtggatggatgagtgggtggatagatgaatgagtggatgaataaatgaatgaatgggtagatggatgggtggaaggataaataatggatgaatgagtagatggatgagtggatgaatgcatgggtgggtgggtggatagatgaataaaggggatgatggatgaatgatggataggtggatgggtggattaatggatggatgagatggtgggtggatgggtggatggatagatggatggatgggtggatggatggatggatgatggatggatggatagatggatagattgatgggtaggtagacaggtagatgggtaggtggatgaatgaatgggtggatggatagataaactgaggagaagatggatgaatgaaggataggtgaatgagtagatgaatggatgcatgggattgtggatgggtggatggatgggtggatgagatggtggatggatggatggatggatggatggataaattgaggagaagatggatgaatgacggataggtggatgagtagatgaatggatgcatgggatggtggatgggttgatggatgggtgggtagatagataggtggataaatgtatagatgtgtggatggatgggtagatcgttagatgaataaatagatggatggatagataaatggatggatgggtggatgaatgaatagatagaaggatggctgtgtagatgggtggacgaagatatgatggatgaatgggtgaatgaatgaatggatggatgagttgatggatgggtggttgggtggatggagggagagattgatgggtggaagggtagatgggtgggtaggtaagcaggtaaatgggtgggtggatgaatggataaactgagtggataatggatgaatgaatgggcgggtagatggatggatgaatggacggatgagatggcggatcgatgggtgtgtaggtggctgtatggctatatggatgggtagacagatgggtgatgaatgatgaacatatagatagataagagagaacccca

SEQ ID NO: 40740 - DNA, 2046 bp, Artificial sequence
  DNA replication origin
gacaggtgagctggaattataggctggtggagagagtttgcctgtgggtttctgggagggaagtgaactacttatgccagccactctctccaccccccaaacacaccatcttccaagcgcatcttctgatgccacattccaatccctatgccaggtgggagatgtcctgcagtttgttgcctcctgcctcttcctggcaaagcttagactaaggccttcaacatggttccagtgtcttgtcatgatggcttctggtcagccccaggatgtggtagccctggggaaagccttggggtcccctttgatgccccaagaaatcattcatagcgattaagggaggttattgccaagcacgtgcttgattgacattggatggatgaatggatagatgggtgagtgggtggatgggtggacggatggatgggtgggtgggtgggtgattgcatggatgaatggatggatggatggatggatagatggatggatgatggatggatgaaaggaagaaaaaataaatggatggatagatgggggtggatgaatgaatggatgggtggatggatggatggatggatggatggaagcaaggaaaaataaatggatggatagatggaggggtggaaggatggatgaagggatgggtggaaggaaaaataaatggatggatggatggatgggtgcatggatgcatggatgggtggatggatggaaggaagggtgagtgggtgggtgggtgtatggatgaacagaaggaaggaagggagaaaggaaggatggatggaaagatgaatgggtaggtgggtaaggaaatgcatgaatgaaaaaatgagtggatgagtgaatgagtgaattatttcaaagttaaacaaccccagtttcaaattactttcccactaacatctgtgtgacttgttcaagttacttctcacctcgagcctcagtttcctcagttgtaaaatgggggtcacgttgcccagctgatgatgctcatccataaaatgagagtgatggtgctgtgagttctaacaacattatgcatataaagagactggtccaattttcatcacgcccttctcagagtctcctggaagtggcaaatctggcacacagtaagtcctcaggaataatgagttagccttaagtcagcttaagggggatgacttttaggcctcaaatcacctggttcccctgaggtctctaaggtctctgaaagccctttcctctatgaagttggagaggatttctgatgttgacttcccctgtagtgtgagaggagccaagttggagcatgtaccctgcttccctcaaggtcatgtccaacaccaccccaagccttgttctctaggggacccagagcatgcacttcccagctgacctctccacaagtaggacctgtaaaagtagcagcccttttcctctaccacccccagagtggtagagaagagggcacaggaagaacagaaacaggccagtgcactctaccactctagaggaccagaaaagtttcctgccatcccaaccatcagcaaagggaatatctgggggcttggggaattttccaactgggcttcaaatccacaattcttgtgcacgatgcaggaaaacgtacagatttaggagtcaggcagaactcacgttggctcacagggtgtatacgccactccaaaagattgtgtgagctgtcatgggccgaagagatgtgaattatgaaaagcgttctaccacgtaagaatagaaattctcaacccatcacccaggacacaggctgagtgtccccagtgtgagcaacagaggtcatgtgagtgagcctggtggatgaaaaaaggtgtgaaatcattgttctcacctctccgcctgctctattatagcaagcatcagaggttctgctgggaagacctgccatattctgggataaagctgccccattgcaaagtcctgaagggttagcccacgaatggccccagctcttcctatccaatccttccttctagaataaaacagcagaggactttcttctccctccagacgcatcctctaacaggggcc

SEQ ID NO: 40741 - DNA, 1256 bp, Artificial sequence
  DNA replication origin
cagatggcaagcccattttacccccagccctgaagaccacctccccacagctggaccccatgatactcctgtgctgaatgtccaggcccctggaacccaccaagtgccttgtcaagccccagtgcttgagaccacctcttcttaggacttgattgaccaagaagatggagtcattcactcactcaatgagcatgcacccagcctccaggatgtgttaaggtctctgatggatgctagaaatgcaaaggcgagtgaagcccagactctgtctccaaggaatcacagcctggggcaggacagcaacaggaaagcagatcatttcaatgtattgtggctttccaggcagaaagggcaaggggttgcaggtttgaggtatgagagagaagggaacattcaaggagacggaaggtggtttggtcttgagagaagtgagatatccagaggtgggcggggctggggtgggcggggcctggagggtagggaggggcatttgtgggcggggcctgggaggtagggctggcagtggacgggatctggtcctgtagatcctcacgggctttagtgagaagctggggcccaagaaccaagtccttccaagaagaaggactttaagcagggtgtaatctgcattttgaagaggtacctctggctgctgggtggaagataagttacaggagcaagaatgaccttagggaggccatagtagtcattgaggagagagaagatggtgatcctaagggagtggcggcagtagggtggggaggggcaggacagattcaaaagagatttagttggaagaatcttaaggctttgaggtggtcgtgactgtgggtaagggggagaagagtcgagggggactccaggaaagactgaggtggccctgctatgtgtgagacaaccccagaggagagccaggtgggtgatggtgagctcggtttgggacgtggtgagttctagatatcaagtgcccacagctaaacacataaccaatgttccaatagaaaaacagaaaaattgaaaatcacattggtcagatgacccagtaaatgaaggactagagaattgacatttgcagcagaaaataggtcaggaggtgtgaaatgcaggtccccaaagcagctgttgaagcccagaaaactagccaggatgccctcatttacccagagactgctgccattcagaagacacagtggcccaagaaccagaagacctgggcagcgttgggccagccactggctgattgtgtcagctcgggc

SEQ ID NO: 40742 - DNA, 1527 bp, Artificial sequence
  DNA replication origin
gagatggagataaggaagctggagaaagccggaggggctgagagagacccttggagaccgggggggggcggggggagcccgtccccgcccccctgccccaggcctgctccacggtcctggagaccccctgacttccgggggctgcgctctcatcgcacggcggccggcggcgtggtcagcacccgtcaggctgatttactggcgctcgccgcccgccgcgcggcggcaatcagccgccgccgccagatctattattgatgaactttccgaggcccgctaattaactgcgcgcacccacggcgggcgccgtggcggtggcggctgaaatacggcctgcatgtcccaatgtcacgggcgccgcgcccgcgggatggtcccgagaagagggacgggatctcagccgccggctcagtcccagcaccgcctcccccaccacccgaccccggggtgggagcccagcgggctctaggagggccccctagccaccccatgcgtggccttgagcaagtggcttaatctctctgggcctcaggcacagatcgtccctgctccctgcaaagccctgcgcactccctgcaaaccttggcaggcagcgggtggcagaaacctccagtgtctggcccatccacggagctggattccagtctcgattctgccacttcctggctgtgtaggaatttgacctctaggagctccagtttcctcatctagaaaactggaataacgaaatctggcgtggagactcgaggtgagaattcagtctgctccctggttgggacaccacagggatgagggaccccctgaacggtaaccttctgggccccctgcctggtatcatccagagatgtgtggggagctcactacctctgtcctccttctgggttgaaccctagcctcacaggcactggaggacgcatctagtctatcaagctatttactgagtgcctcaaaacccagatagaggctccagaagaaaagcaagcatgagagagtcagggaggccagggtgggggtcagacctcgatttaggttgtggtccaggaaggctttctggaggcagctgaagcaccaggcaaggagtggtgggcaagtgttccaggcagagggagcagctagaagtagcaaggaggtgggcagatgctccagacggtgcttgcaaatgtgcaagaaaaggagacctttcttccccttcagtgggacataacatcttcagcctctcacaaccatctggggtctccttagcgtgcggtgggcaggtggcccagaaacatgtgttccctgagttcctgggtgctgaggaattaattaccctccccgctcagccggtcctgctgaggtcaggggtgcaggcctgtgtgggtcagggtgagattatccgggacaggtctaaggagcaaggggacaacgacaaaaacagcttctgcggcatcgcggggtctagaaatgctgtgtgaccctggacaagtcactttgtctctctgggcttcccctgtgtccccgaagccctctgtgagccagggagaattc

SEQ ID NO: 40743 - DNA, 974 bp, Artificial sequence
  DNA replication origin
ctaaagaaaagataactgaagtacagcaaattacatactttggccagatcaagatgggatgaagggatggggggatggatggatggatggatggatggatggatggatggatggataggtgtatgggtgagtgtgtggataggtgggtggatggatgggtgaataagtaggtggatgggtagatggatggacaaatgaatgaaaggatggatgggtgggtgcgtaggtgaaaggatggatgcataggtgaatgaatggatggagggatgatagataagtggatagattgatggatagaagggtgggtgggtggatggatggatgaatggatgtagagattagtagctgaatagatggataagtaggagggtagaatggatgaatggatggatggatgatagataagtggatagattgatggatggatagacgaatggatgaatggatggatggatagacgggtgagtgggcgggtggatggaaaaatgggtatatgaatgggtgggtgggtggatgaatggatgaacggatatagagattagtagttgaatagatggatgagtgagagggtaggatgcatggatggatggatggatggatggatggatggatggatggatggatggatggatggatgatggatgggtggatggatggatggtggaaggaaagagggagtatagttcagtgggtgactacgtggcaaacagcccatcctggtgaagtatccctctccactcctcccaaatcattccaaccaccctctaccttcttcatcgcaatcctgtcccagacatgtccctataacttaatatcaagaaatgactgcgagaaaaaaaataataggaagataagaacaaagcttcaaatataaggagcctaccagacaagaaaaaaccagccctaaaatcatgaagatgggtcggaagtgggaacctagccatgcttggcacggttaaggagagcaactgaga

SEQ ID NO: 40744 - DNA, 2412 bp, Artificial sequence
  DNA replication origin
gtggatgcaaatgaggcttctgggtgatttgcacagagccggcctgggcggggccaaggtggagcaagtagggaaggctgtcgggagttttcccaaccttcccccaggtacctggcttctccaggccagccttcccttgagaaggcctccctaaaagctctggcctctgcagcatgaaatatctgggcagctgttgggatttcgtcatttctatctgtgtacataaaattaattttctgtttgttatctcattgtgcaaacaaatggctgattggaattcttttaaaccaaatttgaggggttagtttgggatagtgtgacttaacaagtttgggatagtgtaacttgactaagagagaccacttccataaggtgccgtgaatggaaaatacacagaggaatcctactgatccctgggctgagtcccaagagcagactttggtgtgctttgggtaacgctttggcacagagtgcagtgcgacggtgagggtggcactgattctccctagagtgcatgggtgggatggaggatggtggataggaggaagggtgtagtagaagaacgggtagatgaagggaggcagggaggattagccaatggatggatagatggatgaaagaattgaagcatagaaggatggaagggaagaagggagggagagagggagggagggaagaagggctgaatgatgatggatggatatggatgggtggatggatagatgaaaggatgaaaggatggataggaggaagaaaggaagagaggaaggaaggggaaggaagtggggaaaagagggagggagagagggagaaagagttgaaggagtgatggatggatggatggatggatggatggatggatgggaggaaggaaggatgggtaggaggaatggtatactagagggacagatggatgaggggagggaggattaaaaaatgaatggatagatggatgaaatgattgaaggatgaaaggatggaatggaggaagggagggagagagggagggaggaaagaagggattaaatgatgatgggtggatatggacgggtggatggatagatgaaaggatgaaaggatgggtaggaggaaggaaggacggaaggggaagggaagggggaagagagggagggagaaagggaggaagagttgaataatggatggatggatgggaggaagtaaggatgggtaggaggaagggtatactaaagagacaggtagatgaggggagggagggaaaattaattaatggatggatagatggatgaaagggttgaaggatggaaggaaggaatggaggaagggagagagagagggaagaagggctgaatgatgatgggtggatgtggatggatgggtaggaggaagaaaggaaggaaggaaggcaaaaaggaaggaaagaagggagggaggaagagttgaatgatggatggatgtgaatggatggggggatggatggatgaatggatggatgggtggatggaaggaaggaaaggagaagggaaatagaatgtgttaacttactcaggctgtattatgcactacaagtttatgtgccccacaaaattcatatgttgaaaccccactccccagtgggaaggctttagaaggtggggagttggggaagtaagtaagtcatgaggatggagccctcatgatgggattagtgcccttataagaggagacaggggagtacttgttttctctctttctgctctctgccacgcaagaacttggcaagaaaacagccatctgcaaaccagaaagaggggccccaccagaacccaaccatgctgctaccttgatttcagactataagaaatacatttgtattgtttaagccacccagtgtaagatcatttttatagcaccccaactgactaagacaagctgacataacaaaatacctaagactgagtggtttaaacaacagaaagttattttctcacagttcttgagggtagaagtccaagatcaagattccaactgatctgtttctggtgagggctctcttcctggcttgaagacaactgccttctcatggtgtgctcacatggcctttcctctttgtgtgcccagagacacagagagagggagagctctggtgtctcttcctataaggacactaatcctatcagttcagggccccacccttatgacctaatttaactttaatcacttccttagagatcccatcttcaaatgtagctacacagagggttagggcttcaacatattaatttagggggacacacaccttcagtccataggttgatgggtgaatggggaaacctaacatccttcctttgttctttcattcattcaataagactttcttaagccaggctataacaaggaaggagacaggcatgttcccggtgttcacaaagctcacagaataccttgactttc

SEQ ID NO: 40745 - DNA, 1450 bp, Artificial sequence
  DNA replication origin
ggaggaaggaagggaggaaggaagggagggaggaaggaagggagggaagaagaaagaaagggagggagcagggagggaggaaggaaggaaggagggagggaaggaagggaggaaggaagaaagacaggaggaagggagagaggaagggagggagggagagaaagagggaaggaagggagggagggaaggaaggggaggggaggggggaggggagggggaggggagtgggggtgggttaggcgagagaagaaggggccgggcatggtggctcatgcctgtaatcccagcactttgggaggccgaggtgggcggatcacgaggtcaggagatccagaccatcctggctaacagtctctactaaaaatacaaaaaattagctgggcgtggtggcgggcacctgtagtcccagctactcgggaggctgaggcaggaggatggcgtgaactcgggaggcagagcttgcagtgagccgagatcgcaccactgcaccccagcctgggcaacagagcgagactccgactcaaaaaaaaaaagaaataggggtctctgaagccagagctggccccctaatcccacgtcatctaggagtggaggctggggctgcaagaacaggataaggccttagaggttcaaaaaaataagaaatgcagtagcctctcccctcccccaccccaccctggcccagctctcccagaagaatgagcaccattctgacagccagggcctccaaaccagatctgcacagtttggtgtccagatatcgctaatgacccactcatctcatttccatgtttgtccctggagcacctactgtgaaccaggcaggatagaaagcacacagaaaggggaaactgagtccagttctcccaagaggtcacaacctggatccacagcacgagaaagtgttcttgagatgatctggccagaccagagaaggccagatatttgcccaacattgcacagcaaggtccagaaaagtgagaattgggacccagggttctagtgctcctggcccagtgctcccctctctatagaacatgtccagggggtagtagaaggccaggtgacagtgaccaggagagatgaggagaaggagaaagaaaggaagtggggctgagcacctactgtgtgccagacctgtgctaagcatttctctctcatccagggtgttgggaaccctctcaaccaccctccaaagccagctttatcattccatttaaaacataaggacgctgaggcatgcgcctgagactcaagcctaggtccgttaaattccagagccgggtcttctgacaagcagaggttgtcctatggatttgttcatataggcccagacccaagactgctaggctctagttcatgggaggtgcaaaattaatgtcaaaggaaacagtttctggccggacacagtggcttgcgcctataatctccgtgctttcagaggccaagg

SEQ ID NO: 40746 - DNA, 1328 bp, Artificial sequence
  DNA replication origin
tcatctgtaaattggggggcatgtggacttggacagaatgggccctctctgtcacttggagagtctgggattgtaagctgccctccgggagatcaaaacaccacacgatgcaggtggtaagggctgccatcaactctcggggtgacccaggtcaatggtcccttctctggctgccctccccatctgtgcaatgggggttttgtcccatggttctctttttgcaggcactggacagacgcgggacacaggggctctgctaaggtccctggtgctacagaagaggacggtgatcaccaggcccaggaaggagggttgctgggaatgaagatcgcagccacgctgcacgatgcaaggctaaggtgcacgcagtgcgctgtggcttcaggtcccgaaagcacaggcctgggacagcttttccagatggcaagtctgctttctcccagccccaacatgcctttctgaaatgtaaagcagcccagtcctggcctcagaatgctggggtgaacaactggagaacggggttccagccactgcagatgaatccagaggcactagaaacacagagagagcaagaaggaaagggaggggacacgagggacaggcagacacccaggggcaggagagaaagcagagggccgtccacttggcaaatatttattgagtgcctactaggtgccagatgctgtgtttggggcaaagagagacagagggagacagaatgggagaggagaaaggaagagagagaaagaaaaggagtcagagaaagagagagaggaagagagaagggtggggagagaaagagaaagagggaaggagaaagggagacagagaaagagagaggaagagagaaagggggaagagagagaaagggaaagagaaagagagaaagggagaaagggaaaggagagagagagaaatggcggggggagacagaaagaaacagaaggggagagtgaggaagagggaaagggagtgagagagaaagggggagagataaagagatagagggaaagggaggaagaggaaaagagaagggaaaagggagagagagagatggagaaagagagaaagcaatagagagagaaagaaggagtggggagagggaggaaggggtggagagagaatgagactagaacctggtggctggagtttgcagctgggcggtacagaatgttatggaaacacagacagagccaggtctgactgcaaagctgcagctcctcccacgatggatcctgacttggccccccactccccactcctcgaattataccctcaggaccttacctggggctgggtgggctgcacaggagtttccaagcctggct

SEQ ID NO: 40747 - DNA, 1131 bp, Artificial sequence
  DNA replication origin
caaacacggatcctttgtgtcttaagagtatatatccatatccccatacacaaatgatgtccaagccgaccccaccccagcactccccctccccaaccccaccaaatgtcaaggggatgcgccctgaaaaggttccctgcctcctgcaacccccacaggtctcccgtttttcaatgaaactctgatagttaagaagagacaaaatagctattcattaggaacaaatgtcaaattaggcgttgcctctgagtgatgctgccgacaccagggctggtaacttttttttcctaaaaatgctggcacctaaaagaactagcgctagaggctgactaactaggaaaaggtgggaggcgttaacacaacttcccaggtgtcctgccagggaaggcggcacacagctgctaaaaagtggagccagcctcaatgttgagggtggggaggggtcttagtgtgaaagggaaggggcaattcagctaaaactgggggtgtgggggcggctgggcggggtactctacaagattcccaaagggctgccatctaagtttttgccaccctgtggcactagaatctacctggtaacatgtggggggcttgggggcagtgtgtgtgggggggtctgtcctcacagcccttggtgtaagcaaaggtgggataaccagctcctagttggggattaggagggtttgtgccctccaaacctcaaaggaccccaaaaggcgaaggctaagtcctgccctggggatggggcgggtcacccgggaagtgagaggaaaacgagtgtgcatataccttctttgctgttggggttctggggtttggccttctcccagggcgccaacgtcttgtcgtcgtccgcgctgtccaccagggccttgtcagcgggcatgtaccaggcagcgctgtgctctgccatcagcgagtccaggtcaatggtgctcatggcgctcttgaccgcctcggagcagcagctgcccagctcgctgtcgccattctgcgcccctgaggccccgacggcgcactcacccttcttgccacccttcagccccagaggctggtcctcggagatgctgaactgctgcctctgtagctggatctgcgcctgaaggatctccagggggtggatctcgtcgg

SEQ ID NO: 40748 - DNA, 1026 bp, Artificial sequence
  DNA replication origin
cagcgctggggagccccacgcccgccccgggcgactgcagctgacccaggcctcccagactgcccccgaactgcaggcccggtgaaggcagcgcgggcacgtggccctctccgggcatcctcatcggctcctgcagagggccccggaacagcacccccgagccaccaggcggaggagggggcgccaggctggggtcgtgcgggccacagtcagcgggcagacccgagccgcccatcctacggggcagcaggtctccgggcggcggatgcggacctgagaaccacgcgctctcttgcgccaagtgcggcgcctgctgctcgaaggtgcccagacgcccggcgcccgtgctgccgccttcgcgctcaaagttcggctgggccaagccgcccaccgggccgccatgcaccaggccgccctggcccacgtccccggggtggcctagctgagccaggttgggctggcgcagccgctgctgctgattccgcgacgccatctgcttaatcatgagggccgcgttttggcgctgctgctgctgctgctgttgctgttgctgttgctgctgctgctgctgctgttgctgctgctgctgctgctgctgctgctgttgcagggactggtggtccggggccggatgctgcaggggcggccccgaagggaagctgtcgggcacaggcggtgtgaactcgccgggtaggcctgggtaggcggaaggggagaggtgattatccagagcgccgttgtgcatgctgccgttccacgaagcgcagcggtccactcccgcgctgcccggaaagtcgaagcgcggcctcttggccacgttcatgtaggggggcgcgtcgaaatgctgcagccgctggttgggcgcctgctgcggaggaggatgctgcatgctgaaaacaggctcggaataagggtgcatgctccggttctccagccggtggatgggatactcgaattgcgcgtgctggctgggcagcatggggcctccgtcctgcaggccgccgctgggcgtgcccgcctcgccct

SEQ ID NO: 40749 - DNA, 916 bp, Artificial sequence
  DNA replication origin
cgcccccaggaacctggcgacccgctgcataatgaggcagctgcccttcggagtcagagggcgaaaacatgtcaaaatgtcccgagggcgcctcgcccgggtaattgtattccagcgagtcgacggctccttggttcgtcaccctccgtggctccagactgtgggaatcggagccgctggaggacggcaggccgtggaaggaggcggctcggttagggctctggtccagcggcaggcatggggccggcacggcgtggctggaggcacctgaactgtggaagtccgggaggttccccggtcgctgcgggccgaagctctcaggcccctggctctccgccatgtgctcatagccctcggcgaagggcggctggctgcccaggcctccggctgcgccgccgtagccgagcaggcgacccccgtgcaggcacgaggccccggggtccgggccaccgaagttgcccccaaagtgggggtgatgctggtggggatgatgacttcccgggtggccgtggtgaggctgctggccgccaaagaagccgtgcacaggctgcgcttgcagcccccctgcgtgcaactccgagtggccgcgcgcgtggaagccgtagggctccatgttcatgcccaagatcgggggttcgcccagcgcgctcatagcaggatccacagggccagggggccccccagtgtggaaagccggggccttaaagtgggtgttcatgctcagtccggtctcgttaaagttcctctcgccctggccagcgttcctgctgttgacctggggctcgaattggtccagcccaaacatacttggcggggggcagagggggatcaatagggcatgacagccggctctccgcggcgcgcctccggccagctactcgttccagcccaggattgggcgctccgggacgctcag

SEQ ID NO: 40750 - DNA, 950 bp, Artificial sequence
  DNA replication origin
gaggtgcttcgcgagtccctctcggacctgagggaggggggcgtacgcgggtcggggggccacgccgggcgagcaggctaaggcgttcccgctgcgctctcagagcccggaatggggggaggggggcgcgggggcagctctggggggtctgcgcacccctctcccgactagcgggggggctctgcgtggggcgttccgagggtctcggctcccctctctgtgtctgcctctcgcccagcgccgggagaagcagcaacaagttttgcatttcagcaatcaatttcagccattacatttgcaccaatcagcgccgcccaagttccgggctcggggcggggctcgctcttaaggtggtccggggtcctggctgccgaagcccccgccacgaacccgcactaccccagctctggggtcccctgcgcccgcctctcctcggggtccggcgtcagtgcgctgggggcgcgccccggcctccgggcgcatcgagctggagagggtgcaggcggaggagaatggcgggagcttggctttgttcacccccttcccattcacactgttcccaactccccacccccaactggagcgagacccaccgggtgggcagggggcggggaggtgggcggtgagcggtacggggcgctcagacaatgaggtcgccaggcaaagaccctagactcgccacggaaagtcgctaagtgtctactgcacttcggctccggggtgaacactccgttctccgctagcggcgcccaagttagccggccctgggattttcttggagggtaaagcagacggggaacctcgaagttagggttctcctcgagagacctgggcgcttgctcactcctccgtcactagggcgttcacaattgttccccttccccactgcctggggttcccggttctcaccggccggcgtgggctccaaggagtcacagtcactcagccac

SEQ ID NO: 40751 - DNA, 896 bp, Artificial sequence
  DNA replication origin
actgaggctttgctgatttaggcacaaagaaataaaggcttgggtaggccctccagtgacaccccccccccgcccgccccggggcctaggaccctggggctctggggctcccgagacagagcaggggggatcttgaacctcctggacaaaaagcgggaggcaataggaaaacctggttgtgaggaagaggcccccacatgggcaaaggcctgggcatagtccaagatactgggtcacacactcagtctgctctcgactatgggtgtctcctgaggcacctatgagccgcctgtgtttctgtgtctggaggaaatagggaaaagtggggacctgtctggagcctgggggtgggccaggagagtgggaagaatggctcacaggcctgtcgtctggggagacccggatgggggcgtctgcagagctgaggcatgacttcacacagggctgggtgggggtctccagcacacctgggcaggtttcctgtggaataattccgtgtgctccagggagggggggtgtgggagtatttttctggggctgtttccaagagttagctccacaaggtgtgtgagtggctgaaagaagggagtgtttggacctggtgaagtttctgttcaggatgtgtgtctcggtcacctttctttaacactgcaaatgttgtgcgggtgtgtggcacacgtctgcattttgtgcctttgcttgtatgcgggtggcggggcatctgcgtgtgtttctgtccatgcctgcgtcggcgttcgtgcatggatctttgggggtcttggtgcatgttctctgtctgtcccccaaccccgcatttctgtgtgtgtgagccactgcgtttgtacctgtgtgtgtgcagctgcctcaccccttgcatgcctgtatctctgctccag

SEQ ID NO: 40752 - DNA, 651 bp, Artificial sequence
  DNA replication origin
ggaacagaagctggcgtcggctgcctccagaacctgtcaggagtcttttatgtggactatggaggtgaggtgtcggtcaaggaggtgggccctgactcggagcagtgagagagagcagaaaaccagtcaccgcaaaacggcttccaaagaaccaactggaaaactcaccggaaagcgtaggctgcccagacgccccgagggaccaaagctgaagggaggagccctcgtaagcagacaagagtgcgcgcgtcgagcttgcgcagccgcagtagaagccgcacgctcttcggcaggctgcgcaaccgcagtggaggcctcgtgtgcccggggtggggcacgaaactgggcggagctaggccccctcgcgcgctgacgcgactggtcgcggcggaagggtgtaagcacgcaggcgcgatggtggctcgggggggcagggaggcggggccgcgcaggcgctgtgagaggcggtagcggcggcggcggcggtggtatcggcggcagctgtgagggggttccgggaagatggtgctgatcaaggaattgtgagtgggtctgtgggcgcgagcgaggccgtgggacggcagtgatgggagatttgttgatggagaagtggtaggatattcctaaatcggagtcagccctgtgtcagcc

SEQ ID NO: 40753 - DNA, 816 bp, Artificial sequence
  DNA replication origin
cccaccctcacttaggatgttctggccacatctgccctctagctgatccttgaacaccctaggcttactccatcctcgggtcatatttccctccaactggaatgcccctctcacatcctaacaggctaggctcaaacaccgcctcctaagacagcccttgtcttgagtcctctgcttctcccagtactccactgtattcatagcatagcacttccccaccaccccaaattctccctgctttctttccaagtgagttgtctcctctagactgtgagcttcttgagaacagggactgtgtctgcttctagatgcatccccactgcctagaaccgtgtctgacacagagcaagccagcgacctccgggctgcggctttgaggcccacggcgctttcggtgtaactgcgcgaaccaactcctgaacagcccgctttcctgggtctcgaggccaagggcctcttttctcccagagggcctccgtcgggagtgctggccgctcatcctgccgagtcacaggtgaggtttaggattctccgccgcggtggacctccacgagaccgcgaagcaggtgaacgtcctcccgcggaacctgagctgccaagggctggggaggggaacagaagctggcgtcggctgcctccagaacctgtcaggagtcttttatgtggactatggaggtgaggtgtcggtcaaggaggtgggccctgactcggagcagtgagagagagcagaaaaccagtcaccgcaaaacggcttccaaagaaccaactggaaaactcaccggaaagcgtaggctgcccagacgccccgagggacca

SEQ ID NO: 40754 - DNA, 1275 bp, Artificial sequence
  DNA replication origin
tcagagagcacagggttgggggtaaggtcacagatcaacaggatcccaaggcagaagaatttttcttagtacagaacaaaatgaaaagtctcccatgtctacttctttctacacagacacggcaaccatccgatttctcaatcttttccccacctttcccccctttctattccacaaaactgccactgtcatcatggcccgttctcaatgagccgctgggcacacctcccagacggggtggtggccaggcagaggggctcctcacttcccagcaggggcagccgggcagaggtgcccctcacctcccggacggggtggctggccgggcggggggctgaccccctcacctccctcccggacggggcagttggcctggcgggggctgaccccccacctccctcccggacggggcggctggcctggcgcgggggctgacccccacctccctcccggatggggtggctgccgggcggagacgctcctcacttcccagacggggtggctgccgggcggaggggctcctcacttctcagacggggtggctgccaggcagagggtctcctcacttctcagacggggcggccgggcagagacgctcctcgcctcccagacggggttgcggccgggcagaggcgctcctcacatcccagacagggcggcggggcagaggcgctccccacatctcagacgatgggcggccgggcagagacgctcctcacttcctagatgggatgtcggctgggaagaggggctcctcacttcctagatgggatggcgctgggcagagacgctcctcactttccagactgggcagccaggcagaggggctcctcacatcccagacgatgggcggccaggcagagacgctcctcacttcccagacggggtggcggccgggcagaggctgcaatcttggcactttgggaggccaaggcaggcggctgggaggtagaggttgcagcgagcggagatcacgccactgcactccagcctgggcaccattgagcactgagtgaacgagactccgtctgcaatcccggcacctcgggaggccgaggctggcggatcactcgcggttaggagctggagaccagcccggccaacacagcgaaaccccgtctccaccaaaaaaatacgaaaaccagtcaggcatggtggcgcgcgcctgcaatcacaggcactcgacaggctgaggcaggggaatcaggcagggaggttgcagtgagctgagatggcggcagtacagtccagctttggctcggcatcagagggaga

SEQ ID NO: 40755 - DNA, 890 bp, Artificial sequence
  DNA replication origin
gaggagcgtctctgcccggccgcccatcgtctgagatgtggggagcgcctctgccccgccgccctgtctgggatgtgaggagcgcctctgcccggccgcaaccccgtctgggaggcgaggagcgtctctgcccggccgccccgtctgagaagtgaggagaccctctgcctggcagccaccccgtctgagaagtgaggagcccctccgcccggcagccaccccgtctgggaagtgaggagcgtctccgcccggcagccaccccatccgggagggaggtgggggtcagcccccgcgccaggccagccgccccgtccgggagggaggtggggggtcagcccccgccaggccaactgccccgtccgggagggaggtgagggggtcagccccccgcccggccagccaccccgtccgggaggtgaggggcacctctgcccggctgcccctgctgggaagtgaggagcccctctgcctggccaccaccccgtctgggaggtgtgcccagcggctcattgagaacgggccatgatgacagtggcagttttgtggaatagaaaggggggaaaggtggggaaaagattgagaaatcggatggttgccgtgtctgtgtagaaagaagtagacatgggagacttttcattttgttctgtactaagaaaaattcttctgccttgggatcctgttgatctgtgaccttacccccaaccctgtgctctctgaaacatgtgctgtgtccactcagggttaaatggattaagggcggggcaagatgtgctttgttaaacagatgcttgaaggcagcatgctggttaagagtcatcaccactccctaatctcaagtacccagggacacaaacactgcggaaggccgcagggtcctctgcctaggaaaa

SEQ ID NO: 40756 - DNA, 1255 bp, Artificial sequence
  DNA replication origin
ccgccgagtccgacgggcccggcgggggtgggcgagacactgggaacagcggccagctccagagggcgcgaggcggggcgcgcggggagggggcgcggcgaacgcgcgcgtgcgcggtgcatgtgtgggcccgcgggggcgcgcgcgcggtttgggggcagtgaggggcgccgcggcggcgcgcagcacggcgggaacatggcgcgcggaaccggcgcgcgcgcctagctggcgggaccgttagctcgaggcggacgcggcccgggccccgtggggatggagcagtcgccgccgccggcgcccgagccgacccaagggccgacccccgcaaggagccgaaggcggcgggagccagagtcgccgccggcgtcggcgccggtgagtgcgtgaggggctcgggccgggagactttctttgtgaaactccggcggtgggagccgggccgggcctcagcggcagaggagcgcctgcgaggcggaaggcgtctcgcagtccgggttcgatcccagccgcgagccgtgaggcggcgggacctggtccgccgcctgcctggctcagtttccgcgagagtgtgtgtggatgtgtgtgggtgtgtgagggtgtgtatgggtgttggcctgcgcacaccggggtggggggtgtcggtatacagtcagcgcctaatgcgcccagcgcctccccttttcccccagcccccgtggggcggaatctggggactggagtccaccggagcggtaagcggcacccgcggtgagacaggtgtcggcgcagcccgggatgctcaggtgctacctttccggggtggggtttgtgaggagtgagctcttcgtccccggaggcgagcaagtctgtcggtggctcatcaaagagcgttgttttgaaaagcgttccacccacctcagcttcgtgctgtgtttgggccactagtcagggggaaggatgctgagcgacatggactttagaggtggggctcccgctggacgggatgtctctgggctctcgagcttacccccacccttgcctcccaaacccgttagagcgtaggaatcattgggagcacctgatcaaaatgccacggactgtggctcaccacagcagggaagccgattttgaacttaaacaagctccgaagttgtgatcaggcgagcttggcaagcactgttttagagagtaggcttcctgcaagcaggagccggttttgtgtatacctcaccatggcatcttggtacctggcatggtgcctgacacactgtag

SEQ ID NO: 40757 - DNA, 1275 bp, Artificial sequence
  DNA replication origin
caatcaaaaccccctcccctgccgccggaccaatgaggagcagcagatgtggccgtcaggcgccgcctcaatgcctcctgggagttgtagtttagaagggagagcggaacttagaacccgggttcccctcgggtgatcccgccccctcgactccccagccaatcagcaacattagtctggttagacgctctctttgcttttccccacgagtgaccacggctagataggccgccggccagatgtggcgggggagagccggggctttgctccgggtgtgggggttttggccgacaggggttcccagaaggagaccgctaagctgcgatgctgcgtcgcaggcgggaagcaattatccccgctgttggaactgcggcggcccatggggccccgggcgggaggacaggttcttctgcccacagtgccgagcgctgcaggcacctgaccccactcgagactacttcagccttatggactggtacgagcgacggtttcgggaaacgggcccgggcgagagacacgtcgaggtctggcctgcgagaggggaggacggatctggctggcggaagagaaggcgggactgatgggggggcggaggtctagagagcaggcgtgagagaagtgtcttgatttctcaggaggaaattgagaggcggggactgagggaagcaacgttgaggtgtggagaagggagacgaacgggactggaggggcgggcgctgaagttagaggaaataggggggccgaggctagaggggagggagatttgaggggcggtacctacgggaaagggaaggagaagtcgaggggcggaacttgaggaaagggtacttgaggggcagggcctgggagactggaagacttgaatgaatagggtgagtaaggtttaaagttgggttgatgtatttaagaaaggactgcagaagtgtgatccgagattagggagtaaagcatgaaaagcttaatattgtgggcgaggcctgagggaaaagtgagaattggagggagagggtccaataaatggtttttccccctgagactgaggttcttggagagacggggcagtgtggatagagctgaactggtaaggaaataggacagactctgggagtagaatgtgaaaggggctgaattaaaataaaccgggagagacagggatgaagggacctgggccgtggaaaagttagggtggtattaaagaaaacatgattcagtcacacttgttcaagcaccagaaagactttcttcaagaccatcttgtagaggggccactgcaat

SEQ ID NO: 40758 - DNA, 1193 bp, Artificial sequence
  DNA replication origin
tgcccccgagcggcctgaggtggagggttctagaaggcgtgacgtggggtcgagagcgggatccgaggctggcgggttttggcagtagctgtggctgcggctgccgggcctggggacgcgggcggccgaggccgccgtcgcagcctcctcgtctcgccggctatggctgcgctcggccggcccttcagcggcctccctctgagcggcggctcggacttcctgcagccgccgcagccggccttccccggccgggccttcccgccgggggctgacggcgccgagttggccccgcggccgggacctcgcgcagtccctagcagtcccgctgggagtgcggcgcgcggacggtgaggagcccgtcgggcgcagggcgcagggcgggcgggcgggcgggcaggctgggcgcccctcgcggcgggcgcgggcaggggcgcgggctccgcgccggggctttttgactccctccccacggccctccgcgggagcttcgcagcccagtttacagatgaagaaactgatccccggagacgttaactgtaagtcgccgggggtcacatagcccaggagtccggtccgaacctcagctcgactgcggcccggagaagtgagactttcccagttggaacctgggcgactcggtctgggtgccccctcggcgcggccgctgttagtgacaactttcagtgtctcatctgcaaagtatgccaagcatgggacagaaatgggtcctcttagtgagattatttaaataaagtgcttaacacagcgcctgccccgaggacgtttccctggtttggtcctccctaatctgtcttccattacgttgataaaaggacaagttgagatttcactgtccagttctgtcggggcaatccaccgttacccgactgacctgtgatttgtacccatcccactaggctcagaaagggacgtttggtatgtggggatgagcaagattattggagcaagaaagaggatactgaaaccacaagctcgagtacatttcttaattgactgatttttgtttgtttcaacagtgtttctgttcactgtaaaaagaaacacaagcgagaggaggaggaggatgatgagtaagtttcagtggttgtttattcactctgtggtcaccgttagttgaacccctgttatagtctaaattacttaagtgaaaaggtgaaacattagatgagtgt

SEQ ID NO: 40759 - DNA, 1352 bp, Artificial sequence
  DNA replication origin
cgcgacgctggccaatcgcggagggccacgaccgtagaaaggccgggcgcggcgaggctgggcgctgggcggctgcggcgcgcggtgcgcggtgcgtagtctggagctatggtggtggtggcagccgcgccgaacccggccgacgggacccctaaagttctgcttctgtcggggcagcccgcctccgccgccggagccccggccggccaggccctgccgctcatggtgccagcccagagaggggccagcccggaggcagcgagcggggggctgccccaggcgcgcaagcgacagcgcctcacgcacctgagccccgaggagaaggcgctgaggaggtgggcgaggggccggggtctggggccagatctgaagccgggactagggacaggggcaggggcaggggctgggagcggggacccagcactggccgccccgcagggctccgtcgcctttggcctggcgggtcggtgccagcgtggcgcggggcggggcaggaagcccggactgaccggatccgccacgctgggaacctagggcggcccagggctcttttctgtactttttaactctctcgttagagatgaccagagctggggatgcgggcacctgtcttccaggccctcttgctgtgtggccgcagactggtggttcagcctcttaactcggacatgaggtcgaataatctgttttggtttactgctatttctggagaggcgcggagctgaaataacagagctgttgaaagggctgggaattctgcgaggctcactggtctagctcagtatctgcgttcttaaaatggaacctacttcatgaggtctttggggagattgagacttggatataatgtgcctagcacttagtcctccgtaaatgttcactcttttgtgatcattgtgccttctgtgatttatgaagtgtctcttctgagttaattcttttaaaaaaaaaagtgtctcctccaacagacacggacccatcagcaggtcactgcctaggatctcaacactagagatcagggagtggcatcagcctctcccttttctaaattggactgggggacggagggttgatgtcatagcaagattgcagccttcactagattaatgaggccaggttggatcctgtttaagagaactggagacaggaagcagcgggggaatagatggggaaagaggaaagttccttatgatgcaagatgaatagtgtgtgtgtccagccccagtgctgtgacggggatgagtctgaggtggacggatgatgcaatataggagagaataaagcaggtcttcgagctagattgacagaagactgtattttttattttgttttattgaggggaggagcctgaa

SEQ ID NO: 40760 - DNA, 1480 bp, Artificial sequence
  DNA replication origin
taatcgccgcttgggctcgactcgaacagcaccacctccacgaacgccgtctccttggcccgcgccgcgccgggccccgcggccgccagcagcagcccgagcagcagcggcagcggcggcggcggcggcaggcggctgcaccggaggccgcgggggcggcggcgcaggcggcggcggcggcggcccgtggcccctgggcgcccgcccgagcgcggcctcatggtcctgcggcgggagggcgcggagggcgggcgcggccgggcatagtcgcgggccggctgaggaccgaacgcgggcggacgcctcacagccccatcacggcggcggcggcggcggctttgtgggtcgcaggctcagctcggctcccccggccgtcgcgccgcggccctttcatctgctccacgtgaggggttatccccgccccggcagcgtcgtgacccgctctcccctccctccccgccctcggcctccgcagccgccgccgtggggagtgagaaggcggggcaggcgcgcctgcggcgagaggcgggtcccaaaggccgagaacgcccctcccctccccgcccctgtttctatctgtgctccgcccctttatcctcgctcctccccatcatcccagctccgccccccgcccgcggtctgcgctccgccccgtcgtcctcgctccgcccccgcccgccgtcttgctccaccccattattctcgctccgccccccgcccgtcgtttctactccgccccttcgtcctcgctccgccccttcgtccgcgctccgcccccgctgcgctccgccccctacggcagacatttctcctcgcggttgctagagttcggcgggaaccgggaccgcaacctgctccgggcgatgggcgtcctctctggaggcgccacgcgtcctggtccggtgcaggagttagggccatttggtctggaaaggcctcgtccttcctgcttcccccgccccaattcacagttcccaggaagcttgatcgcccgctctgggcgctccattcccacccccacctccaggatcgaacggggaaggccgggatggtcaggggcagtttgcagcttgggtcgtgtccagttcttgcacaggtgtcgcctagacagtttctctgtatgaagtctgcactgaaggagtggggaagaccttgaggatcttctgatggagttcatctttctgcagccccggagactgtaattcagacaccgcccccaaaagaagtctggaaactttgagtctcgccacgtgcaggccagaggagtccaacaccattatcaccctctatgcacagactgctggctgccaaactaacatatctaaggcacgtgctcaagggctcagaggttcccagtcacccagaaaataaacttttaattccctgcccctttttggaacatgccttttccttcctcatctagtcctctgagaattgaacccctccttcaaaagccagatccaattcccacttcctccgt

SEQ ID NO: 40761 - DNA, 1619 bp, Artificial sequence
  DNA replication origin
tgaggccgcgctcgggcgggcgcccaggggccacgggccgccgccgccgccgcctgcgccgccgcccccgcggcctccggtgcagccgcctgccgccgccgccgccgctgccgctgctgctcgggctgctgctggcggccgcggggcccggcgcggcgcgggccaaggagacggcgttcgtggaggtggtgctgttcgagtcgagcccaagcggcgattacaccacctacaccaccggcctcacgggccgcttctcgcgggccggggccacgctcagcgccgagggcgagatcgtgcaggtagctgcccgccgcccgggccccgcgccgcctccgccacaagatggctccgggggctgcgcccgccgaccccgccgcgggctgcctgactggcgggcgggcgggaggggtggccgagaggccggcggcatccctcccctgcgggcgggcaggcgggcgggacgcggcctccggggcgcatccgcggggggcgagcgcacgtgggggctagagctcctgtgaaccccggggcgggaggggcatcctgggcccggcacccatgctggggcagcccccttggccggttgggtatttaggtctgcctcaggtggaagtcccgggaactacctgttgaatgccaactttgaaaagacaagtgatgagggatggggtggctcgtttcaggttgcaggctttgcttttccatccatgcatgttctttttgggtgcggccaggtttgtctgaagggctgcacaacgtcgggttcttccccggaacctgccgtccgcctcacctgggcgccggtgacccttctgcggggctctggacaagcagcagcaggcaggggaggaggcggagctggtcgaggagtggggatcgggggttccctggagtggcgatggaaggcagccctcgctgcatgcttcacattacagagggtgggagggataccgcctgcccgtccctcggccaaagactgatgcgaaggacctgcaaatggggagatggcgtatctcactgacaggacctccaccttggaccaaatgaaagagatctacattccaaaggaaactggctagggagacctttaagccgtgcctactctttggaggagggactctcaactgaagcttctgcggatggttagctgggtggatgtcttcccgcttccttggccgtgattttatcaacttgttactagacagccagcgcactaataatggcagttaatatgcgcgcctcggatgggggcgattcgtaaaggttggcttgtctttgaatctttggggtgatcggatgtctgcagggcctaagctttgtgggccttctgtgctttactcttgggtgagttatgaatgaaaagaaggggactccatggaatgattgcatagcagcccgcagcgtagacagcctgttccgtggtgtccttttccttccttgggtgcagactcaaagccctgccttcataggacagggagagctgtgcagcttgactccgtagaggtgtgcccttacaaagctggaggaggtacccaggcccatgcgattaatcagcagcattgccttaccgggctcttatccccatccgaaaacttctgtagggtaaatagaagaggaaa

SEQ ID NO: 40762 - DNA, 1245 bp, Artificial sequence
  DNA replication origin
ctcgccccgcccagcaccatgactgtgcaccgccgggagctcctcgggaggcggggagccctcgaagcacagggcaggtccccggcccgagctgcccgagccccccgcctcactggcacgacaggggctccggctgcggtagatgaaggggtcatagtcgctgctgagggagctgcggaaggtggagcagctcccgtacacgccctggttgctgacctcagtgcagtctaccacagagtcactggaggaacagtggcactggccggagctgctgctgctgctgctgtcgctgcctgggcagtcggccaggtagccactgcacaccgagcggtggccgtgatagcagctgaagctggacgtgctgccgctctccaggtgggagggcggggccacgtgcaccacggtggggaagagcaggctgccactgccgctcggaggaaaggcacgggccgggccccggggtgcgaggctaggtggggactgcccctcctgctccgggtagctgaggccctggaagtagtagtgctggtacatggtctcatactgggagaagcaagctgccttggagaagctgcggccactcaacttgggcctgcggaaggggtgggctggggagtaggcccggtgctccaggccgcagcggtgagcggccaggctgtggtccaggtggaggggtgggtagctgcggatgtaggcgggggtctgcggggaatagaggctctgctccccgtgccggtccatggtcagcaaggtgacggggttgccgtgggagtccatgcttgtcctcgtagggtaggctgggatggcgttggtcctgtgcacgcggccggggtaatgcaccggcagggtcaccctctgctgccgaccacgtgagaggttgctggtctccacacacaccgcgcttgggtttcccttttgttctggagacaagtggaggaaacagagtaggcagggctgagcatactggtgtcagaggctaaagggatttttaaaacgggcaaaggctgaagcagcaggcttggtcacctgccaaggtacccattctcacaaccctgcccccaaactgagctgcagcggcagaggctgacctgcctgtctgtgtgaaatggcccatctcctgtaagggccccgctcccaactccccactgctctgcctgacagggcaccacagaagtctgcagaaaagaatcggattcaaagatgccagtgtccctccatccctgtttaatgacacagtgatgcagg

SEQ ID NO: 40763 - DNA, 1122 bp, Artificial sequence
  DNA replication origin
cgagccccagccctccccagccgggcctagcgccggagcagctggcagcagcaccttgttcctggggccccacctctacgagggctctggcccggcgggtggggagccccagtcaggaagctcccagggcttgtacggccttcaccccgaccatttgcccaggacagatggggtgaaatacgagggtctgccctgctgcttctatgaagagaagcaggtggcccgcgggggcggagggggcagcggctgctacactgaggactactcggtgagtgtgcagtacacgctcaccgaggaaccaccgcccggctgctaccccggggcccgggacctgagccagcgcatccccatcattccagaggatgtggactgtgatctgggcctgccctcggactgccaagggacccacagcctcggctcctggggtgggacgcgaggcccggataccccacggccccacaggggcctgggagcaacccgggaagaggagcgggctctgtgctgccaggctagggccctactgcggcctggctgccctccggaggaggcgggtgctgtcagggccaacttccctagtgccctccaggacactcaggagtccagcaccactgccactgaggctgcaggtgagagcaggaaatggcagtaggtcagagcaggagtttccatcagggtcgtcttgtcttctgtcttaggcattttctgaatgacttcttttgtgtccttggttttaaacaccatctgaggctgaagacttccaagggttactcctcagcctggccctcccttggagttcagacccattgagccctctgcttccatgatctcgggatctctccccaagatgcctgcagcctgtcatgtccacagcagtactcatttccccctctgccctgctccccatccgcatgctcacaccaaaaacctagcaccagctgggggtagtggctcatgcctctaatcttggctcacccaaccactttgggaggccgaggctgtggatcacttgaggccaggagttggagacagcctggccaacatggcaaaaccatggagtcggttcatgactcctcatggctgggatattatgtaggagccacttcataaacattctcgttactc

SEQ ID NO: 40764 - DNA, 1046 bp, Artificial sequence
  DNA replication origin
agtgtacatgacagagagagccaattggaggaggggctgctgccagcccaggaggggtgccttcccgcagcaggcaggacagaccaaagctactatcacaaggcatggctgcccagacttggccaaataaactttgtttccaacctcctgggtgcccttcctattttctcctctgaaacctgaatgagatgcagaaagaaccttgtgaactggagagacctgtgtcctgctttgctgaagtctttctctggcatcctgcttaaagtagtccaaaggttagccaggtgtggtggcatgcctctgtagtcccagctatccaggaggctgaagcgggaggatcactggagcccaggaattggaggctgcagtgagccatgatctcaccactgcactccagtgtgggcgacagacggaggccctgtctccagaaaaagaaaaagaaaaaaaatccacagaacatgtggtcaacataattttcttgtctttgcagtactttttgttcttcggaatttgtgtgttttcaggttgactagaatgtaagttccaagaggaaggtttggtcttggtggctgtatcctcagcccttggcatgttcctcgctgaatatttgctgaacgaaggaaagttcgactttattgagtgtttgctttgggctgagagcttcacctgcatcttctcatttcattctcttcaaaggcactgctgtctgggagggcacagaagtcctggaataagggttctcaggtccggtggagaaggtgggaagggcccaaaattgtggaaaaggggaaagctggacaaaagtggggatcaccggtggcaggaggtggggggggcggtccccaggaccgaggctggctgggtgaggggatggtgggtgcccctaagttccaataagaggcccagaggatccttgaactcgggaatgacacatgaaaacaataactgaacaagattcttcttgctacagcgctgagtcgtgtgggtggagagggacagagatcgagaggcctcgtgggaggtagctgcgcccttggggcccggcc

SEQ ID NO: 40765 - DNA, 1818 bp, Artificial sequence
  DNA replication origin
tgatgcgtgagtggcaggagcagcgcgcggccggggcggggcgtgcgtgcgcagtgggctccgccccccgggcctctccgcggatccgggcgggccccaggctgcaggggcggtggcggcgctgagctgggcgggccggggcggggcggccgggcggccggggcggggctacactcgggccccgcgtcctgctcccatggccgcccccggctccccgcgctgccccctttaccccgggccgcgccccggggccccgcactgacggcccatggcgccgccagccgcccgcctcgccctgctctccgccgcggcgctcacgctggcggcccggcccgcgcctagccccggcctcggccccggacccggtgagtgtgagcgaccccccgccgcccgccctgagcggagcccactcgaggggcgacaagggccggccggcctgagagccccctccctcccgcttcaggaccttccgggccccttcccctcgcccctaggcgacgcccctcaggccgggatggtcccttcctgggacccgggctacccccaggcccgtcatcgacgcccccgggcccggtactgtcccccggctgcaggacccggtgctcctcagcgacgcccctcagcccaggaggccctctccgccttgagtcttccaagaccctctgcgacgccccccgggctgggacatcttctctgtctcgggatctgggacccgctgcccgagtccctcagcgaccccaaccaggccgggacgccccctctccccggtacctcctgggatcccgtcccaagtccccagcgacttcccccgggccgggacgtcctctgctccccggtacctcctaggatcccgtcccaaaatccccagcgactccccacgggccaggaggccccctgctccccggtacctcctgggatcccgtccccaagtccccagcgacccctcccgggccgggacgacccctgctccccagtacctcctgggatcccgccccaagtccttcatcgacgcaccttgcaccgggacgactcccccgctacaagaggctatacgcccctctccgagacctccagcgacatccctcccctgggccaaggtcccctccctgagcctcactgcgacgcccccgcgtcccccagtcctctcctcccgcctacaccggtggaacccggcgcctccccgcgcagagcagagcggaggcgggaggagccggcgctcagccccttttcccgagtcctcggctgcacccgcttggcggacattataacttctgcctcgcgaggaacgggatggacttgttcgccctgctagaggcaggttagggtcctgggacgaccttgtacccagacggacgggacgtgccctctctctccgctgggccgctttgaacttccctatgactcaggtgatggcgcagaagggggagagaaaaaaggaagcagtgatgggaaacttctccccaactgagtttagggtgctcttcctgagggtgcaacgccgagctccgtgttttgggtcagcccacaccttagacaggtcactcactacccaggccaaggccaaggccaggtcttcccgaggtgaggccctggaccaggatgaagcttggcttttgcttaacttccacacgcaaccttgtagccgaatcctttctaagtggaagagaaggcaagagggcgttgcatttctctgcaggctgtttgggtgttgagcataggccatttgtgaaagggatgggaagagtttattaccagtctgcaggagtaggaaaacccgcctctgggttctccacccaaagtcacagactgatgttggaa

SEQ ID NO: 40766 - DNA, 1511 bp, Artificial sequence
  DNA replication origin
tttcttgtgaccaccctccatcctgaagctatccaggagcctaccaagagttgcctcattagaacaaaagatgctctggtcacccagaaaattcccggagagttgctctgtgccagggcagagaccaagtgtcacgggggtatgcaaacattgagtgcatagcagaatcattgaggtacatctttgaaagctgtctaccagagttggtacatatatttagctttctttgttctcagctacagctttttctactagaccaaaccatctgatgtgtggctgtgaaacactaatatgctcagtgtggtgggctgaagaatggccctccaaagatgttcatgatataatccctagaatctgtgaatacgttaccttagatggcataggagattttgcagatatgatgaaagattttgtgatagattatccaggtgagaccaatgtaatcacagggtccttagagaggcaggaggatctgagtcagagaagacagatgtgacaatggaaacagagggaggaagaagaggtgatgaaggaaacagagggaggaaggagaggtgatgatggaaacagggaggagggagaggtgatgaaggaaatggaggagggagaggtgatgaaggaaatggaggagggagaggtgatgatggaaacagggaggagggagaggtgatgaaggaaatggaggagggagaggtgatgaaggaaacagggaggagggagaggtgatgaaggaaatggaggagggagaggtgatgaaggaaacagggaggagggagaggtgatgaaggaaatggaggagggagaggtgatgatggaaacagggaggagggagaggtgatgatggaaacagggaggagggagaggtgatgaaggaaatggaggagggagaggtgataatggaaacagggaggagggagaggtgatgaaggaaacagggaggagggagaggtgatgatggaaacagggaggagggagacgtgatgatggaaacagggaggaaggagaggtgataaaggaaacggaggagggagaggtgatgatggaaacggaggagggagaggtgacgatggaaacagggaggagggagagttgatgatggaaacagggagaaaggagaagtgatgaaggaaacggaggaaggagaggtgctgacggaaacagagggtgaaatggtgcggctgcaagccaaggcatatgggcagctgctaggaggttgaaaaggcaaggaatggattctccccttgagcctctaggaggaacttggctccactaacaccttgagtttagacccataagccccacttagtactcctgacctccagaactgaaagataataaatttatgttatttaaagccactaggtttgtggtaatttgtcccagcagcaataaggaactaatatattcaccaaaagtccttgaggaaacccacttgtggaatctttgaaggaattaggagcttaaatagaaggtataggataatgggcttctgagagggcttttcctgccct

SEQ ID NO: 40767 - DNA, 894 bp, Artificial sequence
  DNA replication origin
gcaccatggtgatgtcgctggagggagagggagcccttgggggactatgtgaagtaggggagagtgggtgacaggccattaccatgatatctcaatccttcccacactcctgtaacgaatgtacaactgtcctccctgcaaaagaaacactgaggctgcgagaggggcaagacttgcctgagctaactggagcagaagtagcagaggcagggtttgaacccagctctcactacctgtcccttgggacagggcaacagctttctctatgtggacacactggtgatggatcccccgtcctgcctgcctgcctgcctatggtggcctatgctgcctgcccctggtgagtccaggaggggcaatccagtgactggcagatcctttctggggagtgtttctagaagggaccgtgggtctggacaagccataacaggaagtagccaagctgggcaagggcttccccagcccaggcctaactactgcccatcgatccaggcagaaggcggggttagagactgccctgggagattgggggtctgggtcccctctgatgagagctctggtctctccctataaacacacactcctatcacagacacacacataacacacatgcacataaatccacatcaagcatgcacacacatccatcatacacacatacgacacacacatgcacccctgcacacacacactacgcttacatatacctttgtgggatgtagagccattcctccagaagcccatccatgtaccccagatgaaaccacccaacaccaattcttaccttgttacatatggtgaaatcaaggcatagaccgaagtgctgtggttaagagctgttactctccgaagtcaggcgatctgggtacaaatcctggctctgccaaacccctg

SEQ ID NO: 40768 - DNA, 719 bp, Artificial sequence
  DNA replication origin
gcgtgtgcgcgccgggaccctcggccagcggggtgcaaaggcgccgggagctcttacctgcgtccggagaacggagctgccccgatgctccacgcagcgccgcctcccgggagcaggagcccgaggcagagcagcgcccaagcccgcgggccgcccatgctgcaccaggcgccctccgcgcgcggcccctcgcggtcgccgcccccagcctgtcctccccgcctgcctgcccgcgccgccagccgccccggacgcgcggagcccggtttccagctccgcggccggagggcgggcaggaggcgggcgggcgggggcgggggcgcgcgctcccggcctcgcccggcccctctgcgctgccccccgccccctgcgccgccgctgccaacccggaaggagcccggaggggcccgggcggccagggcgcccccgccaggaggcccgccaggtgtccacctgagccccacgccctgcgccgcggggcccttttgggggcggggtgccagctccgaggtgtcctcccacgggctgtagactgggaaactgaggcccgggccacggtcccagacgcagccgggacccgaacccacctcacctgagcgaatgatatccgggactcatcctttttcgacacctttgcgggatccagccctccaaggaaagcttcctgagcagtgcgcgccacgtgtattgggcacctcaccgcggccacttcacatcct

SEQ ID NO: 40769 - DNA, 923 bp, Artificial sequence
  DNA replication origin
ggcgcagggggcggggggcagcgcagaggggccgggcgaggccgggagcgcgcgcccccgcccccgcccgcccgcctcctgcccgccctccggccgcggagctggaaaccgggctccgcgcgtccggggcggctggcggcgcgggcaggcaggcggggaggacaggctgggggcggcgaccgcgaggggccgcgcgcggagggcgcctggtgcagcatgggcggcccgcgggcttgggcgctgctctgcctcgggctcctgctcccgggaggcggcgctgcgtggagcatcggggcagctccgttctccggacgcaggtaagagctcccggcgcctttgcaccccgctggccgagggtcccggcgcgcacacgcccccacctccaggaagggctgggattggagggcgatccagtccccagcccgggtgagggcagggacacggccatcccgcggtccggctgaggctcccgcgagtgcggggtcccctactccatgtgtcggagctggctgcctcccctactccctccctttcaacccaggagctcgagaggagggggaaggggcgcaacgagggcgaagccctggcccttctgttcccctgtccctagggcccctccccctgcacttgggaaaggcctatgacaccccctagccgactcttctcggaccctctctccccttttccctgttcctgtttttttgctttgttttgttttttgtttgtttgttttgtacccaggctatttatctccctcggaggagggactggggtggagtctcacagcccagtgggtcagtgtcggagataccccagggacctggcattttggacagagaaaagagggagcacagtcttccttctgctctcctagcggcggggaacctcctccctgctggcctttacggaggagctcccagaac

SEQ ID NO: 40770 - DNA, 1166 bp, Artificial sequence
  DNA replication origin
cggcctcctaaagtatggagattacaggtgtgagccgctgcgccaagcagtactttttaatttaaaaaaaaaaaaaagttttatggcagcgcagcggctcacacctgtaatcccagcactttgggaggccaagacagtgaattgcttgagcttagaagttcaagaccagcctgggcaacatggagaaaccccatctctaccaaaaatttaaaaattagctggatgtggtattgttcacctatggtcccagctactcaggaggctgaggtgggaggatcatttgagcccaggaggcataggttgcagtgagctgagatctcgccactgcactccagcctgggcaacagaggaagaccctgtttcaaacaaaacaaaacaaaaaatacacaacattttatcttgaaataatttgagatgtgtgatagatgttttgtttttgaaaccaggaagatagtattatggatgggggttggggggatagagaaaggggatggggcaggggcaggcaggagatcctaccaggatctctgggcagtgtctatgctgatctggtggggatggtgatggagccccatgggagggagctcacaggcctcctggaggaagaacaggccaggctggctgtgacttgcgcttcacatatacagttttccctgagtggatgctagtatcccctccgcttgacaggtgggaaaactgaggcacgacctgtgagcaggcttcctagggagggacactggaggagaccatgacatgcctgacaggggatgctgctcgccgagtcagttcagagctgccctgtgggttcactgagggtgcgagcatggggtgcggggaaggaggtggggagggtgggatggtggttgcctggactggcctgtggcagggaacaaccacccaggagggagctgctcacccaccttggcctccagcaccttcagccgctctgtcagctctgacactttgctgcagttgagacaacctgcggggagggaggaagctggggccagggccaagggtcctaggcttcccctcagaacccttcagtctctgggggttgggatggaggaaagcgtcagatacctgatgaccccaacccacgagggaccttaggcttgggaagggctataggatcacagtgggtccagggggacctcaccctatgg

SEQ ID NO: 40771 - DNA, 995 bp, Artificial sequence
  DNA replication origin
gtcccagtcctctctaaagagcgcccgacgtgacactcgggccaaaatagcatctaaggggccagagcgggggtgagcgggtctcagcgtgaaaccggagaggctctcagcacgagactaggctgtttggaatggttccgtccgctggctctagggacggtcgctgaagagtcggccctgcagggagacggagatcggcgggagggctgggggaagggacccggactagaacaactgctgactaatccgcgggccgcggggaatgggtggcgcgccagccggtcggcaggggtcacgcggccgggtgtgcgcggaatggattcagggttctcgggtcgcgcccgggagctagagtcctgactcccagccggggtccccgaccggcctttcggggttgccgggcgcgctctgcagtgagtacccgggacgcgtggcccgggccagcggggaagggtccccaaggccggtcggctgggtgggaggcctcgaacgccgtgcctggccccgagaccctatccccggtaacggtcgaggtggagcaggccctttaatcatccctcatccgatatccttgtttctacagaaggggaaactgaggcccaaggaaattgagtatctctgcaaagtcaccagctgagttcgaaccagacagatcctgggaccccctactctatccgccaccggaagaatctccgtccttgtctttccattctgccctcccggcttcccagtaaggtaggcagggcctggtggtgcactgccccgtttcatagattgaagaaagtgaggtccagggggctcaagtcccagttccgagtgtccacgggtaagcccttcacccttgctaaggtgcccagagctggggaatggttgtgaggtgtcgatgcaggaggaggtttacggtgggtgccttggccccaaaccctgcctccaggcaaggctgaccctgcccaccttcctggacctctagccccagccccctaggtggatgcccg

SEQ ID NO: 40772 - DNA, 1107 bp, Artificial sequence
  DNA replication origin
aaactgggggccctggaggagggaagcacattctgtctaaagcccaggcgagcagaagttcggcttggggctggaagccacagagggggcagctcggcagcgccagacgccccagccgactgggtcttaaggatgacggggctcccgctcataggccggcacccctcggcccacaaatccacggtatctttatttgctttttcccctggtttctcaggaaaccctgaaaacggggagggaggcctcacagggacagcagcctgcgggccccccggcggtttcatagtgaccggcttgaggcctggccaaatcctccccttcacgcagggcctcgaaggccgcaggccccgcccacgtggcgggaggcccggagctcagggcgcgaggaccgccacacaatggaggccaaggcgggccccgcgcgcccccgccgcagcaagccccccgcgcgccacgggcgccggaagattccagaaccggcccgcccggttgggggaggggagaggaatgcggatccccgagctcgtcgggccgcggcgggtgcctcaaccccctctcggcaactccactcagtcttcccagccaagcccagagacgaacgacccccagtttgggcgttccggctaccgccggcgcgaccgcagttccaccatactcacccgtggacgccattttctctccttcctcctcgttctctcaacgtccgtctccctctcgctttccctctaggcgccgcactgcgcaggcgcaaatctcgcaaccccgggcgcgaccatcgggccaggccacgggggtggggtcaggagggatgaaccaccgcttactcgttcttcgcgtccgcaactcttgtcccagtcctctctaaagagcgcccgacgtgacactcgggccaaaatagcatctaaggggccagagcgggggtgagcgggtctcagcgtgaaaccggagaggctctcagcacgagactaggctgtttggaatggttccgtccgctggctctagggacggtcgctgaagagtcggccctgcagggagacggagatcggcgggagggctgggggaagggacccggactagaacaactgctgactaatccgcgggccgcgg

SEQ ID NO: 40773 - DNA, 843 bp, Artificial sequence
  DNA replication origin
aacagtgagacctggtctctacaaaaacatcaaaaaaattagctgggtgctacacctgtagtcccagctactcagctcaggaggtgaagctgtgattgcaccactgtactccagtcttggtgagagcaagaccatctcaaacaacaaaaaaccccacaaaccttggtctggcttctgaggaagggctggagatactgaggggagaagcagggaacccagtgagggggcgttatggaggtgggggctgtgggtggatttgcaccgtcctggatttgcaagagagctaggttgggggctggggtttgagaatgggtcatggatgactccaaggtttggggcaggtgtgtgtttactgaactggggtgtaggcaggacgggacaagagcaagccctgctctacacccatcatgcacccaagccgagttggccctagggagaaagggctaaagccacagtatggaaaggacagccaggcagtgtggcggctcaggggagcgcaatgctagctttggggccttcctgcatttagggataggagaaaaaggaagcaatgaaggagatgggagaacagagaaggaaagaccattgattgggcaacattagaggtggttggtgactgagagctgcttgttttagtgcaggtgaagaatgaagtgggttccagagagggaggggtggacaaagctctttccatgtgcttcctgtagaaagggccaggaagatggtttgatggagggaaggggatgatggctggttaagggagggttttccaaacgcagggagtcaaacacatattagaacaggaaatgaccagggaaagaaacagcagaggtgcacacaatg

SEQ ID NO: 40774 - DNA, 1111 bp, Artificial sequence
  DNA replication origin
gactggggaggtggctgaggctggagtgcagggaggtgggtgagggaggaggtagagagattagagagaccccagggccggttaagcagggccttgggggccgtgtctcttttgagggacatgggagccatgcagtgatttagagcaggggtggttggcttaggtcttaacattcccggccgggcgcggcggctcacgcctgtaatcccagcactttgagaggccgaggcgtgcggatcacgagatcgggaaatcgagaccatcctggctaacatggtgaaaccctgtctctactaaaaaaatacaaaaaaattagccaggcgtggtggcgggcacctgtagtcccagctacttggcaggctgaggcaggagaaggagaatggtgtgaacctgggaggcggagcttgcagtgagcccagatcgtgccactgcactccagcctgggcgacagagcgagactccgtctcaaaaaaaaaaaaacattccctggggctgctgtggtgggccagggcaggagctggagcctcagaggaaaccaggtggtgagagggcgctggattctggccatattgtgaggggagagctgatgtgctggtggattggttgagtgtgaggacggaatccaggacaactcccagggctgagcactgggagggcggaggtgctaacacctggggagggaagggctgctggaggtggaggagggttgcaggtttggggtgggggtgaatcagggtgtggacatttaacagtttcatcttcaaaataccccgatgagctatgatactcttaggtgttctcattttacaatttggggaaactgaggcccagagaaggcatgggatatgtgtagccagcagctgtgcaggaatttgactcctgcttatacctaccttgctgcattttggggttttggacatgggtgaagttggacggaacccaggctctgtcattggtcattgggtgggatggtgaagctccctgagcctcagtggcaccatctgcagaatgggacagtagtagtagttacatcatggggttgtgaaaaataatgccactacccagctcagtgtggcctggctcagcatatccacttctctggggaggaggg

SEQ ID NO: 40775 - DNA, 2112 bp, Artificial sequence
  DNA replication origin
cccgtccatgcgcaccaggcagggagtgctgggggtctccgcgctcacctggctcatcccgcggccccggggagcattgccccagcgggggccggagccgggccgggccgccgcagggaggcgccgcccgagccgcagctctatgcgtcccgcgccgcggcctcctcctcgccgccgtctccgccccgcctccctggaattcggatcctgcccggagggggcgggcggggccgcgcgctcttaaaggggccgccccttccccgagccggcgggagctggggtggagctggggtctccccccgcccgcgatcgggccaggaatcccgggtcttcgagcgctctcgacgcagagagccccagggcccccagacaactgcgaccggcccaggcgcccaacccccacccagcctagtacccggggccccgtccaacctctttggtctcctggggaggaggttgggaccttttaatcgcccccctccccagacggtgggctccccgggctggcgcacagcacggcctgttcccaagatgaaggcaggaagcgatagcggctggaggctgcaaagtcacctcctcccgggtggacctcccctggccagataaacggcaccgccgcggggagggggaggatgcccctggcgactgagggctccttgtgctcactgaatgctcatttttgaccctgaaatgaggggaaccggttttacagatgaggatactgaagctcagagaagtaggcagatggccaaagccggagttccgcacagaacaggggacggggggcatcggaggccggccggacgcgggagggttaagccccgctgggctctttttaaactgcagaggacggaccgccgggatcagcgggaaatcctgccccctgctgctgccggctgggctgggcgggacgtcgggcgggtctgggcggcagccatgctacacgggtggggcaggcctgcagggaagccgccaaccacagccaggctcagagctccaataaatctcctactgtgtgctgccaggactgctctgcgcccttgacctgaatgaactggtgtgtcacctctgtgaaggacactcatgcccaactggggcacagtcaggagagcagctggtggagccaggatttgaacatgacgattatggggacgccctcatccacggatcagcagcattggttgagcacctgtgagccaggcctcttggtgccaggcattcacaggcatcccagagagtccttgtgaccttttcttttttattttcttcctttttttttttttttttttttttgtctcgctctgtcgctcaggctggagtacagtggctggatctgggctcattgcaacctctacctccggggttcaagcgattctcctgcctcagcctcccgagtagctgggattactgatacctgccaccacgcccggctttttgtatttttagtagagacaagttcaccatgttggccaggttggtctcgaactcctgacctaaggtgatctgcccgcctccacctcccaaagggctgggattacaggtgtgagccacttgcctggcctgtgtgaccttttcaaaggcgttttctcacctcagcgccccccatggcacttcctccagtgaggaaggcagtaactagcaatcctcaaggctgacacctgcgtggcacctactgtgtgctgggtctctttgggcactggaaatcaacagcaaaacagcagggaaccaagcagagccagctctcagggcctgttgtccaagtctggcagggaggcagccccagggcagagacagggatgaggtgcagagaagacagggatggagccgggtgagggtgtgggtgtgagggggctgcaatttaaaatccctcatcaggaaaggaagtgagggaggaaggtcggggatatctggagagggagagggaacggccagtgcaaaggccccatggtgggcatgtgtccggcgtgctcaagaagactggggaggtggctgaggctggagtgcagggaggtgggtgagggaggaggtagagagattagagagaccccagggccggttaagcagggccttgggggccgtgtctcttttgagggacatgggagccatgcagtg

SEQ ID NO: 40776 - DNA, 1087 bp, Artificial sequence
  DNA replication origin
aattccagggaggcggggcggagacggcggcgaggaggaggccgcggcgcgggacgcatagagctgcggctcgggcggcgcctccctgcggcggcccggcccggctccggcccccgctggggcaatgctccccggggccgcgggatgagccaggtgagcgcggagacccccagcactccctgcctggtgcgcatggacgggggtggggaggcggggcgggaagcggcgtcctcggcctctgttccccggggctgtgtgaccttgggcggccccgcaccctctctgggcccagagccccagcaccggcagggcctgcggaggccgctctgagtcctggccccgcaggcaccggcctggagcgctggggaggcttcttggaggaggcggggcctggccctggccccggatcgccgagaccggccacgctgcgccgcctggacgccgggctcctccacccacagctctgcgaccttcacgagctcgaccctttctgcgcctcagtttcctcatctataaaatggagataatgcctccgcgcgctgagcccgagcgcggtcgtgctgttacactattgctgctgctatgtcgttaatgacggcacagcccttatggaaggggggccaaggaaggcacggggaccttcccgcaggacatggggtgggcaccagccctaagccatgcacataacccactctgaggtcaggacctgggttcctttcgtgtccactgggggccttagccgttgtcttcacttctctaggtcccagcccttcacaatgggcgcgcctccctgcctgagagggaggccccagccaagccccagtttccaccgcaaaaagccacacagcaaacacttaatggaccctaaatttataaaaattatcccatagagtcctatgaggcagggaatgttactgtacccatttcgcagatgaggaaacttggggcaccgacatttcccagagccaacatgtaaaccaggcatttggcctgagtgacagactggtgcaggtggccagcagcttaatttgtactgagcgcttactgggtccccacagcgatcctgaactgtgttcctgcccacagt

SEQ ID NO: 40777 - DNA, 1517 bp, Artificial sequence
  DNA replication origin
agagccaacatgtaaaccaggcatttggcctgagtgacagactggtgcaggtggccagcagcttaatttgtactgagcgcttactgggtccccacagcgatcctgaactgtgttcctgcccacagtgactcggccggtccgggcatggcagacccagtggcgggcatcgcgggctcggcggccaagagcgtgcggccatttcgctccagtgaggcctacgtggaggccatgaaggaggacctggccgagtggctcaatgccttgtacggcctgggtctcccgggtggtggcgatggcttcctgacagggctggccacgggcacgaccctgtgccaacatgccaacgccgtgaccgaggctgcccgtgcattggcagccgcccgcccggcccgaggtgtggccttccaggcgcacagtgtagtgcctggctccttcatggcgcgcgacaacgtggccaccttcatcggctggtgccgcgtggagctgggtgtgccggaggtgctcatgtttgagactgaggacctggtgctgcgcaagaacgagaagagcgtggtgctgtgcctgctggaggtggcgcggcgtggggcacgcctgggcctgctggccccacgcctcgtgcagtttgagcaggagattgagcgggagctgcgtgctgcacccccagcccccaacgcccctgccgctggggaggacaccactgaaaccgcccccgcaccagggactcctgcccgcggcccccgcatgacacccagcgacctgcgcaacctcgacgagctggtgagtcccccagcaccaggtgccagggacccgacagcacagccagtgcctgcaatctgtccctgaacctcccagggtccaccctgctatctgcagaacagtctgccccacaaaaagagtgcacatgttgagcaccaaaccgaggaatgtatacctgaccccaaggaaatgggtagcccacagagagggaggtgccggggagatgacgcagcccagccgggcctgggacaggatgcgggctcctggcacgatcttccctcactttgtgtgctaactgtgcctcaactgagcttgtgcattccttcttctggggggccgcatgatcggggcgcctcctctgtgccctccctgcagtcagtcttaggcagatgtacccacaacctcatggaggctcgaggttgagcgggtgctgtgatgctcggttgagacgaggcatggaaaaacctgggcaaggtgcctggcacacagtaggtgccccagggggctctgcaggtctccccactccccaggcacccctgggaagcctagctgggttgctgctgttgctgggagcagggatcctgtttggaattacaggattcgttctactctaagcataggcgttgctgggccctgcccccaagtctctcctctcccaggatctgggtggcccctgccacccctgagggctggaccaagagtttccttcttatcagaaggtcaggactacaatgtgcctgcctgggaggcagatagcggat

SEQ ID NO: 40778 - DNA, 1386 bp, Artificial sequence
  DNA replication origin
ccctccctgcagtcagtcttaggcagatgtacccacaacctcatggaggctcgaggttgagcgggtgctgtgatgctcggttgagacgaggcatggaaaaacctgggcaaggtgcctggcacacagtaggtgccccagggggctctgcaggtctccccactccccaggcacccctgggaagcctagctgggttgctgctgttgctgggagcagggatcctgtttggaattacaggattcgttctactctaagcataggcgttgctgggccctgcccccaagtctctcctctcccaggatctgggtggcccctgccacccctgagggctggaccaagagtttccttcttatcagaaggtcaggactacaatgtgcctgcctgggaggcagatagcggatggcagtgggcagagcctggggccccaccccctgtcctggaccagggtcactcaaggccccacctgcttatttcctctggcggcaccactgccgctgtgggcggggaggcgggcagggctgcccacatagccagcttggcagcgctctggctctggtggggggctgtatgtggtgcgtgctcacccggccagtggtctgtgtgtgcatgtgtccgatgtgtctgtggtacgcctccacatcagtgcccacccaggggcatggggccccctgcacctgtgtcctgtagcctgcctggccttcctgtgggccccagccttcttgtctgagaagtgggtgaagcgggagtgaggacgggctctgggccttccccaggtctaggggctgtgggatgttcgtcaccgggtctcagaccatggcctgaccacagtcccatcatctcatcctgggcagctccctggacccagagagccaagaaaggggagccggtgaaaggtcatgtgtgggccgggcgtggtggctcgcacctgtaatccagcaatttgggaggccgaggcgggtggaactcctgagcctgaccaacatggagaaaccccatctctactaaaaatacaaaattagccgggagtggtggtgcatgcctgtaatcccagccactcaggaggctgaggcaggagaattgcttgaacctggaaggcggaggttgcggtgagacgagatcgtgctattgcactccagcctgggcaacaagagcaaaactccaactcaaaaaaaaaaaaaaataaaaaaaaataaaaaaaataaaagaaaggtcacgtgtggaagctgtaccccatccggggcaacactgcctccatccacttacccggaaagcctgacttcctcctgaccctggaatggctgacattaagccccaggaggaggacttgacctctgacccctaccctctctctctggcctcaggtgagggagattctgggccgctgcacct

SEQ ID NO: 40779 - DNA, 1393 bp, Artificial sequence
  DNA replication origin
ggcccgggcattggccaggaactcctcttccaggcgccggaacagctgctgctcctgctgcgggtcgagctgcaggggtgtgcggaagatgctggccggtgtggtgcccaactctggactggggctggagacccgggaaagccggggtgctgcagggctgcgggcacggggagtctggggggtgctcctgcccgagcccccactgcccctgccccttggcacccatgagtgctgcccgtctcgatccctgcgcacaagcagcacagcctgctcctcgcggctctggctccgggcccgccgggcagggctggggaccgacagctgggctcccctgcctcctggggccccccggggccggccgcgatccagccggtctcgggactggctgcgcagggcaggaggccgtctcggagaggccggggtgcctgtggtcagccgccggctgggtcgctccctccgggggccagtgcctgtgtcatcactgcgggtaccaagggggccgctctgggcggaggaggctgaggagtcactgtccccggagtagcggcgggagcggggatgggggggcagctgatcccggggcctggggcagggggacaatagagacagatggggtaccacggaaggactggcatgcagaacaggcagggagaggaacagcagggtatgtggctggtggacggggctgtcaggggcatcggtctgtcctggggacttccagggagaagtgagcagcttcctccagcggcccagggccccaaaagccacggaagaagaagtttcctgggctctagacaccccccttcccaggacgggccagaggaagcaagagctggactggctgccgcccagccacagggcccgccccagctgtgttgttggtttggttgggttgccatggagatgggaagccaggcccgcccccacccacgggaacttttcccagggtgtgagtcactctggcgcacaggcaacccatcatgcaggccagggctgacgcccccccaccctctggacccctcactcctcgtcctcctgcatctcacctgggtggggtctcgggcccctcctttgtgcttcgtaagctaacgggagtcatctcaggccgggagccccggcgctcactcccagggactgggctagcagggcggggactggtggtgggcgacaccctctgtggagaaaaggtgcagaccctcggctggggtgggcgatgagctgcggggagagaggacaggcagcatgtgagggacagagccacagaagcaagtcccctgcccgtccagccccagccccaccctggcactgaccagtggaggagcagcggcacgggtcgtgcttgtccaggtaatgctccagcgtgtcccagccaccacccactcgcaccatcacg

SEQ ID NO: 40780 - DNA, 1825 bp, Artificial sequence
  DNA replication origin
aagctgctcacttctccctggaagtccccaggacagaccgatgcccctgacagccccgtccaccagccacataccctgctgttcctctccctgcctgttctgcatgccagtccttccgtggtaccccatctgtctctattgtccccctgccccaggccccgggatcagctgcccccccatccccgctcccgccgctactccggggacagtgactcctcagcctcctccgcccagagcggcccccttggtacccgcagtgatgacacaggcactggcccccggagggagcgacccagccggcggctgaccacaggcaccccggcctctccgagacggcctcctgccctgcgcagccagtcccgagaccggctggatcgcggccggccccggggggccccaggaggcaggggagcccagctgtcggtccccagccctgcccggcgggcccggagccagagccgcgaggagcaggctgtgctgcttgtgcgcagggatcgagacgggcagcactcatgggtgccaaggggcaggggcagtgggggctcgggcaggagcaccccccagactccccgtgcccgcagccctgcagcaccccggctttcccgggtctccagccccagtccagagttgggcaccacaccggccagcatcttccgcacacccctgcagctcgacccgcagcaggagcagcagctgttccggcgcctggaagaggagttcctggccaatgcccgggcccttgaggctgttgctagcgtgacccccactggaccagcccctgacccagctcgggcccccgaccctccagctcctgactctgcctattgttcctccagttcctcctcttcgtccctcagcgtcctgggtggcaaatgtggccaacctggggactctggccggacggccaatgggctgcctgggccccgaagccaagccctttccagctcctccgatgaaggcagcccctgccctggcatgggggggccactagatgcacctgggagccccctggcttgcactgaaccctcgaggacctgggcacggggtcggatggacacacagccagaccgtaaaccctcacgtatccccacgcctcggggcccccgccgcccctccggacccgcagagctggggacatggcatgccctgcactcagtcaccccgagggctgagccagattcctggatgtgatggaccagctcagctgtccccagaccccatcccttctccttttcctttgtggccttaacccttctgcatcagggagccccctctgcctcttgagtaccagacctcatgggaccagaccccttgggaccacatggcacaatgggacctctgttgtacattccggttgggggatgagcgttgctatttaattactaatattattgaatgccttagaggaggccgggcgagcccggtgttctgaagacctgtggcccagcagagcctctgacagtaaagttttgctccagccacctgtctgtttcttggggactccaccttggggccattcagaccctttcgaggaccctggagttaactgcctggaggccaagcctggcaactctgacctctaggcttaaggcgttatcccgcccagcccagaaatcccaggcgcactcaaattattttcccttttattatcccgtggtaggtgtggcataaagaatatgtccagtgaagctccaggagcaggctgcgtgtttccagtcaagttcatagccaagtcctttccatccaatgggattgtgacccattgaggtcccagaaaggactggtcatctccaatggagcttgggacctggttgggtccaatgag

SEQ ID NO: 40781 - DNA, 1940 bp, Artificial sequence
  DNA replication origin
ggctctgctctctctcgagcttcggcacccgcccgagccgctcgcgcgcccgccacctgtctgcccactcggctgtctgtctgccctcccgccgccagctcctgcctcgggcctgccctctccggtctcggtgctccgaggggcgacgagaagcgcgacggggccgtggcgcaccgggcagggcgcgcggggcgcacggcctgggggcgcacggtgcggcgccggcccatgaggctttccagcgcggggagcgacagcgccggccggccatggggggtagcctgcgggtggccgttctaggcgccccgggcgtgggcaagacggccatcatccgccagttcctgttcggtgactaccccgagcgccaccggcccacggacgggccgcgcctctaccgacccgcggtgctgctcgacggcgccgtctacgacttgagcatccgcgacggcgacgtcgctggccccggctcgagccccgggggtccggaggtagcggctcgaggagcgggcaggggcgtgtgacagtgtgaggggtgtgcgtgctcggtgcacacgtgcgtgtccgcgtggaggcctcgggcgcctggctgtgctccgggatggagggatgtgtgtgcgtcctgggatacttgcgtttcagcccttcccgccgacctggagacgcccaagcccaggctggaggccgggcgattttgcccaggggcgttcccttgctcctgtgagcgcctccacctttgcctgcctcggctgggggtgtggagcagctcttggtggtgcataacggtgccttcccgagagtgtggcgttttgtgtttggggccttgagcagagctacaatgggagagactggggtcaggagcaggggtgtactttctacgggggctggtggaggggttcattctctgccctatcatttttgtcccctggagcgaagactcgtttagtaatttgtgcaaagtaaaggacagacctccgaccctagagcagtgaagaggaaagagcaggcaggattaagcagggcttcctggagggagtggcatttgagctgaacctggaagaccgagtgaagttctgagtaaaggaagtggcaaaaacataccaggtggaaagaccagcaggtgcttacgctacggtcataaacggttacagctgacaatctgggggcgtggtggaccacgggactcgggccaagggctttggaattagtcttagaggccgtggtaagcaccgagagcatctagggaggagagcggcctgagccgagttggggaaagctgaaaagaggaagattcggggtaaacagaggggagaccaaggatgaaggaggctggctgacaggctccaggcacgatttggaaaattttaccctggtggtcatgaggagacggcccggaaagcttgggggaggggcacagaggtctgtatgggggtgatgttggcctgaggattagcgtccaggcccctgcagagggttcgagagcggaagagtggaaaggaggcttccgcaaaccctggcctcctgtccccaggagtggccagacgctaaggactggagcttgcaggacacggacgccttcgtgctcgtctacgacatctgcagcccggacagtttcgactacgtgaaggccctgcggcagcgcatcgcggagaccaggtaggggcccggcagttctggcggtggggagctaggacaggtctggcagggcctttgcctgaggagagtgtgtagggtctcccaacgtcgtgggccgggtcttaggccttcgcccgtgggaaggtcttaagctgtatgtgctctttggcccacatgggcctggggtttcgttggggcggcggggggggcggtgtctctggccgtaggaagggaatgcgcctgcgtgtgtatacccactgggggaattctccggccgtggggtccccgcgtctctcatctccattcgg

SEQ ID NO: 40782 - DNA, 1474 bp, Artificial sequence
  DNA replication origin
aacccagaagtctgaaaagttacaacgtgaaagaggacatcaagtgaagggaaaaatcatggtaggaaagaaagatgaagccagcagtccccactcactgagctagaagacctggaacactagacagaggtggttctgagcttcctagtggctgaggagaggagtgaaagcggaccccagcccccgatctagcatgggaggatgaaagcacagccattgttctggagacactttctggttgtcattatacaggctccctggaggatgtgcctcctcccccttcaggatttagctcctctacttcccctgggctggtgtgggcacattgtctgtgctttgacagtccctagatcccatgtgttctagaaccttctctcccaaagcagaactttttttttttttcctgttttctgttttttaaatctatctcagcctcctgacaagcaataagatttggaatatttgttgaggggataaataaatgaactccttagtcagtgcagagatctgtgcattgcggccatttcttgagcattgccgccatttcttgagcattgccatgtgcaggtcagagacgtgggagcccccacacagcggggaggagagcagaggcggaggatgggggggctgggctaacccaggctttccaagctgtgatggggcaggagcttctccactagctcgagggagggggaacttgggctctgggcgcctgttttggaggttgcatccctttgaggggcgctacgggttgcaactcacgcaggaaaggtgaccttagtagtgatggaggtggagtgggccaatttctggatctttatttagtcacctccagccttgctgggacagggatctggggctaagctgctgtggtctcggcaccctctgtccccacttcccctcgaggacggctgtttgaatattgtctagtgtgggccatttacccccgtgggcaggaggaaggtaggagggacttcaaaggagacttcaagggcccccccactgcccttctaaccttgcagattcccctctcgggcctgtttcctcttctctcaaccagcgatgccaggctgaggctgtaggttcgagaatcacgtaggtaatgggcctggcacatagtaggctctcaagaaaaggttggagcctcttgaggagtctgcctgtgatggatgcggagcgcagacccagcgcagtgcggcgattcgcccaaggtcacacagccgccccccccaattcggaccccgggcggcctgactccgggggccggggcttgtcgggagccagcgtgggggcgagcagtgtttggaagagcggccgcggcagtgggtgggaaggggcttctattttggagcgggtgagaggagcgggacacgcggaggaggtaaggaaggggtaggccctctccgggatctctgtcccccagtcaccttcctgcgacccttcctgggaggggcgtcctgggcggtgggggaag

SEQ ID NO: 40783 - DNA, 878 bp, Artificial sequence
  DNA replication origin
agccatgccccccggtcaggttcagccagcttctgcgtactctctcagccgccgtggcacagccaagaacaaaagcagggtgctttctgtcctcacagatctgtccgggggcgtgctcagggttaaccgagcaggatgggggtggggaggcgctttcaaagcagagggaacagccagtgtgaggtcccaggggcaggggcaagccaagcctggggagcagatgggcaccaggctgtggaggccaaggcccgtggaggccattgcaggattggaaggagtttctcagggtgccatgatcagatttgcatttcacaagataacatcagctgctgtggaaagggggagagggtggaaatggggtgccacctggcagctgctgtcttacctgggaaatctggtggcagcttagatgctggtggcacctctggagatggagagaaatggaggccctggaggcagatgtaagaggtggccttcacaggacttgggttgcgtgactgtctcaagggggttagggtggggtggggggctggtgcctgatgtttctgtggtttctggcctggcaacctgagagacagtgggacctttgttggcactgagtgcgctgcggaagctgtcggtggggtctgagccttttcacctcaaggggcctgtgagccgtccacaggagagtaaccgcctgagaggcgtttgtgagcccacaggatgccgctggtggatgtcttccatggcagggctctaactcatcctgtttgctcagcaaacactccccaaacactggtttcacaccaggctctgagccaaggtggtaaagacagaaaaacagagcctttccctcagcgagctctctgagtacaggagagacagacacaagctca

SEQ ID NO: 40784 - DNA, 725 bp, Artificial sequence
  DNA replication origin
cgtggggcggggaaagagattaaccctctgcttttactttaggggaaggaagggagggacactgtgctgaggggacccgagaggggaggcaagtgatccagcagggtcacatagtgagccagggacccctccctggacttcctgtcgggggtccagttccgtgttttctgggctgttcccctcctgcttagggacccctgcgaaaggacccctggggatgctgggagccctgagacgcccttgagagtttgtagactcgtacttccactctgaacctcccccaggcagttatctcaacacccactacacccctactttacgcgggttttcctgctccaggatccccaggacagaacagacatatcccccaggaaagacctctgccagttcctttctctttgccctctgtctccttccagccccctagttctaagcagaccctcagagctgggaaattgatggcgctgtccctttaaccactttttactggaaggagagtgcgctgggaggagggaagagggggagggagtttctggttttgcatgaagcagcagaacatgatgaagcatttttcccccatctaaagatccagtcgtgctccagtttgcagagggcaaggggctggttgcaggtggtgctgggaggatggaggtgagtggctggtctgaggtccctgagaaaggcatggggcgggtgttgggcaggactcccttgctctcagatgg

SEQ ID NO: 40785 - DNA, 846 bp, Artificial sequence
  DNA replication origin
acaagctccaactcctgacccccgactgccccaggaagttccactttgaggggtctctggctgaactggggatggggaacccacatcttgccgttctgtcaacactaggaagtcctcttttctccctccccctccccatcttctcagcctcaacttgtcctctcttcccccactcctgtaacagacaagcaggcgcctgagtcggcatcccttctctcttacagggaagtgatgagatgctttctgagtaccaaagtccctcaccccaataggatgtcaggtagaagaaggggtccccaggatttagggggccctgcaacggctgtgacatttggctctttattggttttggctcatgttttatgctgtgggagtgggggtggtgctgcggctggcgcttcagcaccggggacagggcctgctctttgttgggcgtggggcggggaaagagattaaccctctgcttttactttaggggaaggaagggagggacactgtgctgaggggacccgagaggggaggcaagtgatccagcagggtcacatagtgagccagggacccctccctggacttcctgtcgggggtccagttccgtgttttctgggctgttcccctcctgcttagggacccctgcgaaaggacccctggggatgctgggagccctgagacgcccttgagagtttgtagactcgtacttccactctgaacctcccccaggcagttatctcaacacccactacacccctactttacgcgggttttcctgctccaggatccccaggacagaacagacatatcccccaggaaagacctctgccagttcctttctctttgccctctgtctcc

SEQ ID NO: 40786 - DNA, 1721 bp, Artificial sequence
  DNA replication origin
gctccttctcactgcgtgaggtggccaccgccaccatgcagccctccggcccgttgctcagcgtgtccagcgagtcggtgcttgaggcggcgcctgcgccacggaagcggctgggcgaggcggacacggagctcacggacgtccgtgtccacgagtggaagccgctggaggagccagcggcggagcgcgtcccgcctgcgccaccctttcgggctagcgcgtagtggaggctgccgccgccatgcagcggcgcgaacggggcgcccagcagcgcgtccgcgccgccgaagctcatcatggcctgagcaggtgcgcgaggccgggacggggcgggaggcactgcggcagcaccagggcgccggcccttttatagccgccgcggccgggtccaaccccttggcagtgagagggtggggaggagggccccgccctctccgcctcctcccctgcggccccccggccgaccggctccgccgcagtgagaggggcggggcaggggaccgaggagggaaggggaatcgacgctgcgtcagaggagaccctcgaggtcggggaagcgggcagaggactcccggagtgggccagtgaggacccccgggtgcgcgtcggaagagcctgcgagtgtgttcggaataagaaaggggacttgaaacagggagaggacaaggagaaacctgatgggaataggggcaggatgccctcgggatggagcaatggaagattgcagtcattaggatgaggggatccctgtatgagacaggacacgaggctttccaaatagttaagagaggctttcaggatagggggtgcagagactgtgcagccagccccggaacagaggagggagcaaggcagtcctgaatgggagcatggacgctccatagaacggagacaggagacccctgaccgggggaggtacagtgttctcctaacatctagaggacccacttggagagcgctcaggaaactccgcggccagccccggaatagatgaagggggacctggagttggggagaatagcaaggctaccctgaatgggggtatgggagacactgcagaggatggagagagggaaccccggatgggtggggttggggggaggcaaggcgttctctaaaaagtctgcagtggcccccgagagaggagatgggagaccctgctgccagccccagtaaaggggacggaccctcagcgaagcgggcagaaggtcccctgaacaggcaggagaaagctgggctgagtttgaggggcagagaacctacagtgggggtaccgtaggagggcttgggcatgaagttgagagagctggcccctgtgtggggtggggggaaatgatgggtgtcacccgagccagcttctgcacactggggtcagctaggcagtttgctggtcgaatgaccttggacaagctgtgtcctcccacccttgtttttccatctgtacaacgaaggggtcttgccccagagacaagctccaactcctgacccccgactgccccaggaagttccactttgaggggtctctggctgaactggggatggggaacccacatcttgccgttctgtcaacactaggaagtcctcttttctccctccccctccccatcttctcagcctcaacttgtcctctcttcccccactcctgtaacagacaagcaggcgcctgagtcggcatcccttctctcttacagggaagtgatgagatgctttctgagtaccaa

SEQ ID NO: 40787 - DNA, 1164 bp, Artificial sequence
  DNA replication origin
ctgcggcagcagcaggcgggccgctccgctatgggcgagctgtacgagcgcgaggtccgcgagatgcgcggcgcggtgctgcgcctgggcgcggcgcgcggtcagctacgcctggagcaggagcacctgctcgaggacatcgcgcacgtgcgccagcgcctagacgacgaggcccggcagcgagaggaggccgaggcggcggcccgcgcgctggcgcgcttcgcgcaggaggccgaggcggcgcgcgtggacctgcagaagaaggcgcaggcgctgcaggaggagtgcggctacctgcggcgccaccaccaggaagaggtgggcgagctgctcggccagatccagggctccggcgccgcgcaggcgcagatgcaggccgagacgcgcgacgccctgaagtgcgacgtgacgtcggcgctgcgcgagattcgcgcgcagcttgaaggccacgcggtgcagagcacgctgcagtccgaggagtggttccgaggtacgcaggcgcgcgggtggggggaggggcgcccctgctgaccccgcagcgaacttttgggctgcgtgacccaagggggcgctgccggactgcgcgtggagtggcgcgctgctcaccttccctctgcaaagtgcatgcccctagttaaatcgcagttttactctgggtctcttgtgggacgccccaactctgggttgtccttcggttccccctttccaggttctttacggctgtacttcaactctgggccccctgctgctctctaccccaagcttaggcgaccccactctgagatccctcccccgtcaagaaaaaaacaagtttcctctacaggaaaaaagtggtgcaggattctggtctgcaagcgctggagactcttagcccttctaagtagcaaggcttccccgccaatgctgccatgccctctcctacaccccgcaagaaactctattcctctcacccctaccaggctccttcccactacctgctcagtgcttaacgttcctaccttaaatcttccacgtgggggtgggtcaggaccttttcgcatcctttcttcctagagggaaccattactacagtcagttgttgcctgtggcggaggtggctggtgggccctttcatgttttaatgtcccctttctcctttagggaagctgggagcctcccaagtct

SEQ ID NO: 40788 - DNA, 1341 bp, Artificial sequence
  DNA replication origin
agtgtcggattggctttggcccaattcctttctcgcttccagaaggactccccaaaattccctctgtgtccactcacataaaggtgaaaagcgaagagaagatcaaagtggtggagaagtctgagaaagaaactgtgattgtggaggaacagacagaggagacccaagtgactgaagaagtgactgaagaagaggagaaagaggccaaagaggaggagggcaaggaggaagaagggggtgaagaagaggaggcagaagggggagaagaagaaacaaagtctcccccagcagaagaggctgcatccccagagaaggaagccaagtcaccagtaaaggaagaggcaaagtcaccggctgaggccaagtccccagagaaggaggaagcaaaatccccagccgaagtcaagtcccctgagaaggccaagtctccagcaaaggaagaggcaaagtcaccgcctgaggccaagtccccagagaaggaggaagcaaaatctccagctgaggtcaagtcccccgagaaggccaagtccccagcaaaggaagaggcaaagtcaccggctgaggccaagtctccagagaaggccaagtccccagtgaaggaagaagcaaagtcaccggctgaggccaagtccccagtgaaggaagaagcaaaatctccagctgaggtcaagtccccggaaaaggccaagtctccaacgaaggaggaagcaaagtcccctgagaaggccaagtccccagagaaggaagaggccaagtcccctgagaaggccaagtccccagtgaaggcagaagcaaagtcccctgagaaggccaagtccccagtgaaggcagaagcaaagtcccctgagaaggccaagtccccagtgaaggaagaagcaaagtcccctgagaaggccaagtccccagtgaaggaagaagcaaagtcccctgagaaggccaagtccccagtgaaggaagaagcaaagacccccgagaaggccaagtccccagtgaaggaagaagctaagtccccagagaaggccaagtccccagagaaggccaagactcttgatgtgaagtctccagaagccaagactccagcgaaggaggaagcaaggtcccctgcagacaaattccctgaaaaggccaaaagccctgtcaaggaggaggtcaagtccccagagaaggcgaaatctcccctgaaggaggatgccaaggcccctgagaaggagatcccaaaaaaggaagaggtgaagtccccagtgaaggaggaggagaagccccaggaggtgaaagtcaaagagcccccaaagaaggcagaggaagagaaagcccctgccacaccaaaaacagaggagaaga

SEQ ID NO: 40789 - DNA, 843 bp, Artificial sequence
  DNA replication origin
tcaatgagctgttgggtacacctcccagacggggtggcggccaggcagaggggctcctcacctcccagaaggggcggccgggcagaggcgccccccacctcccggacggggtggcggccaggcggaggcgcccccctacccccgacccgacggggcggctggccgggctggggctggcccccacctcccccccggacggggcggctggccgggcgggggctgccccccacctcccggacggggcggctgctgggtggaggggctcctcacctctcagacggggcagccgggcagagacgctcctcacctcccagacggggtcgcagccgggcagaggtgctcctcacatcccagacggggcggcggggcagaggtgctccccacatctgagatgatgggcggccgggcagagacactcctcacttcctagacgggatggggtccgggaagaggtgctcctcacttcccagactgggcagccgggcagaggggctcctcacatcccagatgatgggcagccgggcagagacgctcctcacttcccagacggggtggcggccgggcagaggctgcaatcttggcactttgggaggccaaggcaggcggctgggaggtggaggttgtagcgagccgagatcacgccactgcactccagcctgggcaccattgagcactgagtgaacgagactccgtctgcaatcctggcacctcgggaggccgaggctggccgatcactcgcggtcaggagctggagaccagcctggccaacacagcgaaaccccgtctccaccaaaaaatacgaaaaccagtcaggcgtggcggcgcgcgcctgcaattgcaggc

SEQ ID NO: 40790 - DNA, 676 bp, Artificial sequence
  DNA replication origin
gcccagtctgggaagtgaggagcacctcttcccggaccccatcccgtctaggaagtgaggagtgtctctgcccggccgcccatcatctcagatgtggggagcacctctgccccgccgccccgtctgggatgtgaggagcacctctgcccggctgcgaccccgtctgggaggtgaggagcgtctctgcccggctgccccgtctgagaggtgaggagcccctccacccagcagccgccccgtccgggaggtggggggcagcccccgcccggccagccgccccgtccgggggggaggtgggggccagccccagcccggccagccgccccgtcgggtcgggggtaggggggcgcctccgcctggccgccaccccgtccgggaggtggggggcgcctctgcccggccgccccttctgggaggtgaggagcccctctgcctggccgccaccccgtctgggaggtgtacccaacagctcattgagaacgggccatgatgacgatggcggttttgtctagtagagaggggggaaatgtggggaaaagatagagaaatcggattgttgctgtgtctgtgtggagagaggtggacaagggagactccattttgttctgtactgagagaaattcttctgccttgggatgctgttggtctatagccttacccccaaccccgtgctctc

SEQ ID NO: 40791 - DNA, 1213 bp, Artificial sequence
  DNA replication origin
tagggtctttgtcctggttgggaccgggctgtgatggggacctgatgaaagatggtgagaagggcaggtactgggccctggagagtgggagagggcagaagacaggaggagtggcccattcccaggcgtagcttgtgatttaacacccactgggggcttctggtagtcagctcctccgtcgggaagttctgtgggaaagagatgatggcaggggagcagtgggggatccccaggggccatggctgcacagaccctttgttcctccacctcgaactgtacaggtggggaaacggacctgagagggaatgggagttgtccaaggtcaccctccctgctgtgccgtggcagcaccaggtctgggacccaggcctgccaatgcgccatgcactttgcacccaactggtggcctcctgggagtgggagtctggctgggccatgtgctctcagcctgggcttttgtttgggccctgctctgggctgagctagggcttggcctccctgactggccctgggcagcccctcactccttggtccccacagccctgtacttcccccatctctgcatatatgaccctgcacagttatgacttggtgcttgtctgtctctctcactagaccatgatctcatttttctctgtttccccagcctcccaccctcagagggctcaggactgtgtatggtcaaggaatatttaccaaagaagtgaggccacctgttccccctcccccaacctgtgaaaaggaagcaaccatccctcctgccctgcagcccaggaatgaagctgcaaagttctgatagtgcctgccatgagatgttacagcacagagcagtggggcttttggacagctgggaaagaggagtggcataagcgccccacctagactgcccaataattagggataaagctgacaccgtgggaaaagcctagagtttgcctggcactaacagatctaactcagactttgtaggtggggtgacctcaggactctttaagcctcgggttcctcatctgtaaaatgggagtaatcaggatgtatctcatagggttgttgaggattaaagatgctgtggttggtcgggtatggtggctcatgcctgtaatcccagcactttgggaggccgaggcaggcagatcacttgaggtcagcagttcaagaccagcttggcaacacggcgagatcctgtctctataaaaagtacaaaaatggccgg

SEQ ID NO: 40792 - DNA, 919 bp, Artificial sequence
  DNA replication origin
agactccgtctcaaaaaaaaaaaaaaaaaaaaaaagaacccttggtattattgttccacgctcccattttaccgaggtggatcctgaggcccagagtgggcaaagggcttgccaaggtcgcagagcgcgcagaggattagaaccctgacttccgtccagcacctgcggagttggagacgcccacaggaaacgcccacctgaccgggtgagtgagggggcgggcgagccggaggggtggagtttattcgcgccccgcctccgccaccagggcttgggggcggggccttcctgcaacctttgcggctccaacatggctccgcggctgtgcagcatctctgtgacggcgcggcggctgctggggggcccggggcctcgcgctggggacgttgcgtctgcagctgcggcgcggtgagagcccggccaggcagggatagacgcgcgcggggtggggtgcaggcgcgggggccagggactgggtcgtgggggaggggctgagactcctcgcttggaatctgggggttagaggcggggcaggatcaaggcctagggaggggtctgggcaaagaatgggggaggtgagaaagggatgggtagggtctttgtcctggttgggaccgggctgtgatggggacctgatgaaagatggtgagaagggcaggtactgggccctggagagtgggagagggcagaagacaggaggagtggcccattcccaggcgtagcttgtgatttaacacccactgggggcttctggtagtcagctcctccgtcgggaagttctgtgggaaagagatgatggcaggggagcagtgggggatccccaggggccatggctgcacagaccctttgttcctccacctcgaactgtacaggtggggaaacggacctgagagggaatgggagttgtccaaggtcaccc

SEQ ID NO: 40793 - DNA, 915 bp, Artificial sequence
  DNA replication origin
gcctcagggccaccatggtggccggctgcccggcccgggaacggtctgggctgcgcgggtccccagcggccagcatgggccgcgaggaccctgcctgagcggaaaggggagttgggggacgggccctgacggctgcagggagggcacaggagccgggaccttcggtgcaggcgcgacccggcactccgggattcgggccggagatgccggggacgcctcgggacgggacccctagacggcagcggcccagactccgcgcgcctctcagcggccgactagggtcacggggccgcgctgcatcgggcgcgtacgcgcgcgcgtggctgtcaccgtcctcactccgcgcgcccgcgggaagcgcaccctccccacagcccggggcctgctcccggccccgccctcaggtcgcccagaccactacgcgcagcgcaaccgaaccggaggctgacgcatagatgctgcgattggctgggaaggccaaggtaggcaggactttcccgctccgtcccgcctcctttggggtgactccaccaatggaaagtttcactctaactgcaaaaaaagcaggcctaggctcggcgttgagtggctacagtggcagtcactctgaatgcttttgtgcctactctaacaagactggttgaggcggcggacctctgctgaccttacccgggaaaccacttagaggctggatccggggcgaggggaattgggtccttcgttggcccagggagggactcttcggttcaagtaggctccgagtgtggcgccccaggggactgcgtttcggacacacggcgaatattcttctttggcagttaatcacatataccgacccctatgaaactttaaagacacttgtggaggcctgttaggtttgctggcactttcccgccagatccctctgcttccctt

SEQ ID NO: 40794 - DNA, 977 bp, Artificial sequence
  DNA replication origin
gtggggagcgcctctgccccgccgccccgtctgggatgtgaggagcgcctctgcccggccgccaccccgtctgggaggtgaggagcatctctgcccggccgccccgtctgagaagtgaggagaccctctgcctggcaaccgccccgtctgtgaagtgaggagctcctccgccaggcagccgccccatatgagaagtgaggagcccctccgcccggcagccaccccgtctgggaagtgaggagcgtctccgcccggcagccaccccgtccgggagggaggtgggggggtcagccccccggccaggccagccgccccgtccgggagggaggtgggggggtcagccccccgccaggccagccgccccgtccgggagggaggttggggggtcagccccccgcccggccagccgccccatccgggaggtgaggggcgcctctgcccggccgcccctactgggaagtaaggagcccctctgcccggccaccaccccgtctgggaggtgtgcccaacagctcattgagaacgggccaggatgacaatggcggctttgtggaatagaaaggggggaaaggtggggaaaagattgagaaatcggatggttgccgtgtctgtgtagaaagaagtagacacgggagacttttcattttgttctgtactaagaaaaattcttctgccttgggatcctgttgatctgtgaccttacccccaaccctgtgctctctgaaacatgtgctatgtccactcagggttaaatggattaagggcggtgcaagatgtgctttgttaaacagatgcttgaaggcagcatgctcattaagagtcatcaccactccctaatctcaagtacccagggacacaaacgctgcggaagtccgcagggtcctctgcctaggaaaaccagagacctttgttcacttgtttatctgctgaccttccctccactattgtcctatgaccctgccaaagccccctctgtg

SEQ ID NO: 40795 - DNA, 1092 bp, Artificial sequence
  DNA replication origin
tcccagacggggtggtggccgggcagaggggctccttacttcccagtaggggcggccgggcagaggcgcccctcacctcccggatggggcggctggccgggcggggggctgaccccccaacctccctcccggacggggcggctggcctggcggggggctgacccccccacctccctcccggacggggcggctggcctggccggggggctgacccccccacctccctcccggacggggtggctgccgggcggagacgctcctcacttcccagacggggtggctgccgggcggaggggctcctcacttctcatatggggcggctgcctggcggaggagctcctcacttcacagacggggcggttgccaggcagagggtctcctcacttctcagacggggcggccgggcagagatgctcctcacctcccagacggggtggcggccgggcagaggcgctcctcacatcccagacggggcggcggggcagaggcgctccccacatcccagacgatgggcggccgggcagagacgctcctcacttcctagatgtgatggcggccgggaagaggcgctcctcacttcccagatgggatggcggctgggcagagacgctcctcactttccagactgggcagccaggcagaggggctcctcacatcccagacgatgggcggccaggcagagacgctcctcacttcccagacggggtggcggccgggcagaggctgcaatctcggcactttgggaggccaaggcaggcggctgggaggtggaggttgtagcgagccgagatcacgccactgcactccagcctgggcaccattgagcactgagtgaacgagactccgtctgcaatcccggcacctcgggaggccgaggctggcggatcactcgcggttaggagctggagaccggcccggccaacacagcgaaaccccgtctccaccaaaaaaatacgaaaacccgtcaggcgtggtggcgcgcgcctgcaattgcaggcactcggcaggctgaggcaggagaatcaggcagggaggttgcagtgagccgagatggcagcagtatagtccagctttggctcggcatgagaggga

SEQ ID NO: 40796 - DNA, 916 bp, Artificial sequence
  DNA replication origin
ccctggcatccccagccgctctcccccttccatgggaaaagaggagggaggagaggaaagccgtattaataaaagaataggatactgcactaaccccacagcatgtgcggctcagaatagcaatgcgccttctcaaggcaaacaaaactccccaggtgttaatgcaaattcactccagttaagatgaaagagggttgtttccccctttgctggttaatatgaaggacttaatagattcagcctcaggaactcaggaactcgggctgggtgcggaaggctggcgagtgaggagggggaaggatgaaggcgtgggcaaagaagggaggtcccatgggtttcggggcagagcaactgtcacagcaggcccggccgacgctgcggctcctgccacccccctctgccacccgggctgacaggcgctgggcctggttgctcaagaggaaaacccagagtggccatgccaatccccgccctggcgcctgctgcctttcacttgagctcgggggctggcagcatggtggcccctcccgaatttgtgccagaggatagtgggtccaagagaaaggagggatgtggtgggagctctaacacaggccccaggctggggtccctgcagggcacctggttccactccggctcccggccatggctgtagccatagccactcctgcggtatcctgggccagtcactcccattttggctccttggaaggtgaagctggcttgacatggccttggaggacctcgggggaccagtctgtggagttggaacctaagggggcctcgagttctgctggtccaaacctgaccttctatagccaaggcatggaagcccagagagtggaagggacttactcaaggccacacagcaacaggcggagagctgcaggggatcagagcccacagccagctggcc

SEQ ID NO: 40797 - DNA, 933 bp, Artificial sequence
  DNA replication origin
tgatctcattcaaccccacagcgaccctgtggtggattctgaatgcactccgttgttcaggaggggaatgtgaggctgagaggccaagttcttaactctgagcagcactggggggcccggacacccccatccccagttcacccacggtcctcatgggaccccttctctgccccagctccccacccccatctgccctgcacctttctccccttcgccatctcatgggatggtcaggaggtgggggttgaggggagggtggtggggtggtcaggaggtggtgggggaggggaggggagggtggcggggtggtcaggaggtggtgggggaggggaggggagggtggcggggtggtcaggaggtggggggaggggaggggagggtggcggggtggtcaggaggtgggaggggaggggaggggggcgaggtggttaggaggtgggaggggaggggaggggagggtggcggggtggtcaggagttcgggggtgaggggtcctggggaggcattcactcttcatgttccctcccctgccttaaacttctctctttctagaaccttgatcttgatctccaggtctgaggcctgaaaaccaaggtttgcccaacccacccccatcctagactcagcatttcccaggcactctcgagcatcctaaattgcatccatgtgctccagcctggacaggaccgaaggtggctaataccagtcctgtcaccggagggtcagaagcagcacgcttggggcagacacacagcagccaccaagtcaggctcccctgtaacgctgggggagagacctcacggggcccctgagcccagtggaggtcatccttgagtatccacagctcttggccccctggtgtccccctccccataccttccctgccctgaggagctcctgagggtggggtgtttccctgagccctgccttgca

SEQ ID NO: 40798 - DNA, 897 bp, Artificial sequence
  DNA replication origin
gttgcagtgagccgagatcatgccactgcaatccagcctgggcaacagagaaagactccacctaaaaaaataaaaaaaaatacccacctggacagcaagcccaggagcttccccttcacagggcgagtaccaacacgctctgcagcggcctcccagggagtcactgggagctgggtttcctgccagcctctcagcaggctctagcccactctcccttggcccaggggttctgatttagaactgacaggcctgggctggcacagcctggacacttagtaaacgtggaacgactgagctgctgctgcggctcgctctctcaatcaatactcgaagctataattattattaattcctattccttgggggggatgttcatgctaataggaaactcccaagagtttcagggaggtgatgcccggcacctttcctacattatgtcacttcatcctcaccgctgcctgggatgtggcactgccaccttaacaggcagggaaactgaggctatggccggttaagggacctgactgtagttccatggtgaggagatggtggatgcagaagccccagtctgcctggctcttggtgctgggttcttacttcctcaagtctctgctccatcaaaaacactggggaagctcaaggcattcagctctagcggtggaaggtcagaagatgggacaggtgggcaaggagagctttggagtggggtgggagcttttctggggcctctctcacctccaggcccaggtcccagtgggcaaccagctagcccggagaggtctggggagacagacagacagctggtgtccttcctggctcctccgcaggttatagatgtttctaggagctccctccagagcagggcccaggaagtgctgggcccaggctgacccaacc

SEQ ID NO: 40799 - DNA, 1494 bp, Artificial sequence
  DNA replication origin
ggccggtggcggccccgggggcggctggagcgggcggggcgcgcggctgcggagggcggcggcggcagcggcgaggctggggacgcccctccgggggcctagcgcccccgcgccccgggccgccgggccatgccgcccgctccctcgtcgggctcccagccggggccccgcaggggcagcgggggcggcgccgctctggcctttccgagagctccggctgcctcgcgcggtgcccgccgcgcccgctcctcggtgccccgcgcgctccgcgctgctcgccgcccgctagtccgctcgccggcgcggccgctaccggcccggcgctcaggctgtagccgcctctccgctcgctcgctcgctcgttctgtgccgcgctggctgcgctccccgcctcccccgccagccgcccgcccgccccctccgcgctccccacccccagcccgccccttcccgccgccggcccctgagcggccgccccaaacctgcccggggctccttctccccttcggccccgattcccctttcccactagggctcccctctgttcactggctctcctcaccctaagtctgcagccaccaggaccagggagggggtgggttgcgggggtcctccttcctgccccttggctcaccttcccccatccacgcaccaggagcggagagcccggaactaagaactgtagacccagagaggtgagactggccccaagcacctgggtcctcaagaagagtcaccgtttccgtgccaggaggatccaaggtggggaaactgaggctgagagagaaggacgttgaccaaggtcacagggcaggagcagcaggtaagagctgggtacacgtctggggtaggcttcctgccctgcctgtgactgacaccctgccgctgaccttgctccccacaatggggccccagtcccggacccttcccaagcccctacctttcagcttgcagaagaggagccaaagtgtctcatggcccccagggcagttcgggacagagacatggcccggtgcctgtggggtctggtgtgagggcctgccagttcacatggctgcagctcagacctaatgtatgtgcagggcttccccaggccccagggcacgtcggcaccccagagctggggtgggggcaggtgtttgagggagcagcctgcgtgtgcatatgtctgctatccatgagggtgtgtatgtgccactgggcacgtgcgcaggtgtctgtgactccatatgcagatggacaaatgtcgggagtgtgtggccacctgtgtgtgccaaggttgtacgctggcaggtcgggggaggtgtgcaggccctggggctgggagtggtgtgggcatatggtgcacagatgtgcatgggagggggtgaccttctggcctggctgtggccccatctctgggtgcttccctgaatccccctactgggaccacctccctgccccctttggcccaatcagctaaaggtcccagcaggaacgctgattgcacagccc

SEQ ID NO: 40800 - DNA, 1600 bp, Artificial sequence
  DNA replication origin
ggcagagggcctgggtctcgcccagaccgccctggggcaggagcactcatgaggccctgcagaggcggagagggcagagggggatccgtgccaggaatggccagccctggcattcaaggactgctgaaagggacctggggccgccagagggcttttagggcacctgcagccaagaagggggctggtcatggaaaacttcttgccttcatctgtagctgcccactgggccagagatgagctgggaccacccaggcatctgtctactccatgaccccacctgcccatcccagggagggccctgcccttcagatgccccctgagtcagggcccctcagctccccagggcccaggagaaggggacaggagagaagcggggagggcacttgttgtggctggtgactaacgcagctgggctcctgccagcacgccatgtcgttggttggggagcctgcggccttgcccctgcactgcccaccctgcggcccctcgcccctgcagccagcctctcagcctctccccttcctcagggagtgcactccaggactggggatcaggagaggagggacccagaaagggctggagttggggtggtggggtcctggtgggggtgctgggagcaaggggagggagtgaagcggaagctgcctggggtctgggagacatggtgactcctgcttggatggtcaggaggaggggatggatgagggcctctggagggaaaaatctgcaggaggtttgaggtggcccagggccggaggggacaaaggtggggaggagaaggcctatgctccatctcctgacctttcgccccccaccatcgtacccctcctttccccgggctctggaggaggctctggccctgggttttaggggtgaatggtgaggtcatgtcggggggccccaatcatccatctgtcctgtccgcatcagaccccagaccctgtctccacagctctccccgcttctgagggtttgcaggggcagttggtgaggagcctggtggctcatgcctatggtgcagtgagcgaggcagaggctgccttctctctctggatcttcccccgacccattctgactcctctaagatctgccctcaccctgggcctgggttgagggaggacctccctccatggcttcccctgggctcccaccatcctccctgactgtgctggtcttggctgcaccctcccaggccctaatgagcctccagatctcagagacccctggatccaaggtaccccgagaggcccatcctctgggtgagctcagccccttgcaacagcagacatgcagatcccaggaggccgtgacccccatcagcccagatcccccactccactccatatgggggctccaggaggtctggggggaggggaaacctcagcacctcccccagcccagcagggaaggagctgggcgggccccaggggtctcactgctcctcaggacacactgtcccggacccctgcccctgccctctgctctgacctcgcccagccagcggcctgccatccccctgcgagtctgagaggcagggggaacggggtgggggcgggtttgggtcctggcctctctgcctttcccttccaggcttggctat

SEQ ID NO: 40801 - DNA, 1154 bp, Artificial sequence
  DNA replication origin
accaacgacatggcgtgctggcaggagcccagctgcgttagtcaccagccacaacaagtgccctccccgcttctctcctgtccccttctcctgggccctggggagctgaggggccctgactcagggggcatctgaagggcagggccctccctgggatgggcaggtggggtcatggagtagacagatgcctgggtggtcccagctcatctctggcccagtgggcagctacagatgaaggcaagaagttttccatgaccagcccccttcttggctgcaggtgccctaaaagccctctggcggccccaggtccctttcagcagtccttgaatgccagggctggccattcctggcacggatccccctctgccctctccgcctctgcagggcctcatgagtgctcctgccccagggcggtctgggcgagacccaggccctctgccgggaggacgccattcgcggaggagccacatgtgccaggaagagggagctgggcagcccgggatggaatgctgcagacagtacgtgcctgccgcagaaatccagggggcggtcagtctgagcggaaaggaggaccaggcagggaggtgggaagcacagagttaagatgagggcttcccagccaggcggcgctgggtttgagtctctgcaccttcagctcatggagtgaccttgggcaatcgctcacctctctgagccttggtttccccacctataaaaggggggctggtgatggaggatgcagtgaaagtacctacctagcacagggggctcagggacccagatgcaacatgaggggaggccctgcgggggtaagaggctggagcgtgcagggcccaggcccgtgagggtgtgcaggaggctgagccagaagggcaggctggcagggagagctgggtggaaaaggccttgaaggtctggaaaaggtctctggggacctgtggccctggggaggcatggagggcagttggcagggtaggaatgtggctgcacagagctggcctgaggcccacccaggccctgtgagggacaggcacggactctcttagatcccctctgtgtgcccaccatggctgggacatacaccttttccaacatacacacacagcagagtcctccaggaacactgaggctggtcccagcaccatcagctgact

SEQ ID NO: 40802 - DNA, 1681 bp, Artificial sequence
  DNA replication origin
tccagctaggaactgagacccttagtccaacaaccattaaggaactgaatttagccactagacatgggaagcagatcctttttgagttgagcctttaaatgagactccagccctggccgatatcttgattgcagtcttgtgggtgaccctgatgcagaggagccagctatgccatcctcagattcctggcccacagaaaatgtgagataataaatatgtttgttggccaggtgtggtggctcacgcctgtaaccccagcactttggaaggctgaggcaggcggatcacgacgtcaagagatcgagaccatcctggccaacatggtgaaactccgtctctactaaaaatacaaaaattagctgggcctggtggctcatgcctgtagtcctgcctacttgggaggctgaggcaggagaatcgcttgaacccactgtaacctccgggaggcagaggttacagtgagccaagatcacaccactgcactccagcctggtgacagagtgagactctgtctcaaaataaataaataaataaatgtgtttgttataagtggcaagcagtgtgttgttataagtttgtggtaatatgttatgcagcaatacaaaactaatataatatccagcccctctcatctcatttctggtttacagcccatctctcctatttccttagcaccctgcattcatcacactgactcattgctattggttttcttgcacttcctatcctgtaagccccttgaagacaggcactgaactaagcattccttgtagccctagtgcagatagcaggggttggcaggagtgtcctgggaaatatttcacaatcccagggtggggttgtgttctccattcgggggcttctataacaccccaataatgatggtggttggttttgaattcttactgtgtaccaggcactgagatgaagccaggaatgtgtgttcttaacaagttttctgtgatgattctgatccatagtcaggcttaggaaccactaaacctacattacctgagacattctgtagaaaaaattgcatccttctcttaggatagctatacttgtaacttccttaaacaaaacagaacaaaactgtattgcatacatacagaaaaatgcacaaatcttaagcgtacaatttgatgaattttccaaagtgaacacatctacatggctaccaccgagatgaagacagggggtgaccccagcctcacttgtggcccctcccagcccacagccccagaggaaaccaccaattttaacaccatcactactcatgagttctgtctgttctagaatttcccgtaaatgaaatcgcagtctgtacttgtacatctgcttaacattatgttcgtgcttttgacttgttaaaatttctcttctggattaaatatgtaaaacggtgactaaggaggtcgggcagaaggtggaagcctgggattccgagacgtcctctcaggtgccatacttggatttcccgagaggtgtaatcacacagcccgccctcagctgacctattctctgcttaagcaggaagggagataggaggggaagggggcgtggctacagacgccgagtgtggggcggagtcttaagaagagaggcgcaacccgggtccggcttcccggcggtagtttgctcggctctgggggcggggccaggccgagacttcctgtctgct

SEQ ID NO: 40803 - DNA, 696 bp, Artificial sequence
  DNA replication origin
catctgagaagtgaggagcccctccgcccggctgccatcccgtctgggaagtgaggagcgtctccgcccggcagccaccccatccggaagggaggtgggggtcagcccccgccaggccagccgccccgtccgggagggaggtggggggtcagcccccgacccggccagccaccccttccgggaggtgaggggcgcctctgcccggccgcccctactgggaagtgaggagcccctctgcccggccagccaccccgtccgggagggaggtgggggagtcagccccccgcccggccagccgccccgtccgggagggaggtggggaagtcagccccccgcccggccagccgccccgtccgggagggaggtgggggagtcagccccccgcccggccagccgccctgtccgggagatgaggggcgcctctgcccggccgcccctactgggaagtgaggagcccctctgcccggccaccaccccgtctgggaggtgtacccaacagctcattgagaacgggccatgatgacaatggcggttttgtggaatagaaaggggggaaaggtggggaaaagattgagaaatcggatggttgccgtgtctgtgtagaaagaagtagacatgggagacttttcattttgttctgtactaagaaaaattcttctgccttggggaaaaaaaataaaaataaaaataaaaata

SEQ ID NO: 40804 - DNA, 1168 bp, Artificial sequence
  DNA replication origin
tcctcacttcccagtaggggcggccgggcagaggcgcccctcatctcccggacagggcggctggccgggcggggggctgactcccccacctccctcccggacggggcggctggccgggcggggggctgacttccccacctccctcccggacggggcggctggccgggcggggggctgactcccccacctccctcccggacggggtggctggccgggcagaggggctcctcacttcccagtaggggcggccgggcagaggcgcccctcacctcccggaaggggtggctggccgggtcgggggctgaccccccacctccctcccggacggggcggctggcctggcgggggctgacccccacctcccttccggatggggtggctgccgggcggagacgctcctcacttcccagacgggatggcagccgggcggaggggctcctcacttctcagatggggcggttgccaggcggagggtctcctcacttctcagacggggcggccgggcagagacgctcctcacctcccagacggggcggtggggcagaggcgctccccacatctcagacgatgggcggccgggcagagacgctcctcacttcctagatgggatggtggccgggaagaggcgctcctcacttcctaggtgggatggcggccgggcagagacgctcctcactttccagactgggcagccaggcagaggggctcctcacatcccagacgatgggcggccaggcagagacgctcctcacttcccagacggggtagcggccgggcagaggctgcaatctcggcactttggggagccaaggcaggcggctgggaggtggaggttgtagccaagatcacgccactgcactccagcctgggcaccattgagcactgagtgaacgagactccgtctgcaatcccggcacctcgggaggccgaggctggcggatcactcgcggttaggagctggagaccagcccggccaacacagcgaaaccccctctccaccaaaaaaatacgaaaacccgtcaggcgtggcggcgcgcgcctgcaattgcaggcactcggcaggctgaggcaggagaatcaggcagggaggttgcagtgagccgagatggcagcagcacagtccagcttcggctcggcatgagagggagaccgtggaaagagagggaga

SEQ ID NO: 40805 - DNA, 1217 bp, Artificial sequence
  DNA replication origin
gctgcccagcgccggccctggcagggagcctggtggggtggcggagggggagactgtgccgtggagggcctcgccatgtcctgctgcccggtaagaaccccatccccgtcctccgtctcctcggcgggtgaggaagagctggaggaggggccggcctcggccccggccctggccaggcggctgtcaccctctgaggaggcagcgccctgggagggctggggactgcgtgcggggcccggggaggggcgtccccggcggctgtcgccgccagggggaggcgctgggtgtgggagtgggaatgggagctcggcggccgagctcggcccggaccctagatgcgggggaggcggggtcccgggctcgggctgccttcccagacctggcggggatgggcccgtgcggctctgggtgtgggacgtaccctcggagcgcccggagttattcccacgaactcccgggaggtgggtgtgcgcccttcgccccctgccgggtctgtggcggtccatcgttgccggatactggaggtcaggggccatgggagccccggggcgaacggtgcgggcctgggccttgtggaaaggaggagtgaccgcccgatcgtgcagcagggcatccccctgacctggtagtacttaggtgggtaggatgattgggggcggttggcgtaactgagggaaccctggtcagactgctccgcaaatgattacagtgttatttctccggtagtaattttgcttgatgtatggcatttccggacccataagatgatactgtaggttgtattttggactggaaaacttatgtcaaaattatggggtagattttttggccacattaatagactcccctggaatttgataatctcacttgtgagttttggacatggactgctattacatattgatgttcaaatgtcctttccagacccaggcctaaattcttactgttgtagtatcttgattctgacatctatttttccacaacccaaacaaacaaaacaaaacaaaacaaaaccccaaaaccatatacttttctagttaaggttcaactttctcatatgtgaatggtaatgccataagaggcctgggttgaattacaggagattattattatttttttcaatgtgaaatgtttgtgatttgtccatggagaggtggtggggaccttcccctttcagattcagggctgttcagtaggacaggagacattgatggcat

SEQ ID NO: 40806 - DNA, 1009 bp, Artificial sequence
  DNA replication origin
tgtctacttctttctacacagacacagcaacaatctgatttctctatcttttccccacatttcccccttttctattccacaaaaccgccatcatcatcatggcccgttctcaatgagctgttgggtacacctcccagagggggtggcggccaggcagaggggctcctcacttcccagaaggggcggccgggcagaggcgccccccacctccctcccggacagggcggctggccgggcgggggctgcctcccacctccctcccggacggggcggctgccgggcggagacgctcctcacttcccagatggggtggctgccgggcggaggggctcctcacttctcagatggggcagctgccgggaggaggggctcctcacttctcagatggggcggccgggtagagacgctcctcacctcccagacggggtcgcagccaggcagaggcgctcctcacatcccagacggggcggccgggcagagacgctcctcacttcctagacaggatggcggctgggaagaggcgctcctcacttcccagactgggcagccgggcagaggagctcctcacatcccagacgatgggtggccaggcagagacgctcctcacttcccagacggggtggcggccgggcagaggctgcaatcttggcactttaggaggccaaggcaggcggctgggaggtggaggttgtagctagctgagatcacgccactgcactccagcctgggcaacattgagcactgagtgaacgagactctgtctgcaatcctggcacctcgggaggccgaggctggcagatcactcgcggttaggagctggagaccagcccggccaacacagcgaaaccccgtctccaccaaaaaaatacgaaaaccagtcaggcgtggcggcacgtgcctgcaatagcaggcactgggcaggctgaggcgggagaatcaggcagggagattgcagtgagccgaggtggcagcagtacagtccagcttcggcttggcatcagagggagag

SEQ ID NO: 40807 - DNA, 838 bp, Artificial sequence
  DNA replication origin
gtctgggatgtgaggagctcctctgcccggctgcccagtctgggaagtgaggagcgcctcttcccagccgccatcctgtctaggaagtgaggagcgtctctgcccggccgccccgtctgggatgtgaggagcgcctctgcctggctgcgaccccgtctgggaggtgaggagcgtctctacccggccgccccatctgagaagtgaggagcccctcctcccggcagctgccccatctgagaagtgaggagcccctccgcccggcagccaccccatctgggaagtgaggagcgtctccgcccggcagccgccccgtccgggagggaggtgggaggcagcccccgcccggccagccgccctgtccgggagggaggtggggggcgcctctgcccggccgccccttctgggaagtgaggagcccctctgcctggccgccaccccctctgggaggtgtacccaacagctcattgagaacgggccatgatgatgatggcggttttgtggaatagaaaagggggaaatgtggggaaaagatagagaaatcagattgttgctgtgtctgtgtagaaagaagtagacataggagactccattttgttctgtactaagaaagattcttctgccttgggatgctggtgatctatgaccttgcccccaaccctgtgctctctgaaacatgctgtgtccactcagggttaaatggattaagggtggtgcaagatgtgctttgttaaacagatgcttgaaggcagcatgctccttaagagtcatcaccactccctaatctcaagtacccagggacacaaacactgaggaaggctgcagggtcctctgcctagga

SEQ ID NO: 40808 - DNA, 1729 bp, Artificial sequence
  DNA replication origin
tcctggaatctgccttttccatgtttcttccttcccccactcagctctgtttccacccagcaggtgcttggggtcaaatcctgaagaccccttggagggaaccaagtggtggccccagagctgccagcaggggaggtggtttggagaaaggacttggggtgcatgaatcctgccacgtgggtggctgacttccttgcgtcaggctggtctggtggagacaatgacctcacctgcttggaagagcccttggcggctgcttggatctggggtcggggaggggtcccgagggccagacagagaggagcttgggggctgagtacacctccccccggcctggctgcagcccagcgtggctgcctgtggtctggcccgggagcgagggacagacctcccccatggctggcacccgctcagcggcctcttcccaaccacggtggggaaagggaaaggggctgacgtggggctgacctcacgcccggctccccctcctccagtgcctccctcgggggttccctgctgctgggaagctggacctcctgtgggaggagtgggggaggggaggcaagcagagaatgcgggaggctgaactgagtggggggctctggaggctggggttggggagacagaaagaccccccacacatttctgtactttctctgcagcctccaagagatctggggttccccttactccatgtggaagggcttatgagagttttagaggtgatcaagaatggacagccctatgggcagcataggaggaggcagactgggcactgacattcagctgctgcccggcctgcttacccagcctcgcgggcatcttcacatctgcttcttacaatggctatcatgggacagatgaggaaactgaggcacagagaatttcagaaacttgcctaagctcccacagctggaaaaaataaagccaggattcaaatccaagcatgtcagagccctggccctgtgctgggtactgcacaccagctctcatctgatgaaatgaacaatgtcctgagaatcgcagtgaaacgcagattccaaaccagcagtctgaagtggggccaagattccgtattttggccaggcatggtggctcgcgcctcttatcccagcactttgggatgtcatggtgggaaaatcatttgaagccaggagtttgagagcagcctgggcaacatagtgagaccctgtctctacaaaaataagttagccaggctcagtggtgtgcacctatagtcctaggtacttggaaggctgagatgggaagatcacctgagctcaggagttcaaggctgcagtgagctataattgtgtcactgaactctagcctggatgacagagcgagacccagtctctaaaataaaaaagaacaaaaaatgttctgcatctctaagctcccagaggtgtagacacaactggcctgtgctccattcattttacctagtgtagcctggcacgggcatttaataaatggaaactgttattgctatttcctacataaagtatatatcatgtgttctgtgcatagtaggggccaataaacagtaggtccttgtgaaacatgatcctataaagagagtctggtgaattctagagcccagtagaaacctacgattagccgggtaaagtggctcacgcctgtaatcccagcactttgggaggccagtgtccagcagatcacttgaggtcaggagtttgagaccagcctagccaacatggcaaaaccc

SEQ ID NO: 40809 - DNA, 925 bp, Artificial sequence
  DNA replication origin
tcgccgtgttggcccaggccttctagcaggaggtcttgaagtgtgctgtgaaccgagggatctcaggagttgggtccagatgtgggggcctgtccaagggtggctggggcccagggcatcgctaaacccaaatgggggctgctggcagaccccgagggtgcctggccagtccactccactctgggctgggctgtgatgaagctgagcagagtggaaacttccatagggagggagctagaagaaggtgccccttcctctgggagattgtggactggggagcgtgggctggacttctgcctctacttgtccctttggccccttgctcactttgtgcagtgaacaaactacacaagtcatctacaagagccctgaccacagggtgagacagcagggcccaggggagtggaccagcccccagcaaattatcaccatctgtgcctttgctgccccttaggttgggacttaggtgggccagaggggctaggatcccaaaggactccttgtcccctagaagtttgatgagtggaagatagagaggggcctctgggatggaaggctgtcttcttttgaggatgatcagagaacttgggcataggaacaatctggcagaagtttccagaaggaggtcacttggcattcaggctcttggggaggcagagaagccaccttcaggcctgggaaggaagacactgggaggaggagaggcctggaaagctttggtaggttcttcgttctcttccccgtgatcttccctgcagcctgggatggccagggtctgatggctggacctgcagcaggggtttgtggaggtgggtagggcaggggcaggttgctaagtcaggtgcagaggttctgagggacccaggctcttcctctgggtaaaggtctgtaagaaggggctggggtagctcagagtagcagctca

SEQ ID NO: 40810 - DNA, 979 bp, Artificial sequence
  DNA replication origin
cccgcccacccgactgcctatgaccttttgccttttctctctcctggtgcaccatttcctctccctccctgagccggtgtgtgtgtgttaggagggaggggaacccctgggacaagggacagcggatgagtcgggagaaggcatggagtcaggggctgtccggagctgggggaacagagagttttgaatgatgatttggggatggagagtggggacagccaggcagaaatggggtgagcttgagtgagataggggacactagggaaggaagagatagaggatgatgggggcgggggcagaattgggggcaattggcccagggagccagaatcaagtggcaggtttgggagggagatgagggtcaaccgaggactcctccccactcccccatgccccgtggcccccatgggtgcctggcttcggagatttgggctgcaatgggccagtgagtgggaagcgctgctgaggaacctgggccaccacgggaggtgggaagagaggggtctcctttctcctggtgcctgctgggcctggggcctggtgccttccagccagagggccagggggccttaggacctttgccttcctgagggaaagggtgggatggctgggagtctctcctggaccctgcaccctttgggtggaaatggcttgtgtcttgccctcatctttacgtcatcccagaagagagcagggagaactaaggtagagaaagggagacagagaaacacacgcagtgacagagtgaagactaggccccaggaagacagctgcaggtggtgagggggaaccaggagtcctctcccatgcggccattgttggacccccatccggtgtgccatgaccccaggccaccctttcctgcctttctactcatggcttcttcctgactgtccccaggagttgtgcccctgctgttggttctgcactggaaacatggggcggggagccccctccccatcacccctgtcaacgccac

SEQ ID NO: 40811 - DNA, 1062 bp, Artificial sequence
  DNA replication origin
cgcgggcacatggtcccaagcaccgcacgccccgcggcaggttggcggcgagggagggggcgccgagccttcctcctcctcctcttcttccccctctccttctcctcctcctcctcctcgctccggacactcgctggctgctcttccctctgcgctttctcccagattcactctccctctctctttttcttttctttctttctttccgctttctcctttccaaccgcggtcccgggctgctcccagggaggggcgcgggcggcgagcagcttgcaaactccggcctgggacgggagcaggtgccgcctccatctgctggtgtctggaagcgtgtggtctgcgctaggtgagatataggggtgtggcccccctcccgcagccaccccggggcctcagcactgccttgggatgctgggacgaacaggggacccaggagaagtgaacttgaggaggcccctgtccccgctgttccagcatgggggatccgggggaggtctccagcctcactcgcccgctgaccccggcccccaccatcttcaggtgcccttctgcagagccctggaaaagcgtctaagggggcctggggggagtcgggagaacaggcccccctgggggaggggcaaaccaggacatgtcgggacagctcccagctctcctgtcacctttcactttccttcctccccgcccacccgactgcctatgaccttttgccttttctctctcctggtgcaccatttcctctccctccctgagccggtgtgtgtgtgttaggagggaggggaacccctgggacaagggacagcggatgagtcgggagaaggcatggagtcaggggctgtccggagctgggggaacagagagttttgaatgatgatttggggatggagagtggggacagccaggcagaaatggggtgagcttgagtgagataggggacactagggaaggaagagatagaggatgatgggggcgggggcagaattgggggcaattggcccagggagccagaatcaagtggcaggtttgggagggagatgagggtcaaccgaggactcctcccca

SEQ ID NO: 40812 - DNA, 2362 bp, Artificial sequence
  DNA replication origin
tcaatgtcagggggtcccatgtggccgggactgtcccgctcaccctgagaccggtcaaatccccagcaggccccatctgcaggagcaggacaggctgtggatgaagtcacagctggaaggggccaagccggggctgccactccagggtggggcctggggtcgtgaccctgggagccggcagccaagaagggagggtgccttccatgagggagccggccgggggcggggaacacacacacacagcatagagagggagggaagaaaacaaactcccagagaccaaagtgggcctggagcgtagcctgggcggctgattcctgggggccgcagccacgttgcaggcggcacacggacttgcggctccgagaccctgcccagccttccctccagaggcccagagcaggtggtgcctggacatggacaggagggggaggctgggcctggggcgccgaggggcccagagcacttggggagcacaaaccaagtcaggtaccgtgagaggaggggaaactgaggcactggaggggccagtcagggctggggttaaggggccttagtgtcagtgtcttctagaccctgtcctcacttcctgtttcctgtggggtggggctgagattaaacagcgattgggggtggattatagggctgatgtggggtctggcttgccagaaggcatgcaagggcctgggggtccgcttggaaggatgcaggggagactgggcagaatggtagatgtaggggcagctgcagaactcttgagcctaatgagagactcaggccgggcgacgggggtttgatgggtggaggccacagtgagcccctggtcacatggatttggggtccatgtcaggagagccaggctgagtcaggtggcaggggtctgggtgatgtgggatgggactggggactggtccagagctcacgtgctctgagtggtcaggtccttgtgcaggagatgctgggggaggtgtaagaagaagggttgagctggggtgtcctgggatgtggggttacctgagccaggccagggcaggtgagtctcctagtagtgtacgctgaccccagagcaagtgtataggagcagtaagtgccaagtggggccctccatggtccctcaaagaagagacaaggtgtggggtgagaggcaggaaggaggaaggagagccagttcgggaagtgccagctgggatgggcagttttatcacctcacatccgaggccctgctgggagagaatggggggcaagagcgtagataaagcagggtgtgtgtgtggtggggaacggcagcaggcaccagggctcgtcctggcacgatgaaggaggaacccgtggctgggcaggtctgggatgtggcaagaggcaggaactgggggcatggaggatgggcgagggggcggtgggggcccgggcgaggctgcaagagctccctggccttggaaaaccaactcacacaccttgatctcaggtcagggtcaggcggaagggctgggaaggggccacaggggactaaatcatctcctggtactgggggtcccctggcagctttagggacggcatggccccagacgcgtggccatgctgtctggccggcattcccgcatctcatagggtgtatttattttcacttttctgttgcatttcttggaggtgtccctgtgctcattttgcccggctccccactgctcctttctgcccttcctcattcacaaatcgcctggcctcagaagacgccagaacatgtgacactgccttagagcctctagaagcactttttggggacctccatcattctctgaggctgggctcaaaggggcttccaaggcaggtctggaagggaccagccacttctcagtttccccaaccatcaatcagcacccggaggaggaaactggggtacgatttcgccaagcctctctcagtcctgcttcagaatggaaatgctggaccgccttcccagaagcaccttcccagagtgtcccgacagaactgagtcagtcacccctacccccatgtcttcctagccccttccccagcctcacaggtacagtggtcagcagggcgagtgcactggtggtgtctggaggcctgaccctctggggccctgggcaacgtgttcccctcggagccccttggggcccagtggcaatgtgcagattggaggaggctacctctggggtggcttccagcgcccatgttcagttccactttatgaccgtctaaagtccacgccggccccggcccctcctcctggagcctccttctcagccaagccctagccctcctcctcccactgcccccctaaagccccccaaccagggggcacaggggccagtctccatctgctagtccagactcgctacct

SEQ ID NO: 40813 - DNA, 1414 bp, Artificial sequence
  DNA replication origin
ccgtcaaggagccggacgccgcgcctggctgggcgggtcagcctcgcagcgggcggcgtggacgcggcagcgcagcggctcctttaaggctcgggcaccacccccgccgccccgcctcccgtgcggcctgggtctagttggcggcggggtcgggtccgcgcgagccgcgatggagctgcacatcctagaacaccgggtgcgggtgctgagcgtcgcccgtcccggtctctggctctacacccacccgctcatcaagctgctcttcctgccccgccgcagccggtgcgcgcccgggttcgggagcgcagataggggctgggggctctgctctcgctccgggccagggtcggaggattaggatcgccgtaaggcaggcaggcaggcgggcgggagcgggtggggaggactctccccgtccggccgccatccggcctgggggaccgccgcctatccggccccgtgaggccccctcccaggggcaaagcgcaaacagcctgggatgggcaatgcttaactcagtagtgtcaaatgggggcattcctacctggtcactgcggggagctccttccaggacgcctcccttcatgtcagaggggctggactagggggtccaaggtccgacgcccctggggctgtcgccgcgggtgtgaacctctcctccctccaggagtggaggggtggagggttcctggagaggtcgggaggccggaaagtagcccccaacccccgagatggggctaacatcccattggcctggaaattaaaggccgagagggcaagaaggcgcccggcccagggtcgcgggggtgtctcggggcagatggagagaaatccactcccgacccctagttctccacaccaagctgaagatgctccccacccccaaccaggtgcaagttcttcagcctgacggagacccctgaggattacacgcttatggtggacgaggagggctttaaaggtgggggttggtctggggaacgggagtacgggaggggcttgtcgtgctccccttctgtagggttctcaccagttgctgggatccgtcccaagagcttaagccttaaaagcagatgggtcggggttcgaatcctactccaccactccctggctgtgtgcccttgagcaaatcactttccctctctgagctgttttctcttatgtaaaatgggtatagttatggttctgatacatagggtcccatgaggcctttataaacttaaaaccgctgaggggcactcagcagtcttaggcctgcagaagggcctctgttatgattccagtcaagtgctgctgttagaaatccctgggtattatttcctcctggtcttactctctggtttgggtcacctcctcccctgctggtctggaaactccaggagtctgagggaaggaatgcaggagcaggcagcca

SEQ ID NO: 40814 - DNA, 1999 bp, Artificial sequence
  DNA replication origin
ttcaagtcctggcctggatgctacctcaggctccagtaagtttctgagagctgattctgggttggggtcagggacggggcccggagtggagcaccacgaatgtcctcacaggctcagcccaggccctcagggaggggggcgaattgtggttctttgataaaatgccgccttcgatttactgccaagtgccaggctggactggtcaagtaggctccattagccccatttaacagacgaggaaacaggagctgaatgggaaagcctcagccggatttgcaccaagagcccctcactcagcttcctctcctgaccagggctccaggagacctgactctgcccttgagggcccaggcaggcactgcggtcacaacctgatgactggtgagggcaaggacagggtgtccctgggagaggccccccttctgctgaggaagcagcttttccagtcaaacaatagcgctattcctggcagatgaccaagctgggccaggccaggccatagcgggagggggcaggagagggaggagcagagcctccctgggagctttcagccttcgcctgggcctggaacatcctgtcctggtacagctggggatactgaggcctagggaggtgaagggtttcaagagactatcagggtaggccactccacttcctgcctccttcccctcagccccatggtttcccactctgtctgcacctgccattgatgagatgggctcagcctttgagaagctcctccttcccctagtcctccaggggataggccaggatgtggtggctacatagtgtttcacaggaatgtgtcaagcccgagagtccagggaggaggcttagcttggcttccatctgcctatggtgggggctccagagcaggcagagggcctgcttaggcctgctgggtcccaatcaggcctgaggcctgctttagtctacttggttcaaagcctcacatctgaggcctcagggtgctcaggccaggcaagggtcccctggagcattctcagccctgcatggagccaacatggacatgctgatgcctgcttagccttgggggggtcttagacctgtgaaggcctgataagatctggggtgtctgccagtgccgggggcctccttgaacctgaagcaagtttagatgtgcacaggctagctaagggctgcaggctttggggctcaagtttcaggcttgaggtctgagtactcactgaacctcagctgcaagggcctcccccaccaaagtctgagcactgggcattactggctcaagcacttccgggttttgttggtatcgagggacctcaagccttaggccttggccacctgcagccccctaacccaaagtatgtcgctcaggcagaggtggctaggattctacctctgtgtgcccctggtgaggagccttctattttgaaagttggatgaaaggaacaagtggggctaccaggccaggtttcaatttgtcagccccctcgcaagcggggaagggtaggtatcaatcgcaatcctgtgttggcggccctgccccctgcagccatgagaggcaggagagcgaaaggcgcccgggggacagcgctgcacagcagacctgtgcctctcattgctccggggatttgggggcagcgttctggtcctagccgagctccagtttgtttcgtgtcccttctgtctcaaggacttcaatcatgaaacccacgtgtgtgccagaaggacagaaacgtcccctccgggatgctcccaccggctgcgcagctggctttccgcggaaagggcggagcccagggagggggcgcgtcaggggcggggcctggaggagtcagacggggtggggtctatccccgagccagtactaaaaaaggcggagccgttcggggcggtctcggtgggctggctggaaagcgggatgaggttctggcgttaggaggaggcgtgaccacccaataggcttctcttcccgcggggcgtggccgtcaaggagccggacgccgcgcctggctgg

SEQ ID NO: 40815 - DNA, 1547 bp, Artificial sequence
  DNA replication origin
tccttccaaggtcccataaatgcaactgggaactcctttcctagatctcaagaccacacacctccctgggtcctaatcccaggtgactgctcctcaattcaaaacactccaggtccccactaagttctcacaagtgaatccctggggaactgtgacaaagcatcagtcagggtgagggttcagaatgaggggtgctctctctgagtcctggactaaacctagcctgctgtgagccagtagggagatactggaggagacagatccagtgggtgagagggaactccccttaggggaggggcctggatttctccaaggaagaaggaggcctggtgaataagaggctttagggctggggaaaatcccggaagtgacaggggttcttagacagttaaagcgcttccataagtcatgagagagtctggggtgaccttggacaatctcaattggtcagagaaagggagaaaggatattctctggagtagggtcatggcagggccccaggagctcctactggtgattgggatggaaagcacacatcaggagggagtcttgtcagttctgtgcacaacactggtctcacgtgacaggacagctgggatgggagtggggtatggagtccatctttcctaaggggaccgccagcctgtacacatgatctctgaggcctgggctcgggggattctgtggggcaacatggggcccagcttggaggcaaggtgctgttccactgccccacatttctctgtctgctagctgggtgtctgggtgctctcgggataggacatcggggggtgctaatatgagcagggaccctgctgtctccctgcctgcccccgtcccacgcccaagatctgcccttgggaggaggcgcatacatacacaggacatacacagagcccatctactggctcctgtggctgctggagctgatggtctgtcctagtggtggggctccctgtcgccctgtacgtgctgggaagggggagtacctgcccacctgttgccagtgccagtggaggaagctgtgtatgagcggatagggggcccttctccgacccttccatgaggagaagggactgtctgtcccaggatggagctgaggggagggaggtgaccaatgtctgtccatccagaggtctgtatgcctcgaggaaagggtcagtctgtcctgggaaggggtgggggcggggcagtcagtcctgaagtcggtctgaggtctcctggtgtgggggcagtgaggcggggagacaagggcgtctgtgggtttgtgggagggggaaagatggagaatgagtgtctatggaggggggcgccagccatctgggagcctgtcggggtggcagaaacaatcatccctaaggtcttggcggcaggggtgggtttggggcagtctgtcattctgttccacggctggaaggagggcacagtcggtccttcctgggagcgggtcagtctgtccggagggtggaggtggcgggtggaggtgtgggcccgtccgccccctgggtcggaagtaggactgcgaagggggcgggtctaggaaggca

SEQ ID NO: 40816 - DNA, 1431 bp, Artificial sequence
  DNA replication origin
ggcgctactcacgcgccctcggcgccctgcgagcccacgatgaagccgaacttgtcgatgcggcgctcggcgaagccgttggcctccgagtcagacccgagagagctgagttcgtcggtggttgcggcgtcggggccctgggccaggctctcccgggttcccgacaggctttccccggccgcgggcgcgcgcggcccattctctccgttgctcttcgccatcccagccgcgcccgccgcctgagctccagcggccacctcagccgccctgctgccgccgacgccccgcccacgcgcggcgcctattggccgccgcaaggccggggggcggggctccaggcccaccccggagctctccccccacgcccaatgggcgccgcggaccccgggccccgcccaccctcccccggcgggcgccaacaagcccgaagtgagggggcggggcagccgtcaccgcagccctccccgccctcctccgggctgccaatcacaagaactcacctggacgagctcgggcctttccgggttggctccaagcggggcctgtcacctactgcagagcgcgagccggaggcccagggcttcctccatggattcctcatctgcctcctgagccccgctccctgcgagaccccaaggacgtggtagggattgtttgccccattcatttatgaggaactctgaggaggcccaagtgagttcagggacgcagagcggcttaaaggcccagcctgagccagaagtctggcagtcccattgcactcactgcttctggggctttaaattacctcgtgagacctaattattaataatcaccagcgtttactgagccacgcacgcccgaagctctacctactttctcctgtagtcttttccccagcagttttatggaacataaacataccataaattcacgtttaaagtgtacaatgatttttagcatatttacagagttgtgcagccatcacaacattctaattttagaacattttcatcaccccaaaaagaaactcctaccaattagcagtcactccgcatcctggctcccccagtccctggcaaccactaatctgcttcctgtttctatagatgtcccttttctggatatttcatataaatggaattatacaatatatggccttttatgtctggattctttctcttgaacattttcaagtttcatccacattgtagcatgtatcagtgcttctggattcacatctgccccaggtatgtctgactccacccctccctttcctgggataggcccacaccgccatgaaagacctatactgcccctcctgggagctgggactataccagattttgtttttccattcatcagtgatggtcattcgcgtgtttctagtttttagccattatgaataatgctgctctgaccattcaggtacaagcttttgtgtgggggcct

SEQ ID NO: 40817 - DNA, 885 bp, Artificial sequence
  DNA replication origin
ctcattccacaaagatggtgggaggtactgggttagagtggtgaccacatcagctatggttacctcccaccgatgggagcgcacagacccccaagggcagctgcaagggaacgctgggtagagcgggtgtgaggagggcggggcagcgggaggttaggggggcgcattcacccagccataagaggtcagggagcttctagagcaagatgtggtggaggcagtagccgaggaaagggataaggtggaagagggttcccaagacagggaacagtgtggaaaggcacagacactgagaggaggcaagtggcactgcagggaaggagctcaggcaggggagctgcagggcctggtgtgcaggggagaaccctctgaccgtgggtgggaagtgggtggcaaggagggcatgagacccacccccacccaggagaacgaagcaacaggccttgggggctggctccctcccgtacaggggggtgcgaacattcaggctggatgggtgagtggctgatggcagggcctgagaaagccgaccaggaggaagtgcaggaggatgggggtgggagagtgagcaggtcccaggctgggtgctgggttgctgggtgctgggttggggagtctctgaggctaccagatagaagcttctgtgtatgcaaaacatcaggtttgttgcccagagagccctgggctgggaatggatgtggctctccttggagctggatgggaagacgtgtagggcagagtgagtgatcctgagaagcacacaatggaagagacggagccttcagaagaggaagctggggactgcagggacacagaggccgtcagcatacctcacctgcctgctccctggcgttcctgggggtagatgttcctaagggaggcgtg

SEQ ID NO: 40818 - DNA, 1721 bp, Artificial sequence
  DNA replication origin
agcacctcctctctctgactttccgccttcccgctgcgaccccggttttgcccctctccagctccctcagccgcgggcacctgagctctccgcggccaccagggggcgcccgcggcccagtctgggcgcgagagccgccaagcgcccactccgttcctcctggtgccccgccccgtccggccgcggccccgcccctcccggcgccccgccccgtccggcagcggcctcgctccctccgatcccccccgcgcccgggacccctggccccactgttgggccagctcgccgggtccggccatgggccccgccgctcgccccgcgctgagatcgccgccgccgcctccgccgccgcctccgtctccgctgctgctgctgctgcccctgctgccgctgtggctgggcctggcggggcccggggccgcggcggacggcagcgagccggcggccggggcggggcggggcggagcccgcgccgtgcgggtggacgtgagactgccgcgccaggacgctctggtcctggagggcgtcaggatcggctccgaagccgacccggcgcccctgctgggcggtcgtctgctgctggtgagcgctgctgagccatctggccgcatcactaaacccctctctcaaccctccctagagaccccgcaccctgaaccgacgttcatcctccaccaagccttgagagtccagcgcccctccccaggctccccaggcccccagcattccggcttcccaaaccagagagccagatgctctgggaactctggccttggcatccactgtgatgaccccggctccctcccccaccacaccctacctccctctgctcatggccccttgccacacagatggacatcgtggatgccgagcaggaggcaccagtggaaggctggattgcagtggcatacgtgggcaaggagcaggcggcccagttccaccaggagaataagggcagtggcccgcaggcctatcccaaggccctggtccagcaggtgcaggggatgtctatgggggagggggctggaggaaaggattccaaggcatctgctagagccaggccctccttagatgggcccttaagagcttgcagagaagccctaggcctggtgggtcagggcaccccagtttgaagaatggagtcagtatggcttcgaagcagggaggtgagaggaggccagagagaggttgagaagcttgaccaggctctgagagtatgggatgggggagctgctgctgacgaccactgctgggactgccctgataggaccggggaaggcacagcgcatctggaagggaggcaggaggaagaaagcagtttccacctttgacctcaaggagcttatggcagtctgtccagagttttgctcactgcagggccaggagctaagagcagctagggctgcaggtggtgagacaggtgtgcaggcagggtatatgctagcctctcgccttctatccctctgcagatgcggcgggccctcttcctgggtgcctctgccctgcttcttctcatcctgaaccacaacgtggtccgagaggtaaatcggaccaggccgtgagggtaagcaagctggggaaagggggacccaggcctgctgacctccttgtctccctgcagctggacatatcccagcttctgctcaggccagtgatcgtcctccattattcctccaatgtcaccaagctgttggatgcattgctgcagtgagttggtattt

SEQ ID NO: 40819 - DNA, 1044 bp, Artificial sequence
  DNA replication origin
gcccagcaggggcgccgggtcggcttcggagccgatcctgacgccctccaggaccagagcgtcctggcgcggcagtctcacgtccacccgcacggcgcgggctccgccccgccccgccccggccgccggctcgctgccgtccgccgcggccccgggccccgccaggcccagccacagcggcagcaggggcagcagcagcagcagcggagacggaggcggcggcggaggcggcggcggcgatctcagcgcggggcgagcggcggggcccatggccggacccggcgagctggcccaacagtggggccaggggtcccgggcgcgggggggatcggagggagcgaggccgctgccggacggggcggggcgccgggaggggcggggccgcggccggacggggcggggcaccaggaggaacggagtgggcgcttggcggctctcgcgcccagactgggccgcgggcgccccctggtggccgcggagagctcaggtgcccgcggctgagggagctggagaggggcaaaaccggggtcgcagcgggaaggcggaaagtcagagagaggaggtgcttcggcagcggacgcgtcagcggggcagacaggaaaatagttggaaagggcgacctgggggagcagagacacgatcagagcctgagaagggcaggagcaagggatgtctaaggggcctggtggcaggcccttgttctgcggcagccccgtggacccacggggtggccagggccaagtcacatccctctcttccccggtcctccctgtctcgaccccactaaacagcaggaggcagagaaccagagactggcgtgggaagccgacaggggagatagaggggcaggggaaaggggctggggggcaaggcaaaacgaagcaggcagggactcagtgcctcagtgggaccgagaggctgggtcacttccctcatctgtgaaatgggcaccataggccgggcgcggtggctcacgcctgtaatcccagcactttgggaggccgaggcgggcggatcacctgaggtcgggagttcgagacccgc

SEQ ID NO: 40820 - DNA, 1295 bp, Artificial sequence
  DNA replication origin
gagcctgagaagggcaggagcaagggatgtctaaggggcctggtggcaggcccttgttctgcggcagccccgtggacccacggggtggccagggccaagtcacatccctctcttccccggtcctccctgtctcgaccccactaaacagcaggaggcagagaaccagagactggcgtgggaagccgacaggggagatagaggggcaggggaaaggggctggggggcaaggcaaaacgaagcaggcagggactcagtgcctcagtgggaccgagaggctgggtcacttccctcatctgtgaaatgggcaccataggccgggcgcggtggctcacgcctgtaatcccagcactttgggaggccgaggcgggcggatcacctgaggtcgggagttcgagacccgcctgaccaacatggagaaaccccgtctctactaaaaatacaaaattagccgggcgtggtggcgcatgcctgtaattccagctactcaggaggctgaggcaggagaatcgcttgaacccgggaggcggaggttgcggcgagccgagatcgcgccattggaatccagcctgggcgacaagagtgaaactccgtctctaaataaataaataaataaataagcaccatgtacaatcaacactgcctcacccccagcaaataactcaaatgtctactggaatgtggaagttccactactgttctaaaacttgtccgtttctccaagggttggggctgctgggagctggctcagtctgaaacctgagcctttaaaaattgtatggtgggcagggcgcggtgggtcacgcctgtaatcccagcactttgggaggctgaggcaggcggatcatgaggttagcagatcgaaaccatcgtggctaacaaggtgaaaccccgtctctactaaaaatgcaaaaaaatagccgggcatgttgggaggcgcctgtagtcccagctactcgggaggctgaggcagcagaatggcgtgaacccgggaggcggagcttgcagtgacctgagatggtgccactgcactccaacctgggccagatgagccacaacactcttttttctccagaaaaattgaaagaattttacagtgaacacctgtaggaacactgatatgggatgaccaagttgctcctgaagaagtgtgagacgggtatataagacagcccccgatatcagcctaaagacagacaaatggaacatgaaataggccagaaactgacccacacatctaaagatggtgtacatcagaggaaacattgtgtttgtggagatacaaggaggcagtagca

SEQ ID NO: 40821 - DNA, 941 bp, Artificial sequence
  DNA replication origin
ctacagatgcacaccaccacgcctagctaatgtttgtatttttagtagagacggggtttcaccatgttggccaggctagtctcaaactcctgacctcaggtgatctgcctgccttggcctcccaaagtgctgggattataggtgtgagccaccgcgcccggccaagatgctgttcttctataatagtttcctttgagtaggctctagcctggaaagaatatcctggccctggaagggtcttatataaagatcttagccatgtatccagtaaggaaggcagccctgtcctgccccaggccagaagccagcgagcctaactagggcagaactgcctgaaaactctctgtagaggtgggcgttgggggcctcaaccctcactctgcaccctgcagcaggcgtctatggagggggccacaccaagggcagagcaaagtccttaaatgtctttaacaggcctggtgcctttgcctccaggtaaggagagagactggggacattctgctttgtctctcccagagacttgagtgttgagggggcagaagtatggctctgggagacgagatgcccacagactcctggacctagctctgcattaattccaggccataaggggagggcacagctgagcactttccatgtgccaggcagtgggcactccacatatgtcatgccactaacaactttgggcaagccatgccttatctgggcctcagtttccctagctgttaaacgaggtaagttgcatgatccctgaatgatctatgtttctctctccctctcagggttctgccagccccgggatctgtgtctctattggagcagttcttacattcattcattcattcaggatacatttattaataatccctgtaggctgggcaccgtggctcacatttgtaatcctagcactttgagaggccgaggcggatcacttgaggtca

SEQ ID NO: 40822 - DNA, 1451 bp, Artificial sequence
  DNA replication origin
ggctgaggcaggaggatcgcttgagcccaggagtttaagaccaatctggacaacatagtgagatcctgtctcaaaaaaaaaaattaaaaagagtcacctgactttggtttctgccattcaggcctggatgccagctcctagctggaagactgaaagtcctgtgccccaggactttctctcccactggggatgctgaatgaggccagtggttagagctgggtgtgtccacatcctagtcagtcacacccagcctgcattggtttcttggtggccatcttccccactggatatgagccccaggagggattggccaacttgttttttgttggtggtggtttttgtttgtttgtttgtttttgtagaaataggattttgccatgtagctgaagctagtataactcctgggctcactagatccacccaccccaacctcccaaagtgctgggattataggcaggcactaatagcaagttggctagcttgttgactgctgtatgctcagagcagctcagggctggggggcacaacagggatttggtggataccaaatttttttttggattaattgaatggaatctcacggtggagcagggaagcccagggcttttgttggggcagagtataggcaggtgtgggaggtggcctgggataggggggcagaagtaggaggggcaggtagagacagagtgaggcaggctaggagccagggaccagtagggatggagggagagggtggaggaggggagagacaggcactggagatgggaaggctttggggtccctgggagatggtttgagtccctggtctgatacgtcctgcgacgtgacctcaggcaaatcccttcccctgtccaaatgtccgttcccacatctgtaaaatgggacggtaattataacgacctcagttattgtgaggagtaatgaagtctgtgcaagaagcccttagcctgggcccagggcctgttggcaatgccctactgagtggccccacccctgccacctccctgtctcttcctccctctctctctctctctctattctgatccggccacaccctctacccgcccagccccctactctagtcctaccacttgctgtgtgatcttggtgaagtgattgtccctctctgagcacccttcattgtctctagcatgagacaataacagtccccaggtcgctgagttttggtgaagatgggttgagataatgcccttagcctagtgccgggcacacagtcagagtgagtaactgttgtactctgttgtactccttaggatgatcacacacacatgcacacatgcacacacgtgcacacaagcgcacacatacacacgcgcttttccaggccttggtagctcatgggagtccctgaaccatatagaactatagcatatagcaaataacacatcaaatccctgccaccccattgggctctgcccacagactcaccc

SEQ ID NO: 40823 - DNA, 1377 bp, Artificial sequence
  DNA replication origin
ttggcgccgaggtccatcaggtactggatctcgggcgtgagcatgcgccggcagagctgcgcgtgccgctgcccgatgctcttcttgaggttgtagcccaggatggacttggtgcccagcggctgccagggctgcatggcctcgtcctggatggcggcggcgtccacggcgtggcccccgtcgatgcagatggtccgcatgcgctcgttggcatggcgcagggcggccacctcgcgggccatgcgctcccgcccgaaggcctccaccttgcgccagaagctggcgttgaagtggcggtagaggtgggagtccagcatgttccaggcggtggcgcgcccatacagctcccccgagagccgcggcacgggcgagtcgcggcgggcgttgagcttgaagtagagcacgtcctccagctcccagcacagcaggtccttcagcagcaccagcgactcgtcgaagtactcttgaaggagcaccaggtggaagcgacgctccacctccaggatgtgctcctgcacctgcgggctgctggggtccaggctgttgtcatagcccaggtcgaagaagagcaggtttcggaggtagtgggcattgaagccgttggggtcgtagtagcgatccgggtcttgcaggaactcggtcagcttgtcgccggccgagagcttccacgtgaggggcaccaccggcccgaagtagtggaaggaggactcgaacaagcgggcggggtcgcggagcaccgtgatgaagatggcgttggtcggcaccaggccgcgcacctcgtcgtagtggaagcgcatgtggttgcagatgatgttgaagcaggccccgggccgatagtcctgcaccaggctgcgggcgaagaaggtcgggtagtcgaagtcattgcggccgttagggaaggcgaacttgagccggtgcttctggccgaagcggaacaggatgttgagcagggtgctgctggccgtcttgtgcgtcttcaagaacacgatgttgcgccgcggctggcactcccccgccgagccgttggcccggatcactgcctctggctcgagtgcaggtggagagcaggacgctgcggcctccggggtcctgctggggacagagaggtggggagagcctcaggggggtgctggggccctcaggactctggtagttagagagggagattattgggaacagtggtggcaaaggagctgggatagtgagacctgtggggcctgagtccaggctgggtgcctgcgcgggtggtttggcctctctagcctcatgttcctcttctgtgaaatggggacgataacaggccctattcacggtgttgtgagatgaggcacacaggctctcctctcattcatggccactgtgttgcatgtaccatga

SEQ ID NO: 40824 - DNA, 1932 bp, Artificial sequence
  DNA replication origin
agttaagcaatagtccgtccgccgcctttttcccagagccctggctcccctccccaccaccaccaagcctgggcatcctcaagtcttctgggctgggggctccgttgagccagaggaccggggcgggacaatggccccgttggcgcgtccgagacaaacgggccttgttgggccggcggcgggggcgcagcgttgcgccccagcgcgctgaatgcggcttctgtgcgtctcgggcgggcgcagaggggccgggatggggcggggagggggccggcccggggcggggaggggtctggggtccggggcgtccattggccccggcgccggaggctgggccaggctggcggcggcacctggccgggagcgggcgcggcgcgggagcgggcgcggcgcggcagcggcggcgggggcgggggcatggaccaggcctggtggagcggggggcccggccgggtgcgccccgccgcccagtgagcgcccgggcggcgcggcccgggccgagccagccacgctgaggcggaggaggacggggacaaggtacgtcccgggctccagcacccactgccagcttgagccctgcctcagtctactccctggggataccgcccacattacgctaacccccaaactgggaccacgcgccggaggaggggagtaggagtgcagtaccgctgttctaagcgctgggtacccctgcccactgccagagggtggcctggtaggggccagggagggcacaggttggtgccccccatgcccttggttttttcccctgtcccccaaccccccttccagggcttcccagtccctgaaggtgggatgggtggggcagaaggcaggctgctggggctgagctggagctgggagtgcgttaatgattaatcttggacacagtggccagagccctaggggaggaggggcagagatctcccctgtctccatcagcccttcctagaaaggggatcagagcaggaaccggagaccatagtaagggatggatcccctctgctgggggaaggccctggcctgtaccccagaggaagcaaagccaccaaggagaggtttgggagagtgggacaaaccctggcatccaggaggggtcctataggaaatcctacagttcctgtttcctagcccagtgcccaggaagggggtccagcttgatctgccccttcggtgccaggccagcattttggtaccagcacagagcacactacagaccgagccctgcccagtgggaactgccccgcccagctgcccagagccagagaggtgatgggcatgtctggctgctgtaacccacaccagggggaaggaaagggagagaaggcagcatgcctgacacctgatccccgggctgccgcggtgacaggtgcatgagaatcctccagaggggagagaggtgtagaggactgtccattccagttgggaaaacccaatctcttcctttactgacggggtgacctgaggcccagagagggtgaggctcatccaggcccacacagggggcacaggagggcagtcctggaccagagcagtcactgtgtacgcactgttccttgtcctgtgaaggaggcattgctacctatccccattatccagagggggatactgaggctcagggaaattcaatgacttgtccaaggtcacatggctcagaggtagctgagctgactccaaatcataggagtcttgccctggcccccatttcaggaccccagcccaacccatgacctctctctgctcctttggggtcctgccttcttggatctgcctgggctgccccaaaccctcagctctggacaccccccctcgcctccctggctcccagctccgcctgacacttcagcgggtgagcaggctgctaccccgggagccgagacaacgaagccctgttcccagctgccacctcagcctgctttattccctgct

SEQ ID NO: 40825 - DNA, 908 bp, Artificial sequence
  DNA replication origin
tgggcggtatccccagggagtagactgaggcagggctcaagctggcagtgggtgctggagcccgggacgtaccttgtccccgtcctcctccgcctcagcgtggctggctcggcccgggccgcgccgcccgggcgctcactgggcggcggggcgcacccggccgggccccccgctccaccaggcctggtccatgcccccgcccccgccgccgctgccgcgccgcgcccgctcccgcgccgcgcccgctcccggccaggtgccgccgccagcctggcccagcctccggcgccggggccaatggacgccccggaccccagacccctccccgccccgggccggccccctccccgccccatcccggcccctctgcgcccgcccgagacgcacagaagccgcattcagcgcgctggggcgcaacgctgcgcccccgccgccggcccaacaaggcccgtttgtctcggacgcgccaacggggccattgtcccgccccggtcctctggctcaacggagcccccagcccagaagacttgaggatgcccaggcttggtggtggtggggaggggagccagggctctgggaaaaaggcggcggacggactattgcttaactttggttggggggtcctggggcccttaggatccaatggatcatacggcttcttgctctagtcagtgccaactggggacgacacatttttggcactcatgggagtggagggagctcaagcaagagactgagctccaactggtcctgtcacctggaggtctcagctgtcactctctagggtgccaatgagggctgagcaaggccaccaggaggcaggtgtcccatccaggccctgtctcattttccaggcctggcctttccttcttcaccccagaggagcaagaccatggatgaggaccaat

SEQ ID NO: 40826 - DNA, 1123 bp, Artificial sequence
  DNA replication origin
gatgtccaaggacccctccaggtccagggatgccaaaaggtaggtgcagaggttctggacctgggcttcacagcctgtctgaccatggttcacattctaacccaggcattttccctctgcacctgcttcctcatgtgtcagttactggtagagattctgttctttgaaagggatgtgttgagggttctgtgataactttatagtctcagaccttatggacttggtaatatcaggtgtgtggtaagtacttggtaaacaccaactgatttatatcacttcctgctggactcggcccagaaggtaaaagccagaaccggaaggatctgtgggtctgcggtgaggtcctgccctcagcttgccttggcgcgttggcagaaccgctgagtacctcccagcgtaggattccgcagcagctgcacttacggtctgtgaggcctgcctgacagcttccccgctgaccttggcagtgtccctgctgacgcccattgggatatgcctttgcctggaaccgccagtgcatcatgatggagccaggaccacaacctgggtctcccagtgctcactcagcccctcccaggactcacttcccggggtgagtgctgtcgagggttggggccacgctgaggaagtgtgggtttggaatggctctactttccctgaatctaggcacctgagggccttgccctctgcctctcactgtttgctggctgtgtgggcagagaatgtttttgtggcagtggatgtaggtccaacctgtgcagggggaaggcaagagcttgggcaggctctggcctggggagcagaaaacctagggctccccctctcagctgggactggctgtgggtggaaggagagggctgtgtgccattcccactctgtcatgcacacggcgatgggagggagtgaggttgcctccagaggctgggacagagggtcaggacctctggagccagagcctgcagccccgggagacaactcaggcctgtctggggaactgtgcatccagggccacacggctagagcgcaggcccatcagatacggaaaaattcctggcagccatgctgatgtggaattttccccattccagaatcgcccagtaatggcgggggcagtggggctctg

SEQ ID NO: 40827 - DNA, 1272 bp, Artificial sequence
  DNA replication origin
gaaggtctgtggtggcggggaacataaggccaaagaacagaggaaggaagggcagagcagccctcctggaggtagggaacaaagggaggaggagggctagtgggaccatgtgagacatcttgaggccattcacgttcctgcttaaagagcccgggaccagcgcagagggcctgatgcctgatctgtcaagtctgtccgaccgtgcctgtctgctgtccccccagctgttccagtggtggattggcaggaccgggtgcctacccggtactccttaccaaaggagcccctggtagtgcccacctagcccaggacaaggagtggaacgggagctgcagctgcagtggtcacgtgagcagcattgctggagtcagctgtttttcagcaccgcctccctcagttgtggcgggaggggattgtgggggtgggggagttgggcagttggggagggggagttgggcagttcggtggggggggggagttgggcaattgaggggagggtgggtgccgctggccccagaccagccaggccacttttctcaaccaatccgaaagggctgggagcctcctggagaggacaaaacaaaacaagttaaagaatgggattaagtccgggcacggtggctcacacctgtaatcctagcactttgaaaggctgaggcgggcagatcacttgagctcaggagttggagaccagcctgggcaacatggggaaacactgtctctacaaaaacacaaaaaacacatacaaaaaaccataaattagcctggcgtggtggcagacgtctgtaatcccagctacttggggggctgaggcaggaggatcgcttgaacccaagaggtggaggctacagtgagccaagattacaccactgcactccagcttgggtgacaaagtgagaccctgtctcaaaaataaaataaaataaaaagaatgagattgaatcgagacacaaagctaccagaagcaggggtacttgccagaactcggaaagtaacctcaaaaaaaatctctgcaaacagggaagagaacaaaagattcctcatctgcccagccccacaggagaatcaatgtatacgagttaactagtggtggctgtgtgactttggccaggtcacttaacctctcgagtttaaaatagttcttcctgtgtgagaagagagggttaggcaagatcatcctaacagttccctttcagctcaatttgtgaagacactatgaccttaaaatatctccaatcatttccatgcacaatctgcattgcaattatttta

SEQ ID NO: 40828 - DNA, 909 bp, Artificial sequence
  DNA replication origin
cccatctaggaagtgaggagcgcctcttcccagccgccatcccatctaggaagtgaggagcgtctctgcccggctgcccatcgtctgagatgtggggagcgcctctgccctgccgccccgtctgggatgtgaggagcgcctctgcccggccgcaaccccgtctgggaggtgaggagcgtctctgcccggccgccccgtctgagaagtgaggagcccctccgcccggcagccgccccgtctgagaagtgaggagcccctccgcccggcagccaccccgtctgtgaagtgaggagcgtctccgccggcagccaccccgtccgggagggaggtgggggtcagcccccgcccggccagccgccccgtcctggaggtgaggggcgcctctgcccggccacccctactgggaggtgaggagcccctctgcccggccaccaccctgtctgggaggtgtgcccagcagctcattgagaacgggccatgatgacaatggcggttttgtggaatagaagagggggaaaggtagggaaaagattgagaaatcggatggttgccgtgtctgtgtagaaagaagtagacatgggagacttttcattttgttctgtactaagaaaaattcttctgccttgggatcctgttgatctgtgaccttacccccaaccctgtgctctctgaaacatgtgctgtgtccactcagggttaaatggattaagggcggtgcaagatgtgctttgttaaacagatgcttgaaggcagcatgctcgtgtcatcaccactccctaatctcaagtacccagggacacaaacactgcggaaggccgcagggtcctctgcctaggaaaaccagagacctttgttcacttgtttatctgctgaccttccttccactattgtcctatgaccctgcgaaat

SEQ ID NO: 40829 - DNA, 1250 bp, Artificial sequence
  DNA replication origin
taatccatttaaccctgagtggacacagcacatgtttcagagagcacagggttgggggtaaggtcacagatcaacaggatcccaaggcagaagaatttttcttagtacagaacaaaatgaaaagtctcccatgtctacttctttctacacagacacggcaaccatccgatttctcaatcttttccctacctttccccctcttctattccacaaaaccgccattgtcatcatggcccgttctcaatgagctgctgggcacacctcccagacagggtggtggccgggcagaggggctcctcacctcccagtaggggtggccgggcagaggcgcccctcacctccaggacggggcggctggccgggcgggggctgacccccacctccctcccggacggggtggctgccggcggagacgctcctcacttcacagacggggtggctgccgggcggaggggctcctcacttctcagacggggcggctgccgggcggaggggctcctcacttctcagacggggcggccgggcagagacgctcctcacctcccagacggggttgcggccgggcagaggcgctcctcacatcccagacggggcggcagggcagaggcgctccccacatctcagacgatgggcagccgggcagagacgctcctcacttcctagatgggatggcggctgggaagaggcgctcctcacttcctagatgggatggcggccgggcagagacgctcctcactttccagactgggcagccaggcagaggggctcctcacgtcccagacgatgggtggccaggcagagacgctcctcacttcccagacggggtggcggctgagcagaggctgcactcccggcactttgggaggccaaggcaggcagctgggaggtggaggttgtagcgagccgagatcacgccactgcactccagcctgggcaacattgagcactgagtgaaccagactccgtctgcaatcccggcacctcgggaggccgaggctggcagatcactcgcggttaggagctggagaccagcccggccaacacagcaaaaccccgtctccaccaaaaaaatacgaaaaccagtcaggcgtggcggcgcgtgcctgcaatcgcgggcactcggcaggctgaggcaggagaatcaggcagagaggttgcagtgagctgagatggcagcagtacagtccagcttcggctcggcatcagagggagacggtggaaagagagggagagggagaccgtggggagag

SEQ ID NO: 40830 - DNA, 992 bp, Artificial sequence
  DNA replication origin
gtacccctttgagatcttgtgtctcaagacaggttgctgtcatcaaggatttgctggttagacaacaggcaaggggtgagctgggtcctcttgggcaggagcctagtaggaagaccgacaacaggaaagaggctcacatctgatactgggcacatggctgggccttggtcctcgtgctcccggacttcagagctcagaggggccagggcctggcctagcctggaatctggatggacctcttctgccctggggcgcgccgtttacccaatcctgacctcagagagcgtctgtcgttctggtgggaaaaccgagacccagacaggaacaagggctcagtggcaaccgctctgcctcccagcccagggctctgtcttgccggggctggggcacagggtggaccccaggaagttctgctatgagtcagcttcgagtgctcaggggaccggacagaggctgctggccggggaaggatgccggccggcggtacctacttccgcagctgtgggtatccctgcctggtgattcagcttccctctgagggtccccagggggcgccgccctggactgggaggctggggaggatgctggggctacggaggggcgatggaggtgccttaagggaccccgtaatccagctctgctggatgctgaggtcccacgagataattgtggccagagatcaggtgggcgtaagactggtcctaggatgggggctgtgggcccctcctcactaccctgcttcttgaagatagcctgggcggctgtgcgggataccccagtgtctccagcaatgcgcgttcatctccatggagggctcgccttggcgctgggtggggagcgacttggtcccccctggcggcgaagagaggctgaccacgccagctcgtgggggggtctactgggcagatgcgcaggccccgggcggaggagggctgatgggggaaatgccaggccgatgggggaggggctgtgagcgggaggcgttggggcgg

SEQ ID NO: 40831 - DNA, 974 bp, Artificial sequence
  DNA replication origin
agatgcgcaggccccgggcggaggagggctgatgggggaaatgccaggccgatgggggaggggctgtgagcgggaggcgttggggcggggcaagaccgccctcccggtccgggggcggggcttggcctggggcggggcttggctggggtgctcagcccaattttccgtgtagggagcgggcggcggcgggggaggcagaggcggaggcggagtcaagagcgcaccgccgcgcccgccgtgccgggcctgagctggagccgggcgtgagtcgcagcaggagccgcagccggagtcacagccgcagccagagccgcagccaaagcctcagagagcaggagttggagcgcaggccctgctggatccgcgcctagctcgccgccaggcaccggccggaggacgggccgtggtgtcagctcactgcccgggcgctgtgggaggcagcgagcccgcgaccccccgggccgggcaccgccaggcgcggagcccagatcgcccccctgccaggcctggtcacggccagagcacgcaggagttcccagggtctggatctgcgcgcaccctaatgacctggggactgaagagaaaaaaggaacgaggatttcatctaaaagcataacgtgggcactaggcgaggaggaaagtggagaccacctggcacggggcagaggtgcctggagcccacgcttgagcatcggagaccctggcatcctagcagccgcgaccttggctctgccctgtctgagctggaaacacagcttagcttctagacatcgctggcacaggcctggcacaagtaagcagtgtcctcacctgtctgaaacgggacacggggtcggaggaaccaggatctagcctggccccaagcggaactctctggtggcccagaggtcgtcactggggagcccgcctcctgccctagcctcactggtgcggatgtgccgctgcccgccggagcaccatgatggcaggatgac

SEQ ID NO: 40832 - DNA, 1801 bp, Artificial sequence
  DNA replication origin
agcttagcttctagacatcgctggcacaggcctggcacaagtaagcagtgtcctcacctgtctgaaacgggacacggggtcggaggaaccaggatctagcctggccccaagcggaactctctggtggcccagaggtcgtcactggggagcccgcctcctgccctagcctcactggtgcggatgtgccgctgcccgccggagcaccatgatggcaggatgacctcagccgaagtaggagcagcagctggtggtgctcaggcggctgggccccccgagtggccccctggcagccctcaggccctccggcagcctggccgggcccgagtggccatggcagcactggtgtggctgctggcgggagccagcatgtcaagcctcaacaagtggatcttcacagtgcacggctttgggcggcccctgctgctgtcggccctgcacatgctggtggcagccctggcatgccaccggggggcacggcgccccatgccaggcggcactcgctgccgagtcctactgctcagtctcacctttggcacgtccatggcctgcggcaacgtgggcctaagggctgtgcccctggacctggcacaactggttactaccaccacacctctgttcaccctggccctgtcggcgctgctgctgggccgccgccaccacccacttcagttggccgccatgggtccgctctgcctgggggccgcctgcagcctggctggagagttccggacaccccctaccggctgtggcttcctgctcgcagccacctgcctccgcggactcaagtcggttcagcaaagtaagtgcctgggtggccaattgagaaggtgggggtccgggtgggtgcatggcctggatggccctgtgaggggtatggctgttgtcccattttacaaatgaggaaactgaggttcatggctgtggaggaagcagaactgaggctcagagagggccaacagttcagtgagttccaggccccagactcaggctctggaggcccaactcgtgtttatttgtttatttacttatttagacagggtctggctctgtcacccaggctgcattggtgagatctcagctcaatacagcctccgcatcctgggttcaagtgattcttctgcctcagcctcccaagtaagtgggactacaggtgcacaccaccacgctaagctaatttttgtatttttagtagagacagcattttaccatgttggccaggctgatcttgaactcctgacctcccaaggtgctaggatttcaagcgtgagccaccccacctggtcagctaattttttttttttatagacacagagtcttgctatgttgccaaggtaggtcttgaactcctgtcctcagcgatcttcccccctcagcttcctgaagttctggaattacaaaccagtatttagtgatagccagtgatctgtgtttgactagccttttatctcactgtattgttcccatttgatagatgaagaggcttgccctgggccacgtggccagtgagcagcagaggcaagatctaaacccagatagtcagactccatgcttccaagagatgtggcctgaggctttggacacaaaggaaagccagaaagcatgggccagggagagaaaaggagggtctgggatgagctgggatttggaaggtcaggggtcaggtctaagtctggggagggctgttgtttactgggagctacagtgtgacaggcttggtgctgagtgttgaccttgagttgtcatggcaaccaccaactttatccccattttacagatgatgggactaagacccagagaagtt

SEQ ID NO: 40833 - DNA, 1666 bp, Artificial sequence
  DNA replication origin
cccttcggagttgaccgaccaccaagctcttccgcccacaggtgttgtcagagctccttccaccggccggacctaggaaggacccagggtccaaacatggcccgaggctggccgagagcacaacagccggcgggcgctgacgggcacggagcgcacgggaccgcggaggaacccgcgcgcgcccccgcctcgcgccgcgcgcacgtgactgcgcccccggccccgcccccggcctgccccccgcccccactggccgctcggccgcgcgcgggtcggccggctctatggggaaagcggcggctccgagccgaggcggcggctgtggcggccgctcccgcgggctctcgtcgctgttcacggttgtcccctgcctgtcgtgccacacggcggcgccgggcatgagcgcttccacgtccggctccgggccggagcccaagccccagccccagcccgtgcccgaaccggagcggggaccgctgtcagaacaggtgtcggaggcagtttcggaggcagtgccaagatcggaacctgtgtccgagacgacgtctgagccggagccaggggctgggcagccatcggaactgctgcaggggtcgcggccggggtcagagtcaagctcaggtgtaggggctgggcccttcactaaggccgcatcggagccgctctcccgggcggtggggagcgcgacctttctcagacccgagtcaggatcgctgccagcgttaaagcccctgcctcttctgcgaccaggacaggcgaagactcctcttggggttccaatgtcggggactggcacgacctccagtgccccactggccttactgcctctggacagcttcgagggctggcttctcaagtggaccaactatctgaagggctaccagcgccgctggttcgtgctgggcaatggtttgctctcttactacaggtatggaagcgccagggtgggacatgggggttggagggtggtgatgctgcagggatggtgatggagggcctccatggttggcggacactgccactagtctagagatgtttaggggcatgcattccagcaggccaagtcacgcttctggcccgccgccaagggccgggggccctgacctctggcaagggtgaatgtgatctgcggacatgacctctggcaagcttgggtttttgggcaagtggggaggtggagtaagggagtgatctggggcctcagttcccttctgcttggcagttgtggggcttggggcagctagctagagtcagcccctcaaagtccttgccctttctggttcgggagctaacatcattgtgtgtttgggattgagggagagagtcaccttgttcagtccttaggacccacactcttaggaagggctgcttattcttcccgcctggggcagttactcccacctttcctgatgcctctggttgccaggccttgggctgggcaccacagactcacagatgtattggacacggttcttggccttcaggagtccatcttggcattttgcggagagctaggaagtgttttgctgccctcctttcttattccagacccagcacgggattcaaaattaaagtccagtggtgagagagctaacactgtcttcccactgaaactggttgaaaggaggttactgaagcctccctttgctttcttactggctcttcc

SEQ ID NO: 40834 - DNA, 1148 bp, Artificial sequence
  DNA replication origin
tctatgcctgcttggacagcaattattaacctcaacttgaatgcattctattcgatctttctccttcaaagcgggagctcaccaaatggtaaaaatcaaggtgtctttggatttgaattaatgtggcattaaaaagttgtggttgctttaaaaagaattaggcagggctggggcggtggcttatacctgtaatctcagtgctttggggaggctgagacagcagagtcacttgaggccaggagtttgagaacagcttggacaacacagcaagaccccatttcaacaacaacaaaaaaaaatcctagctagatatggtggtgcacacttgtggacctagctatttaggaggttgaggtaggaggatcacttgagcccaggagttccaggctgcagtgagctatgatcatgtcactgaactccagcctgggcaacagagcaagaccctgtctgtacataaatagaatgaatgaatgaatgaatgacaggagtttcctatttagttccgtgaaggtagggtatcctcatcttggactccagaaaggcgtgagggaggccatgaagtaggcagagcctggaaccagaaggagccccaccccaccctcatgtttcagaggagaaactgaggctcaggtggcctgggtcatgttgctggtctgtggcagaagccaagtcagaatcaatgaccccccagggactttcctggctggggaggaggaggcgtgggagggatttgaatagaatgtggaagcggttctgcgagatgtcatcaggctctagcagtcccgtctgttggttggtgctgggagagggaattggattccaagtggggatgggaccgcatctcccctagttcccgagatagactcgcctgtaactggatcactccttgcaacctcgggtagcgtgtgactggagaaatgagggctggagccgtggaccatccgagggcccctcccctgctgggtccaggcaaagggccggccctctccagcctcgattggggcgcgatagcgcccttagtgtcgtgtcgggttccaggccacgctcgggcattttaagaggctgaggtgcgccttccgctgcccgcctgcgtcccgccacggagagctcgcctttatctagccctctgggcgagagaagaaggctaa

SEQ ID NO: 40835 - DNA, 1216 bp, Artificial sequence
  DNA replication origin
cgatcggtggcctcgcgcggctctcatcgctctccgagcagtgctccagggggcggagggagcctcctcgggcggtggggaggaggctggaggaatgaggacgcagcacggcgcgcccttgcagcgctcaggctgacgggcgggcgggcggagcgggcgcacggctcctctaggtccggctgctctctgagctcgcgggctggacgctgtccgcggtgctgaagcggcgcccgcggcagggaggcggacccggagccgccgggcagcacacacccaatcccgggaccgccctcctcccaggctcggagaggcggtggcagccggcactgcacccagatggactgagagcgcggcggcgggaaggcggcggcggcggcggcagcagcagcagctgcaagagccctcgcagcctcggggcaggacccacgtccacacccgagagcccctccctggggtgagtcagggcgggcggaagagggatggggtggacgggtcctggggcatgggatctcttgggctttaaaatttcccttccccgttgtaaatttcttccagcccagatcttgagcagctttcagggctgagggctcagagctatgcctcagcactttcccagtcctgggatagagggcaggcccctctgccctcacaagccaggggacaaagggtttagccagaagccagacagtcacaaggcatgtcctcctctccaccttgggtgcagcccacaacaaggtaccaggaaaagctgtttgcccaggctggtgccacaggggggacagcttcccgtctctggtctctgttcagaggcctggccccgagcaacctagccactggaattcagcccagacagaggccagccatcttttagcaggggaaggcaagcttcagccttcactggggctacaagcgagaagtagagccctttccctgcctccttccagtctccgtaggcacctgagctgccatgatcagggcttcggggcgagggtcacttcagtgcacctggctgttataagtgagctggactcaggcagaggagctctggagtggatactgggcaggcactgcctgccagtggggtgtgtgtgtgtgtatgtgtgtgtgtggtgttcccagcaagcaaaagggattttaaactccagtggtgcctgtcacaggaaaagcccttctccagccagcctgtgcctctgagtaagcagttcagggtcacgct

SEQ ID NO: 40836 - DNA, 1421 bp, Artificial sequence
  DNA replication origin
ggcacacggcctcctggagatggcgaggggcatgagaactcagcttggtgaggacaaggtcaggcctggttgcagggagcgggaggataagctccagtccagggtgttgtggagcagaggtggaggggcatctgtgggcactgctggggaggagcatggggtcactaccgagctgaaggcggctggcaggaggagcctgggtgcggtgggatggactctgccccagccagtgacagcagcctgtccccaccaccccttccccacagagatatgccaagacccaggcccaggagcctcagcagtggcagccccatgctgaacctgggcgtcctggttggaaacgaggtgattctgttggtgctggcgttgccctggctcctggcatgagtgtgggatgctggccattcacagaccctgctgctagttgaagaggctgcagctgctgcaaggccccgttaggaggtggctgcagtgacacacgcaggggtgtggtggccagacctgggggaagggggaggccagaacacaggcagcttttgaaggatgagccagctggtttgccgacgctttggatacgggggtggggggcagtcagggtgatcttgggtccttggcctgaaccctggagtgaatgtatttctccacttagcagacattaggtgccctcgacatgccaggtgctgctcagacatggaggtttcagctgggaagtgaacagacacggctctggttctcatggggctgggaaagcaaggcagatactgtggctgcttccagctcttttagaaagggggtggtcagggagcagctttgctgatgcagaaagagtgaggggaggaaaggaaaggagggtgaagaagcagcagctggagggcggtgcaccccgggtggggcctgcctcctgacctgccagaggaaccctccactgcgatggagggagtggcccacagggaagcctggggagatggaggtgggagtggagggggcagatgctggatgcgatttgaaggaagggcaggaagggtttgcttagggttagaggaggagcatgaggagggccagagaggctgcagagcgtttggtgtgagcagctggaagggcaggatgctgaggtataggcgaggaggaggcagagcttcctatgggctccttggggagggatcagctgagctcagggccagctaacccatctcctggggcataggaagcaagtgggcacctcttacagagacaggaagtgaggcgaggcacactgcgggcagcgggatcccggctctgcctgtctgaggggagatgagatgtccaagggcagctggaggccaggggcagggctaggctagggctgctgtcctggggagtgggtagacttaggagagggaagcctgggccccacagccagagcagcatggaataaggaagaa

SEQ ID NO: 40837 - DNA, 898 bp, Artificial sequence
  DNA replication origin
gaggtgtggggagcagaaggcagctgtttgcagccactgggttccgccgggtgggctcactggggtgggcccaaggccagagggagtcctggacgcggggagctggagggtgaggcgacccgggaggagacaccgccaggcaggggagggcggccgggtaggtgtggtccggctcacaccgcagccaccgccaccgccaccaccaccgccacagggagaacgcggagaacatgtactacttctcagagctggccctgaccctcaacgagcacgaggagggcgtagcgccaaccgacagccgcctgcggcccgaccagcggctgatggagaagggccgttgggacgaggccaataccgagaagcagcggctggaggagaagcagcgcctgtcgcggcgccggcggctggaggcctgcgggccgggcagcagctgcagctcggaggaaggtgaggccgggcgggaagggcgccccggaggggaggaaaggggtgcccgggtgggggtgccgcagggacggattccgggggagcaggccacaagcccacccaccagcccactgtgcctgcccagcagagaaggaggcggatgcctacacgccactgtggtttgagaagaggctggatccgctgaccggggagatggcctgtgtgtacaagggcggctactgggaggccaaggagaagcaagactggcatatgtgccccaacatcttctgagcgccacccttgcaacaaatacaggcgcctgcacagcctggcccacctgttcattaatgcactcaatttagtactgaatggtctttctcccagcccattcccagcccttcctatttcctttcctattttttttttctccccacactttcttgggactcccaccttggaaggaggaagggct

SEQ ID NO: 40838 - DNA, 1569 bp, Artificial sequence
  DNA replication origin
cctccggccccctcctgcccccccaactgggtccttgcaggccccgaagggtggcgccaggcctccaagccggccccggccacccccgcctccccggccgctccaaatcccgcggccgctgccgccgccgcctcccccggagcggggcggagcagctgcccgccgccgccgaccacccggacgactcctcgtcgaatcgcaaacgcataggccgccgcccgagttctgcgtacgagaagaaagacgcggcgcgagcgccaacggccaccgggcgcgcgccgcggcggccgggcctgcgccccaagagctggatgccagagcaggagaaagagccgccaaccgatcgctcgatcgaccgcacgcccgttccttcgccctaccagacccgggagggggggagggcgcgccagggcttcttcgatttaggggcctgactccccggcgacgagacaagatggctcctccggtccgcaccgcagctaccgtcccggctgcgtcgctcggcccgcccccggtactgtttctttaaatggcggagagggtcaggaaagcaggaagagaggcgcacgctgtcacgtgacaggggcgggaccggccaaccaagatccggtcacatggggacacgcagcccgccaatcaggaggctgtacatcagggcgggggcgggaggagctgcagctttgtgattggctgaatgctccgcggaggcctcgggggcttggggcgtcggggagtgtgcgaggtggccggggctgtgtgcactatcggagacaaagcggtggctgtggtgtctgtgacggcggcggcagagcagctctaaacgccgaatttcgtgttgctgaatcctgtcaccatctcaactagcgcggcgcgcgggcggcgcgcgggcggcggcggaggcagcggcggcggcggcggaggcggcagcagcacatggttccaagagcgctctgcggctgttgggttccaattccgcggggagggacaaaggcagttgtgagatccgggtagtgcccggtcaggtggtgcgctcgccactgccctcgatccggtccttggaagccgggagtagctcctcttcgtggggaggcggccacgggaccgaggcccgggaagggcctgggaggctgaggctgttgtctgagggacgtgggggcggggcgcggcctgcccgaggtgctgtgggcgggtcatttgtgaggtgtttatgtgggccaagtgtgaggtaatctgaccaccaccctgaactgggtttggtccggctttgaaaaaagaaatcgtgagtgcctaggagctttttcacttgggaggtggtgaagctgcaacttgcgccatataacactccgtcgacatcttggtctccggtcttgggcctgtttaagaatcctggcatcacgtgtggcgaagacatggctgatcagttttctgacagaagtgggtaaatttccgcgttggtaaatttcctgacaggaaatttcggggaaccaaaaaaggctggaagaacatgaagatggagcagtcataaaccacccactcaaggaccatctccttcaggaccatccacacgag

SEQ ID NO: 40839 - DNA, 716 bp, Artificial sequence
  DNA replication origin
gacggtagctgcggtgcggaccggaggagccatcttgtctcgtcgccggggagtcaggcccctaaatcgaagaagccctggcgcgccctccccccctcccgggtctggtagggcgaaggaacgggcgtgcggtcgatcgagcgatcggttggcggctctttctcctgctctggcatccagctcttggggcgcaggcccggccgccgcggcgcgcgcccggtggccgttggcgctcgcgccgcgtctttcttctcgtacgcagaactcgggcggcggcctatgcgtttgcgattcgacgaggagtcgtccgggtggtcggcggcggcgggcagctgctccgccccgctccgggggaggcggcggcggcagcggccgcgggatttggagcggccggggaggcgggggtggccggggccggcttggaggcctggcgccacccttcggggcctgcaaggacccagttgggggggcaggagggggccggaggatggttggttgtgggatttctactttgccttttcctccttatgccgccttagtgaggggcgggagctctggcggcagccccggggtggggagacgagctccggagtcggaagagctgggttttcttccgggcctagccaccagttggcggagtgaccttaggcgagtcactctgtaatttgtctgcgcctcagtttcctcctctgcctatcaatgtgtgtggggttgaa

SEQ ID NO: 40840 - DNA, 1214 bp, Artificial sequence
  DNA replication origin
gctccgccccgctccgggggaggcggcggcggcagcggccgcgggatttggagcggccggggaggcgggggtggccggggccggcttggaggcctggcgccacccttcggggcctgcaaggacccagttgggggggcaggagggggccggaggatggttggttgtgggatttctactttgccttttcctccttatgccgccttagtgaggggcgggagctctggcggcagccccggggtggggagacgagctccggagtcggaagagctgggttttcttccgggcctagccaccagttggcggagtgaccttaggcgagtcactctgtaatttgtctgcgcctcagtttcctcctctgcctatcaatgtgtgtggggttgaaatcgctttgtaaactataaagcgtgggtgtacgtaaaggatggttattgtttataattttttttgagttgtaagaaaacttagcagttccccaatccttgggttttgaacctgggaaccttggattggagttggggatccccaaacttcctgaaattgtgggaatgtgcggtttgggggaatgatgggaatttgtgggaatgtgcgttttaggggaatgatgatccatcgctagcaagttttccaagggggctgtgacccagaagagttaagaatcacaatttcttcatgctacagagaggaaactgaggcctagatgtcatttgggacccttcacaaccattttgaagccctgtttgagtccctgggatatgtgagctgtttctatgcataatggatattcggggttaacaacagtcccctgcttggcttctattctgaatccttttctttcaccatggggtgcctgaagggtggctgatgcatatggtacaatggcacccagtgtaaagcagctacaattaggagtggatgtgttctgtagcatcctatttaaataagcctattttatcctttggcccgtcaactctgttatctgctgcttgtactggtgcctgtacttttctgactctcattgaccatattccacgaccatggttgtcatccattacttgatcctactttacatgtctaggctgtgtggttggtggtgaataggcttctttttacatggtgctgccagcccagctaattaatggtgcacgtggacttttagcaagcgggctcactggaagagactgaacctggcatggaattcctgaagatgtttgggg

SEQ ID NO: 40841 - DNA, 1336 bp, Artificial sequence
  DNA replication origin
tcccagtaggggcggccgggcagaggcgccctcacctcccggacggggcggctggccaggcggggggctgatccccccacctccctcccggacggggcggctggcccagtggggggctgaccccccacctccctcccggactgggcggctggccgggcggggggctgacccccccacctccctcccggacggggcggctggccgggcagaggggctcctcacttcccagtaggggcggccgggcagaggcgcccctcacctcccggacggggcggccggccgggcggggggctgacccccaccacctccctcccggacggggcggctggccgggcagggggctggccccccctcccccctcccggacggggcggctggccgggcagaggggctcctcacttcccagtaggggcggccgggcagaggagcccctcacctcccggacggggcggctggccgggcggggggctgacccccccccacctccctcccggacggggtggctgccgggcggagacgctcctcacttcccagacggggtggctgccggacggaggggctcctcacttctcagacggggcggttgccaggcagagggtttcctcacttctcagacggggcggccgggcagagacgctcctcacctcccagacagggttgcggcccagcagaggcgctcctcacatcccagacagggcggcggggcagaggtgctctccacatctcagacgatgggcggccgggcagagacgctcctcacttcctagatgggatggcggcggggaagaggcgctcctcacttcctagatgggatggcggccgggcagagacgctcctcactttccagactgggcagccaggcagagaggctcctcatatcccagacgatggggggccaggcagagacgctcctcacttcccagacggggtggcggctgggcagaggctgcaatctcggcactttggggggccaaggcaggcggctgggaggtggaggttgtagcgagccgagatcacgccactgcactccagcctgggcaccattgagcactgagtgaacgagactccgtctgcaatcccggcacctcgggaggccgaggctggtggttaggagctggagaccagcccggccaacacagcaaaaccccgtctccaccaaaaaaaaaacgaaaaccagtcaggcgtggcggcgcgcgcctgcaatcgcaggcactcgcaggctgaggcaggagaatcaggcagggaggttgcagtgagccgagatggcagcagtaccgtccagctttggctcggcatcagagggagaccgtggaaggagaccgtggagagagaggga

SEQ ID NO: 40842 - DNA, 828 bp, Artificial sequence
  DNA replication origin
gtggtgggggtcagccccccgcccggccggccgccccgtccgggaggtgaggggcgcctctgcccggccgcccctactgggaagtgaggagcccctctgcccggccagccgccccgtccgggagggaggtgggggggtcagccccccgcccggccagccgcccagtccgggagggaggtggggggtcagccccccactgggccagccgccccgtccgggagggaggtggggggatcagccccccgcctggccagccgccccgtccgggaggtgagggcgcctctgcccggccgcccctactgggaagtgaggacccctctgcccggccagccgccccgtccgggagggaggtggggggggtcagccccccgcccggccagccgccccgtccgggagggaggtgggggggtcagccccccgcccggccagccgccccatccgggaggtgaggggcgcttctgcccggccgcccctactgggaagtgaggagcccctctgcccggccacgaccccgtctgggaggtgagcccagcggctcactggggatgggccatgatgacaatggcggttttgtggaatagaaaggcgggaagggtggggaaaaaattgagaaatcggatggttgccgggtctgtgtggatagaagtagacatgggagacttttcattttgttctgtactaagaaaaattcttctgccttgggatcctgttgatctgtgaccttatccccaaccctgtgctctctgaaacatgtgctgtgtccactcagggttaaatggattaagggcggtgcaagatgtgctttgttaaacagatgcttgaaggcaa

SEQ ID NO: 40843 - DNA, 1228 bp, Artificial sequence
  DNA replication origin
tggcgcggctggacgggcagctctccgcagaatccaggggacggttgctgagcgggcctgggacagcgggtcgcggcacctccggcctgcgcgtgtctaatccgtctgtcgggtcccgaaagagctaagccgagcctgcgccggacgggtgggctggactgagaggtgggtgtgcggacctcgggggggatcctggtgctgccccaacgtgtccgggggtggaacccggatgtctagacaggagttctggaacgtccagacctgggagcccccacccatacgagaggtctaagccatgggataaagttatgagactgttgggggaagacgcccccggattcctaagagactccacgccccacaggggcgctagtctgtggcggcagaaaccctggggaagctgccacagaatcctgaggcccctcacaatgtccggcgaccccagactgtgtgacagggagattggagaagagcagcggcagggatcttcttataatcccatgggtgtcctagattaggcattagggtcagctgccccatagaagaacagacatggggggaatcagaatgtccgcagaacctaaggctggtgaccactggacagtcttgaagaggtttaacccagacagagtaactaggtaagaggcaaggatcctaacaggcagagattgggaggttgacacctctgagcctaccaggatgggagggggaacaagcagtgacttgaacaggctgggacccacacaccccaactgtgtggagcggtaaccctcaccccccacccatgcaccgtatggggtgacttcccaagtgactgttctgaagagagggaagggatgattgaaagatgaatcaacaggaggtggggggcaggcctggggccacacattagtcagtcaccatacattaactaagcatccacagtgtgccagaccagggcccctcaaattccagacagacattagttggggctacaggaggaaggagagatctgcgctgggaggctgggccaggatttaggggtccattttgatgggcagcactggggcaagatggggctcttgcctctgtcactgagagtgttccaggcccttgagggcactttggaagggagcttcggaagccggagatgacgaagattttgattacatccttctctgccctctaagtctttggcttcctccttgctcagtgacaaatccttggccctctccaatcttctcagttt

SEQ ID NO: 40844 - DNA, 2074 bp, Artificial sequence
  DNA replication origin
ctgaaggcccgcaggttctgcgaccgccctccctcgcagggcgccgccctcgcctcgcccaccctgcctcgcgctaggcgccgaaggggtagccaggtaggaagacacccgctaccgcctgcttcagtgtccggatctaaagggaagaaaccaaggtccccaggacacccagctgagtggcggaggtcgaactcgaactcgggaccgaggcagagggcgtcccggcgggtggtggaggggcacgcggcgtgcaagtccccaggcgtccccattcctcccatccccggcccaatcctcaagaatgtgcgggagccggggccggaagcgactgcccgcgtccccaaatcggccagacgctggggcgcagggcgggcggagcgggcctagcttttccttatatggcccggccccgcggggaggagcccggctcgggacgcccccgttcttgccacgaggccagcgggggccgggccggcgcgcggggcgcagtaatggcgggcgccgggtgctggaggagccgctcccggggtcggaaagacttcgagaggcaccgatcccgagaccggggcaggttctcatctgtcctttcccagagattcaaccactgctccagcttctctccaaaactcttttccagcgccgcccgagcctcgcttaagagagggaggtggcggctgaagaaccctgagcctgcctgtggataccttgagatgaggatgtgcgggaaccaggcctggcattccctctttttggactgtgctgcctctacgacccccactgggacttggacttcctgagggaaggtcgaactgactggcgggcacctttggaaacctaacctcatcccctccaggctgcacacatcctgcggtgatagtggagaggcagacacccagagagtctaatgcgctggtccgagaacatacaggcagagtgccttggggaggtcatggcagcagctgggcactgcccagtggctgggctacgctggttggttccagcctctgcctgcgggggaaggtatgagagtggggtgggtcacttgtcttctaggtaaagtaaatctttaatttacccccatggacaagggtcagggactgaggagatggagctcctctggcccctcctccaggtcaggctgcctggcctttggggttggggaaggagccctgccccactgggttgccctacggcctctgtgcatggaggtagacagggctctcaggaagaggaacaagaaaggggatggagtgggctcatctttcctccacctgagatctgggtccatgcctcattctgtccccatgccaactctaggacctagagcttgtgtgcaaacacatctccctccctcccttcattttacaggtagaggaactgagactcaagagtagaaaaatgagatgagaagccacagaatccataagggcccacaaaacctgtctctctcttatggcctcgtccagccttgactttcccaggactctggtcccccgtggcccactatggggttgggattttggcacagctccttcttagatgggtgtccttgagcaggtgattttaactctcttgagtcgcagtgcccaggctttcagagctgctgtgattattctgtgacatggtatacccagtacccagcctgccccctgccaggccttggcattattaatcattgctgctaccattatcactgggccagcttccaggggtgggcattgcccgagctattgctctggagaggcatatccagcctccccacacctgtggctgcatacgggcgagtctacagcagttactgtttaaacaggtggtggctgtggagggttgggagggactaggcttcagtaccaggcatggacaggcacatgccacaagggcctctgcatcagccacatggaactggcctacccctgttcccatgtccccctcctcctgacctttcccccatcacttcttcctgtcagctgagaggtaccctggattgaccctgcctctctggcttggctttcctgtccccacagtgggtgatggggccacttaccagcttccgaagggctccctcatccagccc

SEQ ID NO: 40845 - DNA, 1155 bp, Artificial sequence
  DNA replication origin
tgtggggaaagagaaaagacaggggatagtgggtgtccacctttcataatcctctcctctacacctccctagcttcccaccctttcctgtactcaacccccaccccacctctccatcccctcctggatctcccacactccggcatccccactcggctgcatctctcctacaggcacctccttctcctgccacactgaccctaggatgacttggacactcctgggggccaggcgaggcttaggctggaggaagggtgcccagatcctttctgcagatggggaggggggacagccctcctggccagtgctgcccacagctccagctgggagatgggtggactcccttattggggagaagaatgtgcctgaggcccgttgcctttcaaggctgcaggggaggcctctagccatgggggtggagggggaggctggcctagctgggggcggggacacttcaggggtggggtgcagtatcagggactgcatggacctgaggaagctagagctgccaggcacaagagcccattttctaggcagggaaagggaggcagggggaggggaagaaagatgcctgtgactacccctgctgggaccctcacctgctctcttggtgtcagaggggcctctggtggggctctgggcagcaggggtctctttggggccagacagaagctgcaagggagaagaacagggcctgagcaaggcctgactcccagacctgctcacttgcctggcatccctgcccctcatccagactcaccttgttgaccacctggccctcagtgctggggagcgttggagactcctgaggctcagggctggtggtcttgggtgggctggggggtggctctgggctgcctggaacctcagctgtaaggcactgggcctcggcaggctccaatggaggctcaggagaggcaggggtgggtgaactgctgggtgaggcaggtgagctggatgtgctcccaggtggggctcgcagcaggagtgtcactgtggtcacatcctggctggtgccttcaggggtgggggttggctttgaaacctctgcctgctgttcctgttcctctcgctctggcacctgtaagggacccacaggatgcaaccaaggctccctaggctttgaacgccacccccaccactgagggccaggctg

SEQ ID NO: 40846 - DNA, 835 bp, Artificial sequence
  DNA replication origin
tgccctctggttgcctgtgggcagcagcacccggcctgtggaggcctggccacggccgtccttgatctcgatggtgaatgtggtcttcatactgccccctggctcggcagtgccgacggccacgggcagcggggcaccaggctcctctgaacgtgccacaggcccccctgctctgttttcaaggggcctagcagccaagccccgccccctggggccctcctcctgggggcagcttcgaagctgggccaggggctgggctactcctcgttgctccttgctgaaccgggaggaggtatcactggggccccgagaggaggagccgctggaggaggaggcaggggtggtgctggtgagggaggggcccaggagccttgcgggggtcaggggacttagggcagcctggggtgtgccatcctggagcctagcagccataggagaatcagatgtgaacttgtggacacgatcccgcacagagccagcccgctggaatgaggaaggtccgctggcaaggggggtggactctagaaggaacaggagggctgtcagcaactgggtgggacagggtctgcacagatcctaggcagggtgagaataggtagtacctcggttctgggctggttggcgggggctgagcaccgacagggagcgttggcagggtcggggtccagccacgtctggcaggttggggagggggtgatggccatgtggggaaagagaaaagacaggggatagtgggtgtccacctttcataatcctctcctctacacctccctagcttcccaccctttcctgtactcaacccccaccccacctctccatcccctcctggatctcc

SEQ ID NO: 40847 - DNA, 1656 bp, Artificial sequence
  DNA replication origin
cgcaggcagagaagagaaagtgacggcacagttgaagacacggagagagagctcaaggaagagccggaggaggtgggcggacaggcaggcaggcacagggcgacaccaggtggccttactctccgagcgcctcacgaaactcgactccactgtggtggtgcgggccgtccgtgtgccatcatctgcaggggcaggggatgagaaggatgtgaaaggcacagggggctgggggaggatgtgttcccaccctgagccctgggccggccccatttggccccttactggagtggacgagccgctcagtcttggtaacagtgctgacagcagagccatcagctgcccgctggctgtgcctcgtggtggtctcagtggctgtgttgccgcgcccctcccctggccggccccgtgcctcctgcagccgccgttcccgctccttgtcccgctggtctgggcaggggatgccccatgcatgcgcaaaagggccaccaacacccacacagcacagatgcacaggtgcatggggcacacaagacggggtggagggtggcttgttagaaacatgaatgacacaggtaacaagggcctctctaggagcagctggggtgaggggacagccataacttgacagggaatggagtgtgggaagggtttgatggactcaggcagaaactagagaatacggagtagctaaactcaaaggggtatggatccaaaaagggtttctataggcatgagtagctaagtcaggaggggtatctagatctagtgagggggtagctgagtccaaggaaggagaagctgagtgaggaagtagctgggtgggccatcagcaggtctttggttggaggagaagagcagctggaggcaggaatatttagatccaggaagggagcaattgatgggatctgagaagcaatctgatccaggggaagagtagctgggagagaagctagtgaagggggttaactgggcttaaaatagaagtaggtgggtagagatagagactggggtggccatcagtgggccctggcagaagcagctagattcagaggagtaattgagagtgtttgagaggagaagcaattgaacccagaatctaagggaatgaatagatgtgtccagggaagaactatctgggggaggaagtagttgtgtccaggaaaagggaagctggatggggcagaggctaagatggccatcaatggacttcagggagagaggagcagcagggagaaggagtatctggattcagggaaggagtcgttgacagtactttgagaggcaactggatccaaggagagagtagctgcgggagggagtatctgggtctaggaaggagaagagaagctggttggggagaataactggggtcaccagcgggagagaaggagctagggaaggagcagctggatccagcagggaatagccaagggaactgctgggtctagagaaggagaagctgggtagggcagttattaagctggggtgtccacaaatggaccccagagtatgaggggagcagctggggaatggggcagctggatctagggtagggcaactggctctctacctctcttcctttgtcggagctcacgaagtgcagcccggatgagcttccgctcttcaaagtccgtgctctgatccagctgcatatag

SEQ ID NO: 40848 - DNA, 922 bp, Artificial sequence
  DNA replication origin
tggagaggagggctgtgccccggggagagggggtgagggaggcgtgagaggaggtggggggaggaggaagaggagaaggaggaggaggaagaaatttgagggaaaccagaaagagaaggggaaagaagggaagacagatggagaagggtgctgagggtgaggtgagcagacggggcaacgattccaaagtggagggcttgctgaggtcctatataagcctctggcagcactatataggctgggcgggcacggtgcccgggccaggagcctccttttggaatctccagccgggatcccgtgggagcaggaagctctggtgatagtgggaggagagcaggacagagaaagggagagagagggagaagggggcagagggaggatggaggggatatggacagggccacctggtgggctttggcccgggctggtaggccggcctgcggctccttcgttccggcgggcacctggcacgctcagcagcgggggggtggggatggagaaggacggggactctctggggaagggggtctcagccgctgactgacaatgtggctggcccgctccaggggttctcagggcaactgggcctggtcccgatgtccagccccagatgtgcagcaacattagcagggccagggcccacacttactccgcagatgagaaggccacctcgaagttctggcgtcggttctgagggctaagctgcccatagtcgaaggcctcagggaagaagttgtgcaccagggcacagaaggccatcccatcactccagctggaggagaagttctggatgtcgacgtgctataagccgtaggaggactggtcaggaacctgggggcaactcccccctgctgtctacccctcagcattctgttattccagacctagggcactgggcacaaagaggccccgtagcttgcac

SEQ ID NO: 40849 - DNA, 1186 bp, Artificial sequence
  DNA replication origin
acttttttcagatggggggcccagacctgcagcctgggtcaggcatctcccctgggcttcccccatcacagtgctgcccacctgggtcatcactgcccatttagaatggtctcacctgctgggccctgaactgccagaagacagggctatgtctggctcctctggcttgactaaatgccccccttacttcccccacccgcctccctggaccctctctggccttgctgagcagattctggtgaaacggggcaggtggtagaggcggcgtttctcaccgtggggccccgagcaggggttaggactttttggtttttaccagccccttctggaccagacagcggtagaattcctggatgtacgtgtacacgcacttccagtcaggctctcgaagccgcaccatgtcctctgtatccaggagctgcgggcagtccgcatgggtcctggggagggtagggggccgggaaggggtgggggacgggggcaggaggccagggccccgggtggggaagagagggaagaggcagagaagagagaggggaggaaacagagacacacacacatacacacacacacacagagacatgagttcaattacgattccagtgctgcagtctgccagccccccgcatgcctcctccccactgtggacgtgccgctcactacccatcactaatggtgtgcaatgcagacaagggtgggggccaaaccagtcacaggtgcagagaactctaggggcaagcgggaacgcggggtgggggcgatggcgttggcaccaaggttggagaggagggctgtgccccggggagagggggtgagggaggcgtgagaggaggtggggggaggaggaagaggagaaggaggaggaggaagaaatttgagggaaaccagaaagagaaggggaaagaagggaagacagatggagaagggtgctgagggtgaggtgagcagacggggcaacgattccaaagtggagggcttgctgaggtcctatataagcctctggcagcactatataggctgggcgggcacggtgcccgggccaggagcctccttttggaatctccagccgggatcccgtgggagcaggaagctctggtgatagtgggaggagagcaggacagagaaagggagagagagggagaagggggcagagggaggatggaggggatatggacagggccacctg

SEQ ID NO: 40850 - DNA, 1385 bp, Artificial sequence
  DNA replication origin
ggtccgggggcgcggcggagctgggacctacctgcctgagtcctggagacagaatgaagcgctcagcatcccgggaatacttctcttgctgagagccgatgcccgtccccgggccagcagggatggggttggggaggttctcccaaccccactttcttccttccccagctccactaaattccctcctgccttaactgaggctcgactccttcgttgctgcgggcgggtggggtgggaggtcggaagaagaacctctgaggatccctgctggagttggagaccttgcggagctgccttcggttcaaaccccctccccacccccaggagacgcagagaggagtcaggatcgttgaaaaccaataatttatcaaaacgctgcgtgtgtatgtgggggggagggtgtcgcaacagacagggcagcggtgggcggacgcacaggcaggagacggtgcccggagagtgggggcggcagcttgccactggctggccatgcgggcgggcaggctagacattcttgccgcgcaggcgcagttcgtggcgtcgcaggtggttgtagagcgactgcacataggtgaagacacacttggggtcaggcttcttgcccatgatcatcatgtcgtccacctccaccaggggcacacagtccaccagcatcctgcagggagggggcacggggttggatgtcagcgccagacccgcctctcgtggcgcccctctaccccaaggtcttttttattgccgcattgcctgctggtctttcataaactccagacagggaaaagccttccaggaaggcaggaagcccctggcttcatctacccaagcctggaggcatctctcggggcgggggagcagagctaggcaggtggaggcggagatggcagaagagagccccatcccagtcaggcaggtcctgggtctgcttcctccaaccctggggaggtgctggctccaaaccctgcccatgttctccctggagaccaccttctgctcaccctcactggcacactccagttggtagaagcctctcagctcggcctttgcacccagatgggcttcatcactggccaatctttatctatggataggtctcactctagtggccctgtggtccaccgatgattgtctgctagctgcctgatctggtacttcctgttgagaggcccagggacccctattctttgacagggggtggggataaccctgctgctggagatggaggccagggaacgtgtgggcagcagaggggttctctaacccttatcacctgccttgggtagagcagaggaggcagatgaggatcccagccaataccaatggaccatctatgccatgctcggggggaccacccttctggccatccttcagaatgctagctgcccttc

SEQ ID NO: 40851 - DNA, 1075 bp, Artificial sequence
  DNA replication origin
cgagcctcagttaaggcaggagggaatttagtggagctggggaaggaagaaagtggggttgggagaacctccccaaccccatccctgctggcccggggacgggcatcggctctcagcaagagaagtattcccgggatgctgagcgcttcattctgtctccaggactcaggcaggtaggtcccagctccgccgcgcccccggacctacaggtcagcgtggtccgaagtttcctctgggggcttcgcgggcgcccacacgtactcggggggcacctgcgcgtcgggcgccgccttgcggtagaagccgagctcctgcactagcgcattgatctcttcgcgggtcatttcactgagtgggatgcgctgaggcggaggaggggcggggtcagcaggctgggcctcgcctctggcctcgcccccagcccacctcccacggcctcacctctagttcctcgtagcggcggcccagcagcacgagctcagggtcggccccagggaggtgtttcatcaccaggttgtgactggaggtggtgttaaggagcggggtggtgggcagagggaggtggtggtttccgcagccttactgatgggaacagcattgcctcctttgctcagagcttactctgtgcccgggaggggccagggtctccgcttatacgtgagaaaattagggttcaaagaagtaaagggccctcctctccattctgtggcagtcatcactagtcaatctctcttgcccacccaacatggagaccacctcagaatcctctgggagccactaccaatcaattcaacttgtcagttgaaaaccatctgccacccctttctgaagttacgtggagattctcccaggtgcccatcccatttcccctcccccagaacagaaggatactagaatggaatgtcctgcgtgacgaaagccttcacctggggaggaaccagagcatcagagaccatgacctcagtctactcgaggtacagacgagacactgaagcccagtgaggtcataaagcaagtcaggtgcaggctagactctcagcctaggctagactctcagcctagggatccttccccc

SEQ ID NO: 40852 - DNA, 1253 bp, Artificial sequence
  DNA replication origin
tctgccacactctccctggggagatcaactgagaggcggcaagttccttaggaggggatgctatcttctgagcgtcacagagtgggcccagcaaccccctccccaaagactcttcctcagagagagaagctgaggtagagcacaccatccaccctggaagaatggctaacctcagagctaagccccagccacctttcttgggagagggccccctcaccggaagccggggtcgctcttccaggtaggctgagctgaccaaggggaggatgacagggtggatgtagaagaggaggtggtgactggggctggggcttcttgggcctgaaggttggggctcaggcacctgccaggccctgtactctgtgtgccaagccttgggagggccatgtcaggggctgggggaacacagggagagcgattcggggagtggcttggggaacggctgggtgatcggggtggcttgggcagaggtgggggcacagtctggcctgagggggccccaggccggaaggtgggggacagaagtccaggggagtgagtgccaggctctgaaggaccctggcccacatccaagggcaaggtctggggtggccgtggcaaaacaggatcctcagggctgctgtggagggcctcaggccgggctcggaaggagggggagagccgagggtctggggaggtttggatgcagggtggggagcctgtaggaccagatgtctgagctggaggctggagatgcccctcagaagcagggagaggtctaggggctggggcatccctctttctagctgatgtctgtcccacagaggctgcgcctgatgccgtggatgctggagccagggcctgttcctgagttggagacagaactggactgggcaccggggaaggggtggaggggagttctgggggctgctcctcagaagccagggccaggctcaggccagaggctgccagtgttggcttgggtcccacggaggcaggtggctcctgcttctggtctctggaggttggggccagattgggccccagggtgactgggggagatcttggccctgctgaggcaggcatcaccagccccagggacgtcggagccagaactgagcctgtggtcgctgggggaggctttggtccagctgaggcagacatcaccagctggcccacagatgttggggccaggctggagctgcggtgggcagtagctgttttctgcccttcaggggtacacagtggagccaggattggtcggggagatgcca

SEQ ID NO: 40853 - DNA, 1153 bp, Artificial sequence
  DNA replication origin
ctatgtctacttctttctacacagacacaataacaatctgatctctctttcttttccccacatttcccccttttctattcgacaaaaccgctattgtcatcatggcccgttctcaatgagctgttgggtacacctcccagacggggtggcggccgggcagaggggctcccacctcccggacggggcagctgtccaggcgggggctgccccgagctcccggacggggcagctggccgggcgggggctgcccccccccacctcccggacggggcggctggccggtcgggggctgcccctcccttcccggacggggcggctggccgggcgggggctgcccaccacctcctggacggggcagctgccgggcagagacgctcctcacttcccggacggggcggctgccgggcagaggggctcctcacttctcagacagggtggcaggtcagagacgctcctcacctcccagacgggtggcggtggggcagagacactcctcagttcccagacggggtcgcggcctggcagaggcactcctcacatctcagacggggtggcggggcagaggcgctccccacatcccagaggatgggcggccagggagagactctcctcacttcctagacgggatgaccgccggggagaggcgctcctcacttcccagactgggcggctgggcagaggggctcctcacatcccagacgatgggcggccaggcagagacgctcctcacttcctagatggggtggcggccgggcagaggctgcaatctcggcactttgggaggccaaggcaggcggctgggaggtggaggttgtagcgatccgagatcacgccactgcactccagcctgggcaacattgagcactgagtgagcgagactccgtctgcaatcctggcacctcgggaggccgaggctggcagaccactggcggtcaggagctggagaccagcccggccaacacggcaaaaccccgtctccaccaaaaaatatgaaaaccagtcaggtgtggcggcgcgcgcctgcaatcccaggcactcggcaggctgaggcaggagaatcaggcagggaggctgcagtgagccaagatggcggcagtactgtccagcctcagctcggcatcagagggagaccgtgcaaaggggagacgaggac

SEQ ID NO: 40854 - DNA, 1458 bp, Artificial sequence
  DNA replication origin
cggccgggcagaggctgcaatctcggcactttgggaggccaaggcaggcggctgggaggtggaggttgtagcgatccgagatcacgccactgcactccagcctgggcaacattgagcactgagtgagcgagactccgtctgcaatcctggcacctcgggaggccgaggctggcagaccactggcggtcaggagctggagaccagcccggccaacacggcaaaaccccgtctccaccaaaaaatatgaaaaccagtcaggtgtggcggcgcgcgcctgcaatcccaggcactcggcaggctgaggcaggagaatcaggcagggaggctgcagtgagccaagatggcggcagtactgtccagcctcagctcggcatcagagggagaccgtgcaaaggggagacgaggaccgtgcaaaggggagagggagggggagggggagggagagcaatttttaattttttaagatttttttttttttttaaaaagaaacacacataggttgggtacttaggattgattgttgagctggaataatgaggaaagatagtaatgtggccctcaaaagtgggttttatcctaagatgaagagagcacatgtaatatgaagaagaggaaggtcagagagaaggtcttggagccgaggccagcgcacgaaactggtgccaccagcatccagctacccttctgggacattatgtaaaatgatgtaactgagtgaaaaagtggtgagctggcctcctctctctgctcaagtcactgagctggtatcgtggtgagggatactcatgaggccagagctctgagtccaccgtgtgaaggcaggaagctttctgggtctgagaaggctgtaacttttttggtccttgtcttctcatactctggaagctgacatcagggtgaccttctggtgttccagtggtaagtcctaaatttgtgaaggggccgcttgttttggaggtaacagtaggttaagatgacctggagaggcacagtctaagagctggagggggccacccaggacaccagggagtccagtgcctcattttacagatgagaaaattatgatcagtagagggaaagggaggttcccagaaccacctagcaagctagaggctgagtccagtatccaggcctccacttctctgactgtggtagccagcgaacatttcctacttggaatttctgaggtgatgagggtggccagataaggctcctgacagattgttaatgtgcatccagaattcctgggtatcccttggtgttggttttatcctctttcttgttcaactcctggctgggttctttgacttggaggtggtggtcaacagtggtctgtttataccagcatttagtggccagtttagtatgtagtggtacggtgcaaacagggtgtccatgagtcccagtctcagccccacattagtcagctagccaaggtaactgcagtttcctaaagaa

SEQ ID NO: 40855 - DNA, 1335 bp, Artificial sequence
  DNA replication origin
ggagagaaggaaatgtgtgccggggctggcaccgggaacgcggccgccgcccgccagccccggggccgtcccccggaggacacttacccgacacgggggccgaggccagcccgctctgcgcgtccagccagttgaggcagcggaggcccggcgcgggggaggtctggtcctcccggtacaggtggccgttgtcccagaaacagcctgtgaggaaaagaagcccccggacacagaatagcgggcagcgaacggaagacgcccagcgtggcggacaggggagccgggaccacccgggctgaacctcagcctggttaggggaccccgggccctgctgggcctccctctcctctcgtggcaacacccccacgccccacgcaccccccccccccaactccacgcacacctcagggtgtgaagcccccagcctgtgcctgtcccccagtcaacgctcagagactgttaggttttatttatttttgaaacctggaaagcgctgcagaagtgcaaagcgttgttactcttgaacttgtgaccactttggaggaggagatggagaggaggaggcctggcttagggtccctttgaggagctgggagttttgggacggggggcgcccagacgtgacatttgtccctgtgttgtaatggccacgttacataaactccggtgtttcctccttcacggatacggccaccttctgcccgtttaaaaggcaaatactccctcccaggagaattctccaggagccttgactccgtcaggcaaaagattcaagacagcctcaaacggaggaaaccggcctcatcgctgactggatgagactccaagctcccactcccctctgcaggagaaccacagaaggaggctggggaaggaggaccacaccatgcaaagggcttagaaagaacaggacttggggagtaggggagatgaacccccaagctccatccactcatgagcaaggaaaggcagagagaaagtggcttcttgcctttgttcttaatggcaaagatggagctgcaagcccctgacaaggaaaggaggggtggaaaagctttcacgggacaacagaaaccggctaaacgcttcgtttcctgtcatcctggccctgtttgggaaatagggggctttaccccttctgtttcatgaagttgctgcggaaaggaaagattgtaatctcacctccagatccataggcttctgctaggagcatgttgctgacgaggaatgcttgtacccaggccaacagcatccttgcctccttcgtcttgcaggtgattgaacgaccagtgtttaaccgaggcccccttggcggcggctctgcctcccagtccc

SEQ ID NO: 40856 - DNA, 1891 bp, Artificial sequence
  DNA replication origin
tgcaagaggaagtgcagccgctgccatctttcctccgctccgaacacacggagcccggggccgcacagccgccgctccgccgccgccttctcccggcctgaggaagggcctactctgccgccgccgccgcccgcccgctccagccgccgccgccgccgccaccgccctccaggctccgggacccggcccgcgccaccgcccccgtgcgcgccccgccgccgccgccttcgccttcgccttttgtttcctccgctccggcgcccccgccccggctcgcgctttgcaggggacgcagcgcgcgcccccagcgggcccgggaaaagccgcggcgcgcgcgcgcgcctgcgcggcggacccctccttctcctccccgcgtgcgcgtgcccttcttggctgcgcgccggcgccgcctggcgggcgggaggggaggtggcaggcgcgtttgcaggaggggcgcacctcttcgctcgcgcacccccccggaaggtagaccgggaaggggaggcgggcgggcggagaggagagagtggcgcgcagtccagcgagggcgggggttggctatgtggggggtggtgcaccccgcagtctagacagtctgatccgggctgggggcgtgtacactcggcgcacctgcgagactacagagcctcgggccggcacgtgtggggagtgtggacacgtctgctgcgccccgcttctcgctgctgaggggaagggagggggcgggcaggtgcagcggccgggctagtgggagggggcggcggccatggagcgggtgaacgacgcttcgtgcggcccgtctggctgctacacataccaggtgagcagacacagcacggagatgctgcacaacctgaaccagcagcgcaaaaacggcgggcgcttctgcgacgtgctcttgcgggtaggcgacgagagcttcccagcgcaccgcgccgtgctggccgcctgcagcgagtactttgagtcggtgttcagcgcccagttgggcgacggcggagctgcggacgggggtccggctgatgtagggggcgcgacggcagcaccaggcggcggggccgggggcagccgggagctggagatgcacactatcagctccaaggtatttggggacattctggacttcgcctacacttcccgcatcgtggtgcgcttggagagctttcccgaactcatgacggccgccaagttcctgctgatgaggtcggttatcgagatctgccaggaagtcatcaaacagtccaacgtacagatcctggtaccccctgcccgcgccgatataatgctctttcgcccccctgggacctcggacttgggcttccctttggacatgaccaacggggcagccttggcagccaacagcaatggcatcgccggcagcatgcagccagaggaggaggcagctcgggcggctggtgcagccattgcaggccaagcctctttgcctgtgttacctggggtggaccgcttgcccatggtggctggacccctatccccccaactgctgacttccccattccccagtgtggcatccagtgcccctcccctgactggcaagcgaggccggggccgcccaaggaaggccaacctgctggactcaatgtttgggtccccagggggcctgagggaggcaggcatccttccatgcggtctatgtggtaaggtgttcactgatgccaaccggctccggcagcacgaggcccagcacggtgtcaccagcctccagctgggctacatcgaccttcctcctccgaggctgggtgagaatgggctacccatctctgaagaccccgacggcccccgaaagaggagccggaccaggaagcaggtggcttgtgagatctgcggcaagatcttccgtgatgtgtatcatcttaaccggcacaagctg

SEQ ID NO: 40857 - DNA, 1014 bp, Artificial sequence
  DNA replication origin
gagtcggggacaccctcaggcctctccaagcccggagcatccccagcgcccgcagccctgtgagacgccgggtgctctggtaatgggccctgccgccaggcctcggcgctttgtccccggcccgcccggggatgctaccacgctagagttgtacaccaaggtttgtcttcccaggaagcgctggcggctgcctttgggccgcctggcgcggagccccaggctgcaggcgccgcgtgtgcgggcgggaagttcccacagttgcaaagaggcagcgaagtatgtgttccaaactttccacggttccaaactgagcgcttccattaagagaagcggtgtgcgggggaaaagcattctgggtattagcatgcaaatgaacgggcccggcttccaactccgctcgggattcccaccgctgcgcgccgagctcgcgcccagccacgcgcgccctgaggcttccgggcgttgccctggcggatgatccgagttcaaaatcgagacctctgccttctggtttcgtgtcctggtgcttagtcacttggcctccctgagattcagttaaactgtttcttaacctgtgcacagggacagcagcacctgtcctgcacacctccgctctagggcatagtacatgccaaactcctgttggagagaatgaattagaggcatgaagaaagttccctggacacgaagccaggagatctgtgttctaagcccagactcactgtcaccttaggctagtgcctccctctctgagccacagctttcttgggcggattttgggaactggcacgttttatttttgagagagctgctgggaacatccacagagaaagagaaaggggccgggcgcggtggctcacgcctgttatcccagcactttgggaggctgaggcgggcggatcacctgaggtcgggagttcgagaccagtctgaccaacacggagaaaccccatctctactaaaaatacaaaactaggccgggcgcagtggctcatgcctgtaatcccagcactt

SEQ ID NO: 40858 - DNA, 1223 bp, Artificial sequence
  DNA replication origin
gccgctcggcggccctttgcctcggccgccgctcccctccccgctgcccgcaccggtcccagcgccgctccccgcagccttcgctctcgcgcccccaccccgaccggcttgggctgtctctcttcagccgccgtaactgcagcccggccctccgcccctcctcttcggccccctcccccttaataactccctccacgcaccctggccccggcgccgccttccccgccgcgcgcccggatgtgaggtggctgcagcggtgccgggcgaaaaagaagcatcgccgcgcgcttcccggacgccagcccctgcgcgggccggggggtgggaaggtggtggcggcgaggaggaggccacggtggggatagcggaaacccgctcccgtgcgcgcaggcggtcgccgtgggcagcccagaggccaccgccgccgcgttcccacgcgcgctgcagggcagagcggacggcacttgggacccgcgactcgcggcacgccactctcccggaggcggtggctagatggggctgggctggcggctagcacggcctgtggcgcgacgaccgctgtatttgcatggttcgcataggcagagaaccgtggggcttcggcagtgggaatttgagataggagattggggtcttccgagccttcccagtgcgggttcgaacctcagctgttttgcgagtggcgtgatcttaggcaaagctgacttaacctaagtttcggtcgtgtttctaaaatggcctctgtaaatctatgaggcttatgcgcgagtactggttgctgcattaaaagacaaacttgtcacgattggctttgatagcgataaaggcgactaacaaattcattgaaatgttgtttccctccggtaacctgaatctgtccttagcctgcacagaaaggggaagtgcgagtggagttggggaaatgagacggcgaatgtcaagtgcttaccacgtagtgcagactcaggctgacagggggccacagaaatgcaaatatgtgagcagtgtgggtaactgcatcctggggaggaagtcctatgtgctggaataccacaagcacccatttctgccctgtggtactgcgcagcgttggtgtgaagcgatacataggcgtgaagtcccgagaacgcaattttcctggttaaaggacagcaacgtctacatttcttccaagaggcctactttgttggaacttcacttcacttgtgaaattagggtgttgg

SEQ ID NO: 40859 - DNA, 918 bp, Artificial sequence
  DNA replication origin
cagccgccccgtccgggagggaggtgggggggtcagccccctgcccggccagccgccccgtctgggagggaggtggggggggtcagcccccctgcccggccagccaccccgtctgggaggtgaggggcgcctctgcccggccgcccctactgggaagtgaggagcccctctgcccggccagccgccccgtccgggagggaggtggggggggtcagcccccccgcccagccagccgccccgtccgggaggtgaggggcgcctctgcccggccacccctactgggaagtgaggagcccctctgcccagccagccgccccgtccgggagggaggtggggggttcagccccccgcccggccagccgccccgtccgggagggaggtggggggggtcagcccccctgcccggccagccgccccgtccgggaggtgaggggcgcctctgcccggccacccctactgggaagtgaggagcccctctgcccggccaccaccccgtctgggaggtgtgcccaatagctcattgagaacgggccaggatgacaatggcggctttgtggaatggaagggcgggaaaggtggggaaaagattgagaggtcggatggttgccgtgtctgtgtggaagggagtagacatgggagacttttcattttgttctgcactaagaaaaattcctctgccttgggatcctgttgatctgtgaccttacccccaaccctgtgctctctgaaacatgtgctgtgtccactcagagttaaatggatcaagggcggtgcaagatgtgctttgttaaacagatgcttgaaggcagcatgctcattaagagtcatcaccactccctaatctcaagtaaccagggacacaaacactgcggaaggccgcagggtcctctgcctaagaaaaccagagacctttgttca

SEQ ID NO: 40860 - DNA, 1917 bp, Artificial sequence
  DNA replication origin
atggggcggctggttgggcagaggggctcctcacttcccagtaggggcggccgggcagaggcgcccctcacctcccagacggggcggctggccggggggagggctgacccccccacctccctcccggacggggcggctggccaggcgggggggctgacccccccatctccctcccggacgggctggctggccgggctgaggggctcctcacttcccagtaggggcggccgggcagaggcgcccctcacctcccggacggggcggctggccgggcggggggctgacccccccacctccctcccggacggcacggctggccaggtggggggctgacccccccacctccctcccggacggcacggctggccgggcgggggggctgaccccccacctccctcccggatggggcggctggccgggcggggggctgacccccccccacctccttcccggacggggtggctgccgggcggagacgctcctcacctcccagatggggcggctgccgggcggaggggctcctcacttctcagacggggtggttgccaggcagagggtctcctcacttctcagacggggcggccgggcagagacgctcctcacctcccagacggggtctcggccgggcagaggcgctcctcacatcccagatgggacggcggggcagaggcgctccccacatctcagacgatgggcggccgggcagagacgctcctcacttcctagatgtgatggcggctgggaagaggcgctcctcacttcctagatgggatggcggccgggtggagacgctcctcactttccagactgggcagccaggcagaggggctcctcacatcccagacgatgggcggccaggcagagacactcctcacttcccagacggggtggcggccgggcagaggctgcaatctcggcactttgggaggccaaggcaggcggctgggaggtgtaggttgtagtgagccgagatcacgccactgcactccagcctgggcaccattgagcactgagtgaacgagactccgtctgcaatcctggcacctcgggaggccgaggttggtggatcactcgcggttaggggctggagaccggcccggccaacacagcgaaaccccgtctccaccaaaaccagtcaggcgtggcggcgcgtgcctgcaatcgcaggcattcggcagactgaggcaggagaatcaggcagggaggttgcagtgagccgagatggcagcagtacagtccagcttcggctccgcatgagagggagaccatggggagacggagacgagggagagggagagggacagggagagggagagggagagggaggtgtccatctttatttcaagggctttcaaaacagcctgtttgtaaccttcattattagccactgagagctccattaaagcagcccattagctttctggatcagagcacggtgggaccttgcctcaccttggcagacattcttaagtgtcatttccccgaaacacttagttcctgttctgctagacctggctttttgaagtcttgaaatgatagtcatcaacaaaattacaaaggtcgggccgggtgcagtggctcacacctgtaatcccagcactttgggaggccggagcgggcggatcacaaggtcaagagttcaagaccagcctggccaacatggtgaaaccctctctttactaaagatacaaaaattagcccggtctggtggcacatgcctgtaatcccagctactcgggaggctgaggcaggagaattgcttgaacttgggagatggaggttgccgtgagctgagatcgcatcattgcactccagcctgggtgacagggcgagacgccgtctcaaaaaaaaaaaaaaagaaaagaaaaaggccgggcctggtggctcatgtctgtaatcccagcactttgggagtcc

SEQ ID NO: 40861 - DNA, 1121 bp, Artificial sequence
  DNA replication origin
gggccagtcacctgcaacatgagaactcagagggctttgtggctgatgacaacctggtcactgcaatcctggctgccttcctctacctctgccctgagagcagggaaaggcattggcaagtcacaggtagtctctaagtcttggtttgtacatctggaaaatgggaaaggaaattcctcctggccacccccttgaggctcagagcacagctgcaaccatggcccagaacaactgctcagaaaccccacttccacctaggagcgcgacgcagcctcagacctggcttccaacacctcacctctctttccaaaaagtcaacctcacactccggtgggggcaggggtttccaccacaggaaagatgaaataagaggggcttaggtggcagttctaaaacaggaacccaaacttgcgcggagtgaccggccctgtgaataggaaacaatggctgataggaccgtatagggggtaggggaacacctttgtcaggacatgctgttttggggatccataccagagcagtaaggcagtgtccccacccgtccctcaccaaccagggtaaagaccacaacacctgcccccccagtggaatggaacattccaactgaagtcgatgaatgaccccaggccaggcagcagttactacaggttgggttggggcctgcaagattgttgtgcgtgaggggtaggtgcatgtaggtggaagtgtgtgtgcatggaggatacgtgtgcaggtgcaagggtatgtgcatggaggggtgcgtgtataggtgcgaggatgtgtggggtgtgtaggtgtgagggtgtgtgtagggggtgtgtaggtgtgagtgtgttatgcgtataggtggtgtgtgcgtaggtgtgaggttatgtgcctggagggggtgtgcacaggtgcaaggtgtgtgcatgtaggaggcatgtgcgtaggtgtgagggtgggcgcatataggggtgtgtatgtaggtgcgagggtgtgtgtaggtgagggggtgtgtgcctgtagggggcgcgtgcgtgtatgggtgtgtaggtgcaaggggtgtgtgtaggtgagggggtgtgtgtaggtagggggtgtgtgcatgagggtgtgtgtaggtgcaggggtgtgtgtgt

SEQ ID NO: 40862 - DNA, 900 bp, Artificial sequence
  DNA replication origin
aaaaagaggtctcactatgttgtccaggctggtctcaaactcctgagcttaagtgatcctcccaccttggcctcccaaagtgctaggatcacaggcatgagccttcatgccttagttgctttagaaacaaagatctcagtggtgagaagccgctggaattgtatcctgttcagtggctcagaatgaggagactgagacttctagggccaactcaccattgaatagggaatgggcgtgctcagttgctcccacagatgtgaacaaggctacttaatgccacaccttttctttggttgaatggtgatccctctcagacccttcccctcccctaaaagcattaagctgattggtctgatcccatgtgggctgagtgcttgtcggatgcctggcaccatgtgggtacggggtggactgccaagccgcagactagggccctccgatctagcggggtgggaagacagcatgcatcatccatcccatgggctctgcatcctagtagtgaagcagggaggcctgtgtgctctaggctggggcggtcggaccttgtttctggctgcccttgttcgctggtctacatcagttttggagtcagggcattctgtttgtcagggttttgcgtgcctggagggcagaaggttggggtgggagcagccttgtagcttcaagatgggatgcgggaaggatcaaggatttcgcattctctggagcttcctagggctagcaggggtggctttctgttcagtccagtgaagaagctggtcctcagtgaggtcagcagcacgtggggtcctgagtctgcctagtgttgggtcgcgggtggtggaggggaggcagctgctttgggaggccagccacgggctgcagacaggcggctcacagaccagcggacagactgaggac

SEQ ID NO: 40863 - DNA, 1666 bp, Artificial sequence
  DNA replication origin
aagtcctcccagaaactctcgttggcgcctcttagctgcccaatgaggccacatgagtcattaacctcgttcatataacagaaaacggagctctgacggatctcgtttcccctgtggggagatcactgagtcggaaacgaagctctgtggccatggatctacttcggatagactaggaggaaatggatttcctccgtggggcgggaggctctagtgctcgagggcaggaaacgccaggaggtggcccaaggaagaggccgcacacgacgccccgcccccggctcgagccccggatgaggaagtggtgcggccaccgagacgagacggaggcccggcgagagcggcgcgggggcgcgagggcgggaaggaggcggggccccggggcggagccaccggagcggcgcgggttctcaggtgagcgctacacggtcggggcgggcctagtaggcgcttcaggcttaggggcggaacagcgcgggccgcgcgggcgtaggcggggtatctggaggaggcgcagggaacctggagagggtccagccctcagtgccccggccagaggcgggaaggggctctagagcttcggtgagtggagctgcccgccccggactggggattgggggggcttgagataggggaccttggcccaggttcgagttccaggctccatccccattccgctgtgtgaccttggacaagtctctctccctctctgagcctcaacggcctcagctgtgaaacggagtcagggaaggtctgctgagagttcgcacagaccgaggtttggggaaggaacttctgccttcctcctctttgtggttgccttgctcaggacattggcagcaaaacgagaatggtgggagtgtctcttaagtctcgagtgaccttgagcaagtcccttgcccggagtcacactttcatcatctacaaaatgagtgggctaacctcttttaagatctctttactatttgggtgttattggtgtagatggagacaaggtgatgagcacccattcagcgcaatgcttcccctatgggggtgtgatagaatatcttctcctaggtttgactagcccctggcccgaattccccttagttcctggattctgtggttctatttgttctccatcgctccttgtaactggaggagtgacttcttccgagagtcacttggcaccacttcacagcagaggaacaccagtatcttcactggcctaaaatcaaagagtggttgcaaggaaaaatctgacattccaaccttttcgtttgtatttctgtggcagggaggcaagatgacttctctgccccaagcttggaacagctaaagggaaaaacagtgcaagatgagaacaacaaaggtctacaaactcgtcatccacaagaagggctttgggggcagtggtcagtatcgattggtctttagaggttttgtaagttggctgaggttctggtgtgtgcaatacctagaaattacacactgactcgtgtgacaattgaggctaaacaggcgactaaacagactaaagcagcaactgtcatacagtaacaataggaggatggcaggacccttctaatgcatttgcattcagacttttaaggaacattgtgaatgctgccggtttactacccttcatttgttgaattgcattattaattacaaatcttccgtg

SEQ ID NO: 40864 - DNA, 1134 bp, Artificial sequence
  DNA replication origin
gctttaggtgtggaaggtggggggtttaggtgtggaaggtgagggagtttacgtgtataagggggggtttaggtgtggaaggtggggggagggtaggtgtggaagatggggggagggtaggtgtggaaggtggaagggtttaggtgaggaaggtgggggagtttaggtgtggaaggtgagggggtttaggtgtggaaggtggggggtttaggtgtggaaagttgggggggttaggtgtggaaggtagggggatttaggtgtggaaggtgggggggtttaggtgtggaaggtggggggaataggtgtggaaggcgggggtttacgtgtggaaggtggagggggtttacgtgtggaaggtgggggggtttaggtgtggaacgtaggggggtttaggtgtggaaggtggaggggggttaggtgtggaaggtggaggggggttaggtgtggaaggtggaggggggttaggtgtggaacgtagaggtacagaaggtgggggtttaggtgtggaaggttgggggtttaggtaaggagcacactgcagcacactggtacaatgatgcagaggactggtcagaaaacaggtgagggtatctgtggtagaaaaagctggctgaggaggaaagtacaatagttcctgggaagatagaccaggatctggactgagggggatcaggaggaggatgcagtgaaggaaaaaagcagatttaacaaataaaggccacgttctgagtgacatcctgccagcagggcaagcagggtaagagctacttagaaactcgtgagttagcagggtcccccctggtgactgctgtctactgagggctcactaggtgcatcaccgggctctccagaacatcagagaaccctcccagcttccccgtgaggggtaagaaaatggaggctcaccagttccagaattgctcatggttcctcagccagatgctggtggaggtgggagtggataaggcctgtctacttcgtacatcaaggccctttcccattgactgctgcactctctaccttctgccctgaatctgcaccacccactgttagtggaaggaggaaatcagccacccttgccttcattccacagtctttgctaagcacctgagctaggtctgtgaaggggtagac

SEQ ID NO: 40865 - DNA, 2123 bp, Artificial sequence
  DNA replication origin
tccgcctgctcggccagccgcgcccgctgcagcagctgctcccggtcccccatgtcgctcgcggctcggcctcgcctcgcgcctcacaccgctggctcgctagccctcccgccggtcagtccgctccccggtcgctgcggaggccgccgccgcgcacgcgcactggctcgccggccggccggaggctgcaggctgcaggctgcaggcagcgccgccgctcgcgccctctcgctggctcgccccgcgcgctgtggctcgcgccgcggacaacgccgagggaggagacgcggccgcgctgggggatgggaggacgggacgacgcctgcgcagtgagagtggccaggccgggcggcggggagcggcgggagtgggaggggggaagggcgggccggccctaacggtctatttcaaggtgacgtcacctactataaatagccaccgccgccgccgccgcccggcctgaaagccgcgcaggcgctctgcgagtgctgcattttaccgccgcagagatggaggtggagaagggaaagccgggcaggagactgcggagccggtggagggggcgcggtgatggcggctgcacaggcagtgcattgtcatagccccaccctgaaacgcgccactccatccacgttagagatctggcttgagaagggccccaaaagcaagcaaacatactggcggagaagccgggagaccgcgtgccccgaggggcgggtccgcccagccccgccccagccgtcccgcccgccccgagccctgcctgtccatgcgttctgctgggccacaccttgtactggtccgggcaggatcgagtccgaccctcggggacagccccgctacacagacacacacaatcgaacccaacctgagacgtagccttgggcaggctgtgccttccaccagaggaggggactgggtggccagggcgggacaagtaatattcaggacacattaggagccagcccagtgctagtcccgtacaagcatcctcctctttaatcctcactacccagcccacagtgggcacagctggtctccccatatttaaaacgtggaacctgaggaaaagcgaggttagtgacttgctcagggttacgcagcctgtaagtggtggggccaggatctgagtccaaacccaggctgaactttctcttgtggcaaagagctggggtggcccaactggctggtcactgagcccctcccaatcctggctggtattggatgctgagggtcccttgtgccaggccctggactgggctgcccgacaagctaggaaaatgatgattaaaacaaggcccccacttgatttcaacacgccaagggcagtgcaggagagggggccttgggctcgctgagaattttattgagcatctactgcatgctcagcccacagggataagctggatcttgaaggagagtcaggaaaaagattaaggcctggggtacagcattggcaaaggcttggcagtgacctgggagatggtgagaagagaggcctaagaatgggaagtgaggttgggtaaaacaagattacggagtcttttaaatgccaggccaaagatttgaggcttcatccttaggtaattgggaagccatatttcaggcctggaatcttgctctagagagtaagacatgttcgaagggagaagggagggaactggagaccaggccttttctggacctgttttccatctggagaattggacttaactgtttcaaggactttagaatagatatccacatgctgaaatgtcagagctggcaggacccttagaatcacccctgtctaaccccttatcctgaataacgggaaactgaggtctgagggaaaggaggggctggccctagtttgcacagcgagtgagcagagctggggtctccataccaggtttcctgcctcccaggccttcctcttcctgctatgatgctgaaacgatcacacttctgggggcccatgaaacaggatttgaatgtgggtctaggaggaggccactaccccaggcttcaccatgctttgaagagtcacttttgctgttggaatcgaggttaacaaaccaggctaatctttcccctagtgaatatatttaaagagcatgctagatagtaatgaatcatccact

SEQ ID NO: 40866 - DNA, 1270 bp, Artificial sequence
  DNA replication origin
gcggcggcgctgcctgcagcctgcagcctgcagcctccggccggccggcgagccagtgcgcgtgcgcggcggcggcctccgcagcgaccggggagcggactgaccggcgggagggctagcgagccagcggtgtgaggcgcgaggcgaggccgagccgcgagcgacatgggggaccgggagcagctgctgcagcgggcgcggctggccgagcaggcggagcgctacgacgacatggcctccgctatgaaggcggtgagcgcgccgggagcccgggcggctggccggggggggcctggcgttggggagggacggggatggccgcgggcgcgttcccctcccggccatgggcgacccggcgacccggctgggcgtggccgcccgcccgcccttagcccgcgcttcccgctcccgctgggcgccccgccacttcctgaggctgggcccagggtgggggatccgggagggtgcagttcgggatcgcgaaggcagccccggaaggggggcgggccggtcggggtcgccacatcttagttcggaacccggccgggggcagagggtgccctaggggacgcgaaggagccgcatttctcctagagcgtttcaccggacccgggggctccccctctcgtcttcctccgttccccaacttggaataaagaatcacctagtaagtggcgccctgtctcagctggttttctctgccacgacctgaagtctgcaattccgatctgttttgctctgctcgttcgaattgttctggttccatcttcccacgcctgggggtctggctttgtgtgcgaagacccctttcctgcagtctaggcgtggacgggggcgggagagtgggcggagggtgtggggccccactccacagccccaggtttgctgctgcgctgtctgcttggagattaaaatgaaacgtgacttctaggtgagacgaatctgtgtgtctttgcattcctgagaccctcataaatcgattctgcagcttctccggtggatgagtcgtgcccagccacaccctagcaaaataccgtgggtcacacaccacctgcatttctgagttccggttaccatctcactctctctccacgttattttacgttttctgtaaatgaatatttcctctccctgcgtcaaggtcacacagtggtagaacaactgcgaccaccaacctatgttcagtgtacaacctcctgagacctgggaggatccccttgaactccgccttagacctatacattcagaaattcgggcggtgagactcaga

SEQ ID NO: 40867 - DNA, 1758 bp, Artificial sequence
  DNA replication origin
gactacatgttctgattggacaagagaaacctctaggcctagtctgattggactttgttatcatgttctgattggttatcctaagacttcctctcatccagtcacaacacgaaaataaagcccaatcatagtagacctagagatttttctctcatccaatcagaacatgtagtccaggaacctaatttgcataacctttgtaagcgagagtcttgccattccaggttcttctacgtctgcccgcccatctgttccgaccccagattagagaaggagttgtcaccggtggcatgctggaggcttgagcctgcagcagcatggctcgcctcactgtggctggtggcagtgaggtagagtacagcacagccaaagtggtagaaaggtggcagagtaggtgagctatccagggacttgtggcggggggagaggggcagtgagctcaggggccaaggattggatgcactatcgtgaactacactgcccaaggtgagggggggattgggggcgccatcttgtgtggggggtgtgttaggggcagtactgggtgttgcactgcccacggtggggaatggttgggtgttatcccaggcatcatttcctgcagcagtggtggggtgggggcttgttgggggcctatctgtggctgcattggtcacacgaggctcgagttggggtgctgtctgggacatcagtgcccatggtggggaactccttgggtgtgatatctgaggtgtcactgcccatggctgggggctggtttggggcgctatctatggactacactgcccacagccaggaacgtgttgggggcattatcgggagtggactgccagtggcaggggtggagggacgggttgggtgctattggggggctgcactgcccagcagggagtgtgtcgggtgcactatccggggttgcagtgccggcagtgggtggcagattgggtgcactatcaggggctacactgtcgcgtcaagtgaggggttggcggcgctatcctgggctacaccgccagtgatggggggcatgttagggtcgctatctggtgctgcactctcggcaacggggtgggtggcggttgggcgacctacccgggcgtcactgcccaaggctagggtctgcttgggggcgctatcccgggagtcacttcccatggcgggaggctggttgggggcactttccgtggctgcactgccaacatcagggagcagtttgggggcattaacctgggctgcactgccaatggcagggggcaggttgtgggcaccatcgggtgctgcagtatcctagatggggatgagttatggggcattatcaggggctgcactgccagtggtgggtggtggacacgtcagtgacagcggtggtctccaagagaggagcggtcctcctctccccggactccagactctagacggccacctcctcctgtttgtgctgaagtgtggcgggcgcacagtgtttccgcgggaatactgagcatggcaggggccctagacccactgtgcttcctggatccacgtcttcttactctgtttagcagagaccacctgggatccccaggcatacagtagctgataccatggggcaacagggccctttgggtggaggtgtcaggaacgggaactggcacttcagtggggaaggctggctggggttgagtttctgctgctcctgctccccaaggagtacaacccggctgagcccagcggttcctgtggagtgggaagcctgggtaccatggtgtctccagtccc

SEQ ID NO: 40868 - DNA, 2648 bp, Artificial sequence
  DNA replication origin
actacatgttctgattggatgagagaaaaatctctaggtctactatgattgggctttattttcgtgttgtgactggatgagaggaagtcttaggataaccaatcagaacatgataacaaagtccaatcagactaggcctagaggtttctcttgtccaatcagaacatgtagtccaggaacttcatttgcatcaactccacatataaaggatgccaagtgaggcggctcctcattctaggctcttcagtgtccactggtgtagctgctccattccaggcttacaggagaaggaggaggaggcacttgccacgcacgctggagactcgagcctgccttggctccccttgctgctgtggttggtggtggcaaggaagacgacagtgcagccaggatggtaaaaaggtggtgggataggttcgctatcccaggaggtactgcctgaggcatggggggtgggttggggtccctatccagggcgtcactgcccgtgttgaggggctggttgggtgtgctatctggggcatcactgcctgtggaggggagtgggttggggccctatctggggtgtgctgcccgtggctgggggtgggttggggcactatcccaatctgtactgctagcggcagtgggtggttttggggggcactatctggggatgcactgcctgcggccagggggtgagttgggagaactatcgggtgctgcaatgcccttgttgggcacaggttgggggcgctattgggtgctactctgcctgtggtgggtgggacatgtggtatctggggcatcattgcctgcgtctgggagctggttgggggcactatccatggctgcacagcctacagcagggagtgggttgagcgcacaatctggggctgcaatgttggtggtgggggacgggttagggtcactatagggtgctacactattggcggcagggaggggggtgttgaggttgctatcgggggctacactgaggcagaagtagcggggtttattgggagtgctaccagggaccagaatgcccgtggagagggggtggggggttggttgggggtgctactgaggatacactgcccatggtgggtggaggggggtgggctgggtgctatcagagatctgtactgcctgtcagggagccagtgagtatgctatctggggccacgttggctcagggggcgggggcaggttgggtgcactattggggactacactgccagcggcagggcgtgggttgggtgcgttatccatggctgcactgccagaggcagggagtgcatggggggcgctatcctgggctgctactcccggtgggagcagattggagcgctatctggggttgcactgcttgcagtggggggtagtttgggtgccatattggggcgtcactgccagtggcggtggtctggttggggccgctattcatggctacaccgtctatggcatggagcggattgaggttgctaccctgggctgcagtgcccgtggctgggggcaagttgcaggtgccagcaggtgcttcagtgtccgaggcaggggcaggttgggggcgctatcaggtgctggtgatggggggcagggtgttgggggcgctatcggggggctgcactgtcaccctggcagcaggcagcagaggtgtcagtgacagcagtggtcagaggagcagtcctcctctccctgactcaggctccagagggccatctcctcctgctcgagtttctgggggaatcctgagcagggcccagcccccagccccgagatggttcccaggcctgcgccctcttgctacgtgttgcagagaccacctgggacccccgcacatagagtagcggataccacggggtgaccaggccctgtgggtggaggcgtcaggaatgggaaccggcacttgggtggggagggctggctggggttgagtttctgctgctcctgcttcccaggaaatgcagccagggtgggcccagcagttcctatggagtaggaagcctggacgctgtggtgtctccagtccccaccccagggcccagtcactggccagcttgggccaaaaggagaggctggactttagagggtgggtgtgagtgtcttcactgaaactgacacctgccacccagtggccagcatggcaaggtgaggctctaatgctaccactctctgcatcccgttctaggcttttctggctttgcctgcccagttgctccgcgcgaagaggagggactacctgctgcttgctggaggctagagcctgcgacactgtggctcgcctcgctgtggttggtggcagcgatggggactgcagagtgccaaagcggtaggagagcagtgatggagactgcagagcgacagagcggtaggagggtggctggctgctgtcagggcacaggtagggctgcagtggtggccaggtgttaggagcctcataggatgggctggtgcattgagggtaacatcagtggtggttgtattggcatcagcgctagtggtggcagcagcagcaagtctggggcccaggaaggcaggtgggagcactgtgggactggctcgcctgtcccagcctggcctggggtgggtaggaagctgtgggcctctgtggcaggaatggaggcatagccaggggaaggaggagtcttccccacttctgcagaatc

SEQ ID NO: 40869 - DNA, 1241 bp, Artificial sequence
  DNA replication origin
ggggcgtcttcggtgaccctctggactcggtcaggggctggtgggcgccagagcagaacaggagagcggaggctgcagatgcctctgggacgccctcgtggaacgttcgcctgcccagaccttcccctccaaaccaccgtgcaggtgctacaggcagcgcttggcggagcggcggcggcggcggccactgcgtgtgtcagtgcgcggtcgcggttcccagatggctgttcccgggcgctgcggtgcctggaggtcagctgtcggcgggcagcggcagccggagcggctgagggccgggggcgtatgtgtgcgtgtgctgggaaggtggccctccccgcggccgtcacagcgccagcgcctccccctccccgggcgcgcagggctagtccccgttgctggaggcatcccgagccgccgctgagcagcctcgccttcgcctcccgcgtttcctgccgtccgccctccccaagtcgggctccagggaacagaagaaaaaaggggtcaaaggtggcgctacaggtcctctgcacggagcagagagagagcaggaggcccaggatgtgcagatgtgccggctggagtctctgctgcaggccacaccctgcgcaggaccatgtggctgcgtggggcacaaggggaggcctgggccagactctgtggctgcagcttcaggagacactccacctgctctccgggtgcactggatgaggacagcactgtccttccctggtctaaactggaccagggctaggagaaagggcaggagccaggaggaaaaggatcatatgagcagaccaccctagagaacctctgcagccctccgcaggcctctagtcgggggtctgggcctcccctgcacgtatctcagaacaatggaccaaatctacccacataggtaaatcctcacactgggaaaattaagcctttactggacaagcagctttcagaactgacgcatgctttatggtttacgcctaagccagcagagattccgagttcagtgtgaaccttgggtcacagagtcagaaaataggagagctggacctccaccctgagatctctgactcccattgggaggcgacgtctgtgtgattcacaagcacttgagaaaatgatccaggcaggagatgaaaatgcaaaaagccatcgtgccagcacggcacacccacgtgaaagactcgtgtgccaaacatgaatggtggggttatggggtaaaacaagagatccagaatcaagtgccc

SEQ ID NO: 40870 - DNA, 1124 bp, Artificial sequence
  DNA replication origin
ctgcactgcccgcgcaggagttgggttgggtgacctactccaggcgtcactgcccgaggctgggggctgatttggggcgctatcccgggagtcatttcctgtggcgaggggctggttgagggtggtatccgtggctgcactgcccacagcacagagcgggtttggggagttatcccgggctgcgctgcccgtggcagggggcaggctgccagcgccattgggtgctgcatgtactaggcacggatgagttaggggcgccatctgggactgcactgccggtggcgggcggtggaggtgtcagtgacagcggtggtctgcaagagaggagcggtcctcctcttcccggccacctcctcctgttcttgctcaagtgcggcgggcgcacagcatttcctgagcgcggcaggggccccagccccgtggtgcttcctggacccgcctcctattgctctgtgttgcagagaccgcctgggaccccggggcacgcagtagtggacacgaggaggctacagggccctgtgggtggaggaggcatcaggaacgggaaccggcacttgggtggggagggctggctggggttgagtttctgctgctcctgcttcccgaggagtgcagccagggtggctgcagctgttcctgtggagtgggaagcccgggcactgtggtgtctgcagtccccactccaggccgcagttcctggccagcttgcgctaaaaggagaggctggactttgaagtgtgggtgtgagtaccttcgctgaaaccggcccctgccacccagtggccagcatgacaaggtgcgctctaatgttaccactctgcatcctgttctaggcttttctggctttgtctgcccggatgcccagtgccctgagaaggagctacatgccacgggctggaggctagagcctgtggcaccatgatttgcctccgatggaggtggctgaattaggcttcccagagactgcagtgtcccaatccaggatctgtctatgtgctgtattgtgtggccactgggactttgcagacatgatggtgataaggagcctgaggtgagagacaattctgggttttccgcattgctccagggtggagtctttataagggaaagaggaaggcaggagg

SEQ ID NO: 40871 - DNA, 1793 bp, Artificial sequence
  DNA replication origin
ttaatgcaaatgaagtttctcgactacatagtctgatcggatgagagaaacctctaggcctactctgatcgggctttgttatcttgttctgattggttatcctaagacttgctgtcatccagtcagaacgtgaaaataaagcacaatcagagtagacctagaggtttttctctcatccaatctgaacatgtagtccagaaaccttacttgcataacctcggtctgtggggggaggggttcttgccattccaggcacttctgcgtctgccagcccatctgctccatgcccaggttagaggaggagtcacctgtcccacgctggaggcttgaaagcctgcagcagcatggctcggctcgctgccgttggtggcggtgagggagactagaccgcagccagaatgtagaaaggtggcggggtggatgagctatccagggctcactgcctgcggcagggggcggggagggggacaggttggatgcacgatctggagctgcactgcccgaggtgggagcgggggcggattgagggcgccatcgtgggctacaacccggtggtgggaggcgtgttaggggcagtattgggtgctgcactgcctacagcacgggaaggttgggtgctttaccggacgtcatttcccgcagccgcggggtggcttgctgggggcgctatccgtggctgcactggtcgcgctggggtacgggttgggggcgctatctgggacatcagtgcgcatggcagggaacttgttggctgtgatatccgaggcgtcactgcccttggctgggggctggttgggggctctatctatgggctacactgcctacagccaggagcgtgttggggcgttatcggggcggactgccagtggcgggggtgggggtgcgggttgggtgctatcggggggcttcactgcctggcagggagtggattgggtgcgctatttggggttggactgccggcggtggttgactcggtgggaggagaggggcagagggaatgggttggatgcactatcgggagctacactgcccgaggcgagggggagatgggggcgccatcgttggctacaccgcatgtagtggggggcgtgtaaggagcagtagtgcgtgttgcattgctcatggcgggggagggttgggtgcgttatcccgggcgtcatttcccacagcggcgggggtcagtggaggggcttgttgagggcgctatccatggctgcactggtcgctgaggggcaaggattgggggcgctacctgggacatcagtgccatggtggggaacttgttgggtgtgttatccgaggcatcactccccatggctgggggctggttgggggcgctacccatgggctgcactgcccacagccaggagcgtgtatgggacattatcgggggcggactgccagtggctgggtggggaggcgggttggatgctatgtggggttgcactgcccagcagggagtgagttcggtgcgctatctggggttgcactgccggcggtgggtggcagattgggtgccctatcgctacactgccgcggcgagtaccgggttggcggcgctatcctgggctacaccgccggtggcgggaggcgttttaggggcgctatctggtgctgcactgcccgcgcaggagttgggttgggtgacctactccaggcgtcactgcccgaggctgggggctgatttggggcgctatcccgggagtcatttcctgtggcgaggggctggttgagggtggtatccgtggctgcactgcccacagcacagagcgggtttggggagttatcccggg

SEQ ID NO: 40872 - DNA, 2098 bp, Artificial sequence
  DNA replication origin
ctgactggatgacagcaagtcttaggataaccaatcagaacaagataacaaagcccgatcagagtaggcctagaggtttctctcatccgatcagactatgtagtcgagaaacttcatttgcattaaactcagtatataaaggatgccaagaggggtggcttgcccttccaggctcatctgcgtcggcctgcgtagctgctctgtgcccggcttagaggagaaggaggaggagccacttgccgcgcatgccagaggctagagtcatctaccgcgcatgctggaggctggagcctacagtggctcacctcgctgctgcggttggtggccgcgagggtgactacagcgcagccagaatggtgaaaaggtggcagaataggttcgttatcccaggccgtactgcctgtggcgtggggggcgggttgggggccctatccagggcgtcactgcccgtgttggggggctgcttgagtgtggtacctcgggcgtcactgcccgctgaggggagtggggtgggggcgctatccgggggcgctatccagcctatggctggagatgggttggggcgctatccgaagctgtaattcctgcggcagtggggagttttgggggcactatctggggatgcactgcccgcggccggggggcgggggtgagttagtagaactatcaggtgctgcaatgccctgatgcccttgttggggacaggttgtggggggctggtgggtgcaacactgctggtggcgagggtgggtgctgctatccggtgctactctgcctgtgggggacgggggcgggcgtgatatccagggcatcattgcctgcatctgggagctggttggggacactatccatggctgcactgcccacagtggggagcgggttgggggcactatttggggctgcaatgctggtggtgggggacgggttagggtcactatagggtgctacactgctggcagtggggagggggttgttgagggcgctctctgggggctacactgagacaggtagcggggggttgttgggattggtaccggggctggactgcccatggagagggggtgggggcgttggttgggggcgctattgagggccgggtacactgcctgcggtggaggggtgggttgggtgctatcaggggtctgtactgcctagcagggagcgggtgggtgtgctatctggggctgcactggctgcagcaggggcaggttgggtgcactatagggggctacactgcccttggcagggggtggtttaggtgagctgtctgtggccgcactgcccgaggtggggagtaagtttgggtgctatctgtggctgcactgcctggaggcaggaagtgggttgagggtgctatcctgggctgcttctcctggtggggagcaggtaggggcactatccagggttgcactgcccggggtagggggcgatttgggtgccatatcggggcatcactgcccacggcaggggtctggttggggtcgctacccatggctacactgtctacagccactgcctacggcagggagcgggttgggggcgctatcccgggctgcgctgcccaaggcagggggtgggttgcgggtgccattggtgctgcagtgtccgaggcaggggcgggttggggttgccatctggtgctacactgccagctgtgggggagggtcgggggcgctatcgggggctgcaccgtccccctggtggtgggcagcggaggtgtcagtgacagcggtggtcagaggaggtgagagggactccagtctctagagggccatctccttctgctcctggccagcacacagcatttctgcggggatcctgagcacggcccggcccctagacctgctgtggttcccaggcgcgcgccctctcaccatgtgttgctgagaccgtctgggacccctgggcacacagtagcggacatcatggagtgacagggccctgtgggtggaggtgtcaggaagaggtaccggcacttgggtggggagggctggctggggttgagtttctgctgcttctgcttcctgaggagcgcagccaggggtgggcccagcgattcgtgccgagtgggaagcccggacgctgtactgtggtgtct

SEQ ID NO: 40873 - DNA, 2263 bp, Artificial sequence
  DNA replication origin
tcagggatgtgtgggttccgccagagtgagctggcgtctggatcaggcttctctgcatcacactttcatccccttttctgcttttttctgcttcaggggagagttgttgggaggcaactgagggctctggcccagccttgccattcagtgtgcacctggcagagaggaccccaggatgcaccaatcttcactcagccttagctcgaagtcaccatctccacccgcctcagtttactcatctgctacatggagatttctgtgaggacatgagacactgcatgtaacaacacttggcacacagaaaacactcaagaaatgtatgtctattgagtcgggagaaaacattcacagcggggccgcggacatgcttgagggaatttttactttgtctttagcaaaatatcttgctgggccatctagatggatgcagatggggaggggacgaggcagtgggggtgtgtgtgtgtttcttgggggggctctgtgtctgttgaggggctctggtgtgtgtgttgcgggctctggtgtgtgtcttgggggctctggtgtgtgtgttggctctggtgtgtgtgttggagggctctggggtgtgtgttgggggctctggtgtgtgtgtgttgggggctctggtgtgtgtgtgttgggggctctggtgtgtgttggggactctggtgtgtgtgtgttgggggctctggtgtgtgtgtgtgttgggggctctggtgtgtgtgttggaggctctggtgtgtgtgttggaggctctggtgtgtgtgttgggggctctggtgtgtgtgtgttgggggctctggtgtgtgtgtgttggaggctctggtgtgtatgtgttgggaggctctggtgtgtgtgttgggggctctggtgtgtgtgttgggggctctggtgtgtgtgtgttgggaggctctggtgtgtgtgttgggggctctggtgtgtgtgttgggggctctggtgtctgtgtgttgggggctctggtctgtgtgtgttgggggctctagagtgtgtgtgttggaggctctggtgtgtgtgtggggggctgtggtatgtgtgttggaggctctgatgtgtcaggggggctctgtgcgtattggggactctgttgtgtgtgtgttggagggctttggtatgtgtgttgggccctgtgtgtattgcgggctctggtgtatatgttggggtctctgtgttggggggctctggtgtgtgtgttggggggctctggtgtatatgttgggggctctgttgggggctctggtgtgtgtgttggggggctctggtgtatatgttgggggctctgtgttggggactggtgtgtgttgggggctctgtgtattggggctctggtgtgttggggggctctggtgtatatgttggggactctggaggctctggggtgtgtgtgtgtgtgtgttggaggctccactgtgtgttggctctggtgtgtatgtgttgggggctgtgtgtgtctgtgttgggggctctggtgtgtatgttttgggctctgtgtgtgttgggggctgtggtgtgtgtgtgtgtgtaggaaactgttgtgtcaggaagctctggtgtgtgtgttgggggctctgtattggggctctggtgtgtgtgttagggggctctggtgtgtgtgttgggggctctgtgtgtattgggggctctggtgtgtatgttgggggctcgtgtgtgtgttggaagctctggtgtatgtgttgggggctctggtgtgtgtgttgggggctctggtgtgtgttttgggaggctctggtgtgtgtgtgtgtgttgggggctctggtgtgtaggtgttggagggtctgctgtgtaggagtgttgggggctctcctgtgtgtgtgtgtgttggaggcctctggtgtgtatgtgttggaggctctggtgtgtgtgtgttgggggcactggtgtgtgtgttgggggctctggtgtgtgtgttgggggctctggtgtgtgtgtgtgttggaggctctggtgtgtgtgtgttggaggctctggtgtgtatgtgttgaaggctctggtgtgtgtgtgttggaggctcttgtgtgtgttcgaggctctggtgtgtctgtgtgttggaggctctggtgtgtgtgttggggggctctggtgtatgtgttgggggctctggtgtgtgtattgggggctgtgtgttgggggctgtgtgtgtgttggggcaccaaggcacattgtaggtgctctgggagagcctctccctggctgtttgactttggacacgtgctttggcctc

SEQ ID NO: 40874 - DNA, 1053 bp, Artificial sequence
  DNA replication origin
ttctaagggacatgtccttgtcacccttcagggcctcaagcccagatgtgtcccccgatcagtgtgtacgcttactggagtgccgctgacgtcctccccaaagccatgattcaatccctgggacatctcaccgttgacagcatccaagagggagggagcttcgggactccagtctgcagggttgtcgagatgggagagtggttccgttcgtttaagggaaacatggagccagcgaagcacggggacttggtcaggtgggggttttggtgagaggccactaccacacagctcacagcagccaaccagcaggaatggaggcagggaggcccggggggaggccatcactgtgccccaggcagtggggggacacaaggcagtattttggaggtagtgcaggcaggagccacagaggaattggatgttggaggggcacactgaggacgaggacaactcgagggtctgaaccaagagacacgtggtgttgctgctgaccaggaaggacagtgctggaggggcggggctgggcacagggtcgtgcattgttaccaccatgggacgccagcaccaggggagaggtggagagggcagaggtgggtcctgaggggctaggacaggtcacaggtgagcaggagtctgtgtggcatggtgtgtgcattgtgtgatgtctgtgtggcatggggtgtgtgtgttgtctggcatggtgtgtatatgtatattgtgtgggtctatgtgatgtgtgtgtgtgtgttgtctggcatagtgtgtgtatattgtgtgagtctgtggcatggtgtgtgtgtgtgcatggtgtatctggcatggtgtagtgtgtgtagtgtgtctgtgttgcatggtgtgtgtgtatattgtgggtctgcagcatggtgtgtgacgtgtgtctatgtgtatgttgtgggtatgcagcatggtgtgtggcatggggtgtgtgtgtatgtgtattgtgggtgtctgtggtgtgtgtgtgtatattgtgagggtctatgtggtgtgtgtgtgtgatattgtgtggatctgtgtggcatggtgtgtgtg

SEQ ID NO: 40875 - DNA, 2014 bp, Artificial sequence
  DNA replication origin
tcgtggctacactgtgtacggcagggagcggattgggggcgctatcccgggctgcactgcccgcggcagggggcgggttctgggcgccattgggtgctgcagtgtccgaagcaagggcaggttggggtcgccattggatgctacactgccggtggttgggggtgaggtgttggaggcgctatctgggggctacactgccggcggcgggttaggggtgctgttgggggctgcgctgcccccctggtgctggtggtgtcagtgacgggtggtcagaggagcggtcctcgtctccccggactccagactctagagggccatctcctcctgctggagcgcggcggatgcacagcgtttccgcggggatcctgagcacaatccgtcacctagaccagccgtggttcccaggcccgcgccctctatgtgttgcggaaactgcctgggacccccgggcacgcagtagctgacactacggggtgatagggccccgtgggtggaggcgtcaggaacgggaaccagcactagggttgggagggctggctggggttcagtttttgctgctcctgcttcccgaggaacgcagccagggtgggcccagcggttctagtagagtaggaagcccgggcactgtggtgtctccagtccccactccaggccctagttcctggccaacttgggccaaaaggagaggctggactttggagggtgggcgtgagtgccttcgctgaaaccggcctctgccatccagtggccagcatgccaaggtgaggctctaacgctaccactctctgcatcctgttctaggctttcttggctttgcctgcccagttgtttcatgccaggaggaggagccgcctgctggaggctggagcttgtggcaccaccgctcgcctcgctgtggttggtggcggccatggagactaaagactcagcgctggagtggtaggagggcggcaatgaaaactgaagagcaccagagcggtaggatggcggctggctgccgccagggcacaggcagtgcagtggtcaggtgttaggagccttgtagggtgggcctgtgcgttgagggtgacagcagtagtagttgtattagcatcggtgctagttgtggcagcagcagcagcaagtttgggggccgggaaggcaggtcggagcgttggggggcagccctgcctggcctggggtgggtaggaagctgtgggcctctgtgacagcggtggaggtgcagccaggggaaggaggagtcttccccgcatctcctgcagaatctggagggcgccctcctcctgctggcacctgagtcaggtgtgagtggcaccattatgttattaacagaagtttggggggtaactatttgtgtatcattttgcttggttttttgtcagggtagtcttggactttttttttttttaatttctggggtacatgagcacaacgtgcatgtttgttacatatgtatccatgtgccatgttggtgtgctgcacccattaactcgtcatttgcattaggtatatctcctaatgctatccctcccccctccccccatcccacaacaggccctggtatgtgatgtcccccttcctgtgtacaagtgttctcattgttcaattcccacctatgagtgagaacataacgatgtttggttttttgtccttgtgatagtttgctgagaatgatggtttccagcttcatccatgtccttacaaaggccatgaactcatcattttttatggctgtgtagtattccatggtgcatatgtgccacattttcttggacttttttaaatttcatgaatcaggaaggggacaaaatgtataataggtctccttgattctcttacctgttctttttctttttttccagcctggtttttcttctgcttatcatcattttcttgttcctgttcattttcttatgctgctgcttctatttcttgtgtcctttcttgtttctcctcctcctccctttgttttctttatcacaagcaatggccttaacaaacaacagtccaaaac

SEQ ID NO: 40876 - DNA, 1883 bp, Artificial sequence
  DNA replication origin
ggttcttggactacatattctgattggatgagaagaaaaacctctagatctactctgattgggctttatttgcatgttctgattggatgagagcaagtcttaggacaaccaatcagaacatgataacaaagtccaatcagagtaggcctagaggttttcctcatccaatcagaacatgtagcccaggaacttcatttgcataaattctcatatataaatgatgccaagtggggggagttttgtcattccaagctctcctgcgtcagcttgtgtagctggttagtactggcttagaggaaaaagaaaacgagtcacttcctgagcacactggagtctggaagcttagaggaaaaggaggaggagcaacttcattagcacagtggaggctggagcctgccgtggctcacctcgctgctgccgttggtgcgggccagggagactagagcgcagccagaatggtaaaatggtggtgggaaaagttcgccatcccaggccgtactgcctgtggcgtggcgtggtggggtgggttggaggccctatccagggcgttactgcccgtgttaggaggctggttggatgtggtatctggggcctcactgcccacagaggggagtgggttgggggtgctatcgggtgtgcgctgcccgtggctgggggtgggttggagcactatcccaagctgtactgctagcggcagtggggagttctgggggcactatctggggatgcagtggccgtggccggcgggcgagttggaagaactatcgggtgttgcattgcccttgtcaggcacgggttgggggcgctatcgggtgctactctgcctgcggtgggcgggacgtgttatatccagggcatcattgcctgcgtctagaagctggctgggggcattatccatagctgcactgcccacagcagggagcaggttggcagcactatctggggctgcagtgctgtggtgggggacgggttaggctcattacagggtgctacactgttggcagcagggaggggggtgttgagggcgctttctggggcctacactgagacagagatagcaggatttattgggagtgctactgggggccagactgcccgtgtagagggggtgggaggctggttgggggcgctattgagggacgtatccactgcccgttttgggagggggcgggttgggtgctatcagaggtctgtactgcgtgccagggagctggtgggtgtgctacctggggccacattggttccggcggggcgggttgggtgcgctatcgggggctaccttgcccgcgcagggggtgggttgggtgcgctatctgtggctgtactgccggaggcagggagtgagttggggcgtctccctgggttgctgctcccagtggggagcaggttggggcactatccggggttgcacttcccgcagttggggggcggtttgggtgccatatcagggcattactgcccccagcaggggtctggttgggggcactattcgtggctacactgtgtacggcagggagcggattgggggcgctatcccgggctgcactgcccgcggcagggggcgggttctgggcgccattgggtgctgcagtgtccgaagcaagggcaggttggggtcgccattggatgctacactgccggtggttgggggtgaggtgttggaggcgctatctgggggctacactgccggcggcgggttaggggtgctgttgggggctgcgctgcccccctggtgctggtggtgtcagtgacgggtggtcagaggagcggtcctcgtctccccggactccagactctagagggccatctcctcctgctggagcgcggcggatgcacagcgtttccgcggggatcctgagcacaatccgtcacctagaccagcc

SEQ ID NO: 40877 - DNA, 1213 bp, Artificial sequence
  DNA replication origin
actgtggcggggctctttccccgtttcgcctcagctacccctcagctccggtagtcgccagtccggggtcgtcgccgtttggggcgggagctgctcggccccgccgccgtccccgtcgccgcttccgggtccaggcccctcgggccgcctgccgccgtcatgaggctgcgggtgcggcttctgaagcggacctggccgctggaggtgcccgagacggagccgacgctggggcatttgcgctcgcacctgaggcagtccctgctgtgcacctgggggtacaggtacgctggggccggggctgggcggcccgcggggagtggggagtgcttggggtgggtgcagggcgggttggcgtcatctgtgggctgcaggcgcgggcgtggccgggcgataggccaagtgcggggacgccgggggggccttcacgggaggcccgggctcttccgggcgtcgcggagccggagggtgcaggcgacgggaagcgcgggtggtcggctggggtccggctcctggagaacatggcccggcctcccgggggctctggtcccctcctcggtgagtcatggcttctggttttgcagtaaacggaaccagggagaggagggaacgcacaatttccacaactggttagatttcaagttggaaatgatgagcttggcttgggttaaacctttctggactgtgaggggtccgagttaatttcttcagctgttggagtatttcaatgaaaaagtttggaaattgctagaagttaaaaatctgccctcaatccgaggccaccggtagcttgtatcgctgctgtgaagcggcaacaattttagattctgttgtgttcatgcgccgagcaccgcggtgagcgcttggacttcgccgccgaaaagttttagaaaggacagcgtgtaggcgtgtttcagaccatttcattttcttgggtgaaatgttgcttttttgctaaaactgaggcaaacgttgatcttgagagcttgcagtttgggggcagtaaagttgagaaaggatcatattctgttattggtttgtgggactgcaggtgaagctgctttgtttccctaaaagatactttttggggacaataatttgggagtaaagcggcaaggtaagagtggtcctcttcaaatactgagctagtgaatttgaaacttgagtgtgctaaggaaaaatgaaaaagatgttccctggggatttttaggtgaat

SEQ ID NO: 40878 - DNA, 1286 bp, Artificial sequence
  DNA replication origin
agcaggctggggaggaagggagaggtcagatgggtctgtagaaaaggaagattagaaagactcagcgacgcttggggttgggactgaggggacaggcgggagatttgggacgagttgcactgggcacagagactaggaagggactgatgtgtaaaagaatgcctggacgtcaggcacctcagaccatttgcccattttacgacaagaattatttagatcttgtaggatggaaaaattgaaagtgctgttttccggctatttggaactactgtcgagtttgtattggggtcaagcggtgttgcagaagaaaatgaggcgcttagattttaggtcaggtgagaattgaagaggttttaagttcttaagaatacaggctaagggagaagaaggaggaatggaaggtggaagcttgcccatagcgaaggaggcaagcccagagaaaagagtagagacacgcagaaggggtgggggtttcttgccctccagaaaagcagagaaagtgttggggcacggaaataagggattggggcacagagataagaggttggggcgcggaaataagggattggggcgcagagatgaggttggggcgcggaaataagcaattggggcgcagagataagaggttggggcgcggaaataagcgattgtggcacagagataagaggttggggcgtggaaataagcgattggggggttcttgccccctaggaaagcgggactagcagctaagggtgaagaagaggttgaggggtacttgcccctgccccaggaaagcagagaaggggtagagacaaggagagaaggggttggggtacttgccccttccccagaaaagcgagacttgccgccaagggtgaaggaccaaggcaggcgtccgtgcgtggtctgacacctttgaaacgtgggtgaataatcagaggcgtccctgcaatgattaaacaccaagggaaggctaccttcccagtccgtgaccgccgccggagttttgggtccacggataaaacgtgtctcctttgtctctcccagaaaatgaaaggaattgaaattaagagaagggagagattgaagagtggaaaggagaaagtggttgagggacagtgagagacgttggagaagagagtaagaagagaccgcttacctgatttaaaattggtgatatgttccttgggctggtcggtctgaggacctgaggtcgtaggtgcatctttctcacggagcaaagaacaggaggacaggggattgatctcccaagggaggtcccctgatctgagtcatggcaccaa

SEQ ID NO: 40879 - DNA, 1039 bp, Artificial sequence
  DNA replication origin
aaaacaaacacccgcagtggcaacgcaaggccctgataactttggctggagccaaggagggccagtgagagtgagatggggaacagaggagtggaagacacgagctggagttgctgaagtcctggggctggtgtattgtcagaaatggccagagagccagatatagtggctcccatctataattctgacactttgggagactgaggcaggaggattgcttgagcccagggggtcaaggctgcggtgagctatcattgcaccattgtactccagcctgggtgacaaagtgagatgctgtgtcagaaggaaaaaaagagagagagaagagaagagaaggaaggaaagagaaggagagagaaaaaagaaagaaggaagggaggaaagagaaagggagggaggaaggaaggaagaaaaggaagggagggaaggagaaagaaggaaggaagggaggaaaggaaggagggaaggaaggaaggaagaaggaaggaaagacaggagggagggagggaaggaaggaaagatgggagggagggtggaagggaagtaagggaaggaaggaaggaagggagggacggaaggaagggaagggagtaagggagggaaggaaggaaggagggagggagggaggggggaaggaaggaaggaaaggaaggaaggagccagaatctgactccaggggcagaaatggtaactcctctttaagccaagctctcccaaacctacctgtactttatacacctcagatcacgtcatagcctaccttccccttgagaatcatacttcaagacccaacttaagtaccttccccgcttaaagcctcctctgcttgcccaagcatgatgcgattcatgccctcctgtgagcgagctctgggcctagcacagccccatcttactgcaccatctcaccatctgcagtttcctcttctgggctagaccttaagggcagaaaccacaactggagcgccaacaccgagcacacagcctgatactctcattagtttactcaacaaataccaactaaacccctacccagtgcc

SEQ ID NO: 40880 - DNA, 1894 bp, Artificial sequence
  DNA replication origin
caccctcagagcctggtgaatttcagaagcctgggcactgtgggtgtgggctagggtagacggtgggaggctggtgtgatgtgagctctgcccacggggggccctgcatgtgccttctgtcaacctcccctgactgtggtggaagggaagaccactccaaaaggaatgtccacctcatgcccactctgagaccctgggcacatgacattacttaccatctctgagccccgtttcctcatgtgtgggatgtcactccccttcatcccacttcgagaacgagatttagcagcataacttggggaagaataaagctccaagcatgcaggaggtgctcagtaattgtttgcttctcctctccttcaaccgaagggcagggcaggagcagaatggagggagaccttcctttagactcaatcaaggaagggccgcaggcctgcatgggtgctggctgttggtgcgtggctgttggctgggggcgggtgggtgctggctggggggtacgtgggtgctggctggggggtgagtgggtgctggctgcggatgcatgggtgctggctgctggtgggtgggcgctggctgggggcacgtgggtgctggctggtggtgggtgggtactggctgctggtgggtgggtgctggctgggggtgggtgggtactggctgctggtgggtgggtgctggctgggggtgggtgggtactggctgggggtgggtgggtgctggctgctggtgggtgggtgctggctgcgggtgcgtgggtactggctgctggtgggtgggtactggctgctggttggtgggtgctggctgggggtgggtgggtactggctggtggtgggtgggtgctggctgatggtgggtgggtgctggctggtggtgcgtgggtgctggctgggggtgccgtgggtgctgactggggctgggtgggtgctggctgggggtgggtgggtgctggctgatggtgggtgggtgctggctggtggtgcgtgggtgctggctgggggtgccgtgggtgctggctgggggtgggtgagtgctgggggtggtaggaatgtaggaatcaggcaggtcgagggtggatggggacatttctcctcaccaccagctctgtcaagacaagggtctcagaactgccagatctcaaggttggaagaaattacattccaaaatgtcaagtagtctagtcacaggctgatttgaaaacactcttctgttagctgtgccatgattgagaatttcatcccagcctgatggtagcaggaccacgattttcatggtcaactaatagtcgttgagccccttgtacatatcctgggctttctcatatttggtcctttcaagagccccatggtgtgaccatccatttaccaagagggaattgacagttccggaagattaaataatttccccaagcctacacggctaataatttcatgtcatgaatatttgttgaacacctcatgtgtgctggctaggcctgggaatgcagcagtggaaaggcaagctggattccctgtctaattctggggctccttccacctcctcttgcttctgtctcttccatctggcgaccacaactgaatacagggcttaaagaacttagagagatattgagaggttgggatataatcttatgagtaaatcttaatgatgtggttaatggtcctccatggggacaggaccctcccttgaaatgcagtttggaaacttgtgggaagacttttggttatcatcacaagcaatgggcactatgggcagatagtcagggggactgggaatgcatacaggatactctgcacagccaacagctgtcctgctacccacaggactgttggatttggtcctaccagacaccatataggtgaaaagtcatttataattatctgagcctaga

SEQ ID NO: 40881 - DNA, 1558 bp, Artificial sequence
  DNA replication origin
cgcgctgccctccgagtgcccggcgggacgggatggggcgcagcgaggctgcctcggcgctggcgcaggactcggcgggcggcctcccggcgaaggagcaggagctggaggagcaagaggaggaggagaagccgtctgagcgcccgccgcctgcctgctgcccgctctgcgccgctgcctgggcggccgagtgatatagcgctgggcccccggggaccccgcctcgggctgttggggcccgccccctcagaccaatggcagagccgcattacctcatcggccctccaaaaagggggcggggccgggggcaaggggtaacggggcggggccgcccccggatcgttcagatccttatagggaataatgccgccgtgggcacgcgagtgggtgggctggggcgcgcccgggaccggtgcttgccgctgggtcctcggagcggagccctcgtgccccttctcgtctgcgccctggccccacgcccacctgggccactgggtgtctctgacccaaaccagaaccaactaacacccacccaccccagcaggaccgcttccacaggtgaggggtggccatgtcctagagaccttgactgtgcttggtggaaccagcgggggaatgctaactgctacccctccagtttctctggagagagcaggcacagaggagaaagacccaaactctctctctttctctctctctctggttcttactctctgggatatgggaagccatctgctgtttgcagctggctatgatatatgatagaagactgttttctgtgctctcccagagcaaacggggttctgtattcattcaacaaacacggttcaggatgctgggttaagcaacacaaagcccttgcccccgtggacatccatgaatgcacagggtgattttctgtgatgctagggctatgaagaaaacaaaacagagttctgggttggacatgactggggagggcctgctctctctgcgatagtaagggaagggctccctgaagtgccatcctcgctgagaagtggacaaagacaaggatcagctctggggcaagccacaggagagaggtaccaggcagggggaacagcaagtgcaaagaccctgggcatgtttgaaagacagaaagtagaaaggcaagaggaagtggttccctgcccatggctgacagagctccacccttcagcaagggatttgggggtgagctgatccaaaactgtagtaaaaccaggagaacgatccaggatcctagacgactagctataatagatgattgcagataactaacacaattactatccttattattgacatcttgattctgctttgtatttttaaaagcaggattctgtatctcaccgtattatagctctcacaataatctttgtgggtaggaaaagcaagcacaagtatcactcccactttccagatgaggaaccggcacagaaagatgggatgattggtggccagccaggaactcgtcacccctttccactgctccttcccatctgaagagagacatgcatttccctgaacgtcagcagctgttccatctaactgcaaa

SEQ ID NO: 40882 - DNA, 1816 bp, Artificial sequence
  DNA replication origin
tcagacggcttctcctcctcctcttgctcctccagctcctgctccttcgccgggaggccgcccgccgagtcctgcgccagcgccgaggcagcctcgctgcgccccatcccgtcccgccgggcactcggagggcagcgcgccggaggccaaggttgccccgcacggcccggcgggcgagcgagctcgggctgcagcagccccgccggcggcgcgcacggcaactttggagaggcgagcagcagccccggcagcggcggcagcagcggcaatgaccccttggctcgggctcatcgtgctcctgggcagctggagcctgggggactggggcgccgaggcgtgcacatgctcgcccagccacccccaggacgccttctgcaactccgacatcggtaagcgctcctggtgccccgcccgagccccacgctgcagccaggactgcagcgctgcttagggaggcagggcgagccccactcctttcctctgccccaggagaggggcagacggggttggggcggagtggagaaactcgatgtccttgggcgggggcgctggcatagctgagaggggaagatgccctgcagaggaaactcacagtggctgagggagcccctggccgcctttgctttcctaacttaggtcgtgaggttcctaccggtccttttgacatctggaaaatgtccccattcactactaacggaggaagggctagaagagaagggtggggaaagggttcccaaaacttggaatgctaactaaagtgctgggaaattgaatagttaaaaaaaaaaaaaaaagttgcccgccatgtgcacggaaagttgcaggagaaacttggagtactccgagtctgcatcatctcctgcgcctatgaaattcattcttttcactgagacccaacccagctgcaggcttcccaggcaagcgctaaccgagcttctgggactgccaagtttgggtggatttaagggggaaaatgaggagaaagctgtggcattgacccacgccctggaggcactgtgtttgagagtgttgatagccagcagaaggtgcgaggggtcactcaccacatagctgtgaaaattcacaggaaggctatttttttcccccttgaatgtgtgtggggagggggagaatgggtagtggaaaacagatttgtcaccaaaagaacaaacctgccaagggtcacatcacggtgacagttccagactggacttagtgtcttgagtagagagaccctgtaaagagacctcctactccttagtgtgtatggagggccccgagagcatcctgggaggcttgtctgggagtgtttgggacacttgtgtttggatggctaaaggtggagtggcatctgggaaacatctctctcctcctttccagcccataaagcgtgcaagtccagtggctctgctgggagagtgtgtgtgtgtgcactgggctgggctgggcggtggggtgggacagccttgccgccctctgcctgtgtcgattcagaggtgaagaatggagcgtgtgtgttttaagtacagtcataaaggagaaggaaattttccactgagtcttgggtgagggactctaccagcgtgttgtggtgaggagggggaggaggtaggagcttggcaggggaggcagtgagggccgggaggggcactgctggtgggctgggctgagcctagaggtcagagtgggggtgtggtgaccagaatgtcagtgcagttggcagctgagggtgtttgtgtgacctgaggtcacccttgtaagaggctccctggggcctgcatggtacatcctcccctctcctgggggaacccagctg

SEQ ID NO: 40883 - DNA, 1058 bp, Artificial sequence
  DNA replication origin
agaggctgagctcccgggacccggagcggatcgactggcgggcgccgcgccgaggcaccaccgggcgccgagttcctggcggctcgcacggtaagcggcgcggcgccgcaaagtagactttgtggggtttctgacagccgggagaccccacctcgagcgggggctgctggtgcgttctcgcgtcgggctgcgtcccctggagctccggctctgtgtccgcgggatgcgggcgcacggaggggcagggagggaggcaaggagccgcgcaccacggtgtctccccaggctgccgctgccggggccctgggccggtccctgggacagacagatcggcgtgcgggggccgtctgccgggcccgggagccgggggcgcgcaagactgtggatcctaagactgcctccacccagcgcccggcccggggaagagcttgcgggaaaccaggaaccgcagcggccggacctctgctctgcgccggctcctaggacctgccttaggtccccagacccctcatgacctgttgccttgggtttgggaggtcaggtttgtcatgccatttccgatttccagtcatcctgggggcaggatgaaatttcagagtggtttcctggccaagctagaagcagagaatagctatggatacagcacctcgtgtatctatccagcacttacttggctttttctgagtgccaggaactgtgccaagccctagcagcatgaagaatggcctttggggagcttctggggctaagagggacagtaggaggagcaattgcagtgcagggtagtgcggaagactcgagatggagaagaggacggtgaggaagccaggaaggtttcagagaggaggtgagcattgactggaagtcggaggttttgccaggctgaaaagtgtgttgggactgtgagttgatagggagcaggaattccaggtgggttttcttgtgtaaaggtaaagaaactgaaaaggtccggtgtcctgacctagcacatcagataattctacagcagataatggagtaggaccgggtcttgctgtaggtaggaaatgagctctcga

SEQ ID NO: 40884 - DNA, 1156 bp, Artificial sequence
  DNA replication origin
gtcttgcccaagatttattacctaaaaatgaaatatatttcaaaaaagataccctcaaactctaacatttccagtaaaagcaggacaaatactctattttataatccatttaaaataataaacatagctgcagttcgttgagcaaattgctccgtttcagctgccacgtgttacattgcctttctgtttgggtcacgccctgagacctttgtgaaaaagttgtgaggtcagatcaaagcggcggctgatgtgctcctggaagaggaggtgtcctggggagtgaggacagttgcagtagcctcttagaggagtgaaaacctgaagaccagctttctaccctttgtctgcacagggtttccttgaggtgaggcgtgcctgtggtcctggcctgctgtatccctctaacctcagcatgtcttaggtcctgtccccggattcagtcaggctgtcacaaaggaccgagttagccaggaaagaagaggttttgcgttggacagaggtaggatgcaaaaagcggcctgtggaaataatgtaccattttcttatttaagttccctgagcagaggcaggagaatagaggacaggaggagaagaataaaggaggagggagggaggggaagagagacggaggagggggagagagagggagagagaatacagccgggtggggtggaaggaagaaatatcagggttgggaggtgagaggagaagggatgcagcctcagtgggggaggaggaagaagaggtggaggaaggtgaaaccagtgacttgtacttggcttcttgtgacatggagtgaggagggcagggcaggacccaagtgggaggcagatcctaggcctggtggaaaggaggaggaggaggaaggatgtgaggtagcagacagtgggagggtaaagaatggcatatgaatctgagaaaggatcatacaagttttagtgccagaattggtgatggggtgttttggatgggtaaacagaggcacgttgttggaccctggtcagtggctgtttcccaggttctatggttgtgacatgctatcttcctgggtgggtgaagaggctggaccccaggcagacgagcacgctgagtgccacctgctccatgcttccactcgtcctgtgttgcctgcctgcatctcagcttcccggaaggc

SEQ ID NO: 40885 - DNA, 1181 bp, Artificial sequence
  DNA replication origin
cctggacccaacccgaggctgacccaggcccctgcccatgcggggcgcccctggctcggaagagtcccccgggccgggagcagctccaggcagcggccccggaggaagaggaagaagggacagtgctcagcttgggggacccggaccctcgccgcggcatttggagccgggggcagtcccgaactctgtgcttggcaccgccgctccgagtagggcagcgcctgccgggaccctgacccggaccccctgcgcctcgtaggcggcggcgccgccgcgccaccctgttcttccgtgtctccctctgcctggcggcagtcacggccaaggtaagagccccggagcgcgagagtcgccgcgggggcgccgtggtgtgtagcgccggacaagttctccgaacctgtggctggtaccccctgtactcgggatgccggcggggaggccgggcacaccctctgctgccccggccgggagccctggagaggctggaggtggaagcccccagtctccgaagtccccaggaccccctcagggcctgctcggcttctgggcacacaggctgctggcagggagcgagccaggaggagtttctggttaacaccacgagggcatgtgaccgatacccgcacccccggccctcttgttagcggtgagcacctgtggttcgcggagcctgccgtgtttggagagggccctgttgggcggtacgcaactacctttcgtggtgtgatgctgtgaataacttttcttgttccttcttgcagacagtcctgcgcaatttgggggcgagcagccacagcttgcgagtccctctttaggacagagtggttggttggcattgctatctgtaggggggaagcccagccagcatgtccttcctgttagtcaaagctgcttgtgaggagtgatcagtgtatagctatccagacattcttgtaaatgtcactgcttttgaagttttggagtgaggactccaaagtttgtgtatcctcaagttattttgttcattgccttatcctcttttaaatgttcctcttaaggaacctcagttgtacaagcctgtccttgcctgtttgaaatttattaaacctgtgagcttcccccagaacaatctgattttaaatgggtcacttcggagggaacagattgtctcttgcacactgaatccatcccttgggtgaccc

SEQ ID NO: 40886 - DNA, 1211 bp, Artificial sequence
  DNA replication origin
cgcctcccgcgcccggccaggagtgggccgccgcgcgggaaccggcaggggcgggcgctggggtccgggctccgggctggccccgccgcctccgcgtgcccagagcgccggactcgctcagcagctgcagtgactgtgtgtctgtgtcatgtctgtgcagccgggggggaccgcgagccggggctgggttccgagcgggggcggggccggcgcccgcgtcggcgcccgcccccgaccccgtgaccgagcggccggccaatggcaagcgccgcagccgcgcggaccgagagttcgcccccgcacaggctccgccccccggcgagactccgccccggtgcttcttcagctcgctggctggcaggcaggcggaagcaacacccggagccgggatcccgggccgggtcgggatgaaagggtgcaagctgggagctccccgcccttcttcccccaaccccggcggctcccggccgcctcgggcttggcgtgcctcgcggaaaaagggggaagggaagcgggacgggcccgcagctgccgtggtagagaggctcgcaggcttgcaggaccatgcagcctgctccccaaattgcacaaaacagccgtcgtgagaagtaggaagtttccccgcctcgggtcgcagcttctctcggaggtgggcatgctgtggggcagccggagtctgtgaggagccccgccgaagggctctgacggcatctttctgggatcggtatccaagaatcctgtccaaggcttcctcttcctctgaggaaactacatttctttttcctccaccccaaacacacaccccatgcacgcacaacacgcccctcccctgctgattttattctcgctctttccctcttggcataagaacccggcgcgcaacatcccttgaatggacttccagcctcccagttctagggaccagggtgggggtacggagagtcctcccgagccacaggagaagtgggtgaaatgggtcggggcacaggagcgggggtgtgagaatggatggaaggaggatgccctcgagagaagacccagaggaggcgaaagcagagaggcagggagagaaagaggacgccgagagctgcacaactcggactcggagaccggagctccgggcgcgcgatccagctcccgggtttttccgcagctcggtcccagggcttctggggtccccttccccccgggtctccacctctccccagccg

SEQ ID NO: 40887 - DNA, 1245 bp, Artificial sequence
  DNA replication origin
agatcttattgttagtatctcattacccaagggttaatgctggataatcttagttcacccagacatgccctaagggcagctgggaaggagagagagagagagagagagggagagagagagagagagggagagagagagggagggagagagagagagagagagagagagagagagagagagagagagagagagagagagggagagagagagagagagggagagagagacggacgggtagagagagagggaaggggagagagagagagggaaggggagagagagagggaaggggagagagagagagggaaggggagagagagggaagggaaggggagggagagagagagaaggggagggagagagaggcaaggggagggagagagagggaaggggagggagagagagggaaggggagggagagacaggcaaggggagggagagacagggaaggggagagagagagagagagattgagattggagaaaatgggttagattgatttgaccaacatatgtgcatattttttatacaagcctcttggatttagtcttatctgttgatccatgctccaaggctagggaaacagcatccctgcttttgtctgtatcttaattaattcattgattctgttgcgatactttattctcattctctaaacatcacacatcatcgcccaatgctatatatatatagagagagagagagcccgtgagagcgtgagagagcgcgagagggcgcaagtgcactgttgttgcttatttatttgttctgttatttgagatggagtctcactctgtcacccaggctggagtgcagtggcacaatctctcagctcactacaacctccgcctcctgggttcaagcgattctcctgcctcaacctcctgagtagctgagattacacgtggccaccaccacgcccagctattttttgtatttttagtagagagggggtttcaccatgttggccaggctggtcttgaactcctgacctgaagtgatccacccaactcagcctcccaaagtactgggattacaggcataagccaccacacccggctcaatgctattatattaaactttgcagattccctactctgtgccaggccctgtgctaggatttgagggtgtgaaaacgagtaactcattgtccttgtcattccaagaagccaagcaggaaagtgagtgcagcatgaggaatggaatgatggggcgagtccagatgagctggaggaccagaagagt

SEQ ID NO: 40888 - DNA, 956 bp, Artificial sequence
  DNA replication origin
agtgaggagaccctctgcctggcagccgccccgtctgagaagtgaggagcgtctccgcccggcagccaccccgtccgggagggaggtgggggtcagcccccgccaggccagccgccctgtccgggagggaggtggggggtcagcccccgccaggccagccgtcccgtccgggagggaggtggggggtcagtcccccgcccggcttgccgccccgtccgcgagggaggtgggggggtcagccccccacctggccagctgccccatccgggagggaggtggggggggtcagcccccctcccggccaaccgccccgtccgggagggaggtgggggttcagccctccgcccagccagccatcccgtccgggagggaggtgggggggtcagccccccgcccggccagccgccccgtctgggaggtgaggggcgcctctgcccggccgcccctactgggaagtgaggagcccctctgcccggccgccaccccgtctgggaggtgtacccaacagctcattgagaacgggccaggatgacaatggcggttttgtggaatagaaaggggggaaatgtggggaaaagattgagaaatcggatggttgccgtgtctgtgtagaaagaagtagacatgggagacttttcattttgttctgtactaagaaaaattcttctgccttgggatcctgttgatctgtgaccttacccccaaccctgtgctctctgaaacatgtgctgtgtccactcagggttgaatggattaagggcggtgcaagatgtgctttgttaaacagatgcttgaaggcagcatgctccataagagtcatcaccactccctaatctcaagtacccagggacacaaacactgtggaaggccacagggtcctctgcctaggaaaaccagagacctttgttcacttgtttatctgctgaccttccctccactattgtcctgtgaccctg

SEQ ID NO: 40889 - DNA, 1601 bp, Artificial sequence
  DNA replication origin
tcctggcccgttctcaatgagctgttgggtacacctcccagacggggtggcggccgggcagaggggctcctcacttcccagtaggggcggccgggcagaggcgcccctcacctcccagacggggcggctggccgggcggggggctgacccccccacctccctcccggacgggatggctggctgggcggagggctgaacccccacctccctcccggacggggcggttggccgggaggggggctgaccccccccacctccctcccggatggggcagctggccaggtggggggctgacccccccacctccctcgcggacggggcggcaagccgggcgggggactgaccccccacctccctcccggacgggacggctggcctggcgggggctgaccccccacctccctcccggacagggcggctggcctggcgggggctgacccccacctccctcccggacggggtggctgccgggcggagacgctcctcacttctcagacggggcggctgccaggcagagggtctcctcacttctcagacggggcggccgggcagagatgctcctcacatcccagatggggcggcagggcagaggtgctccccacatctcagacgatgggcggccgggcagagacactcctcacttcctagatgggatggcggccgggaagaggcgctcctcacttcctagatgggatggcagtcgggcagagacgctcctcactttccagactgggcagccaggcagaggggctcctcacatcccagacgatgggtggccaggcagagacgctcctcacttcccagatggggtggcggccgggcagaggctgcaatcttggcactttgggaggccaaggcaggcggctgggaggtggaggttgtagcgagccgagatcacgccactgcactccagcctgggcaccattgagcactgagtgaacgagactctgtctgcaatcccggcacctcgggaggccgaggctggcggatcacttgcggttaggagctggagaccagcccggccaacacagcgtgaaactccatctccaccaaaaagatacgaaaaccagtcaggcgtggcggcgcgcgcctgcaatcgcaggcactcggcaggctgaggcaggagaatcaggcagggaggttgcagtgagccgagatggcagcagtacagtccagcttcggctcggcatcagagggagaccatggaaagagcagaagagaatttcttatttcatccctgtgaagcattgttagtaccaatgaggcacatgaggctgtttaaatcacttgccctggattatataaccagatttttgttcagctgggaacactggggggatgaaaaacaagaggaatatatgcatgtctcctgcttctctaatcagctgaatccaggaccaaggtacttaatgtgaaaagttctcaaagaaccattcataatttgttgaatcatcttaaagcgtatgggccaaactaggtcatattcaaaaatgtggccaagaaacacataccccacagtaccagccattccactgggcccgagactaaagggtttcctaggttgtgagactttcagtgcttaaaacaaggacagttccagg

SEQ ID NO: 40890 - DNA, 965 bp, Artificial sequence
  DNA replication origin
gcccggccacccatcgtctgaaatgtggggagcgcctctgccccaacgccccgtctgggatgtgaggagcgcctctgccccgccgcgacccagtctgggaggtgaggagcgtctctgcccagccgccccgtctgagaagtgaggagaccctctgcctggcaaccgccccatatgagaagtcaggagtccctccgcccggcagccacctcatctgagaagtgagtagcgtctccgcccggcagccacaccgtccgggagggaggtgggggtcagcccccgccaggccagcagccccgtccgggagggaggtgggggggtcagcccccctcccggccagccgcacggtccgggagggaggtgggggggtcagccccccggcctggccagccaccccgtccgggaggtgaggggcgcctctgcccggccgcccctactgggaagtgaggagcccctctgcccggccaccatgccgtctgggaggtgtacccaacagatcattaagaacgggccatgatgacaatggcggttttgtggaatagaaaggggggaaaggtggggaaaagattgagaaatcggatggttgccgtgtctgtgtagaaagaagtagacatgggagactttttgttttgttctgtactaagaaaaattattctgccttgggatcctgttgatctgtgaccttacccccaaccctgtgctctctgaaacatgtgctgtgtccactcagggttaaatggattaagggcggtgcaagatgtgctttgttaaacagatgcttgaaggcagcatgctcgttaagagtcatcaccactccctaatcttaagtacccagggacacaaacactgcggaagaccgcagagtcctctgcctaggaaaaccagagacctttgttcacttgtttatctgctgaccttccctccactattgtcctatgaccttgccaaatccccctctgcgagaaaca

SEQ ID NO: 40891 - DNA, 1021 bp, Artificial sequence
  DNA replication origin
atctgttgggtacacctcccagacggcatggtggccgggcagaggggctcctcacttcccagtaggggcggccgggcagaggcgcccctcacctcccggacggggtggctggccaggccggggggctgacccccccacctccctcccggaccgtgcggctggccgggaggggggctgacccccccacctccctcccggacggggctgctggcctggcgggggctgacccccacctccctcccggacggtgtggctgccgggcggagacgctactcacttctcagatgaggtggctgccgggcggagggactcctgacttctcatatggggcggttgccaggcagagggtctcctcacttctcagacggggcggctgggcagagacgctcctcacctcccagactgggtcgcggcggggcagaggcgctcctcacatcccagacggggcgttggggcagaggcgctccccacatttcagacgatgggtggccgggcagagacgctcctcacttcctagatgggatggcggcagggaagaggcgcttctcacttcgtagatgggatggcggccgggcagagacgctcctcactttccagactgggcagccaggcagaggggctcctcacatcccagacgatgggcggccaggcagagacgctcctcacttcccagacggggtggcggccgggcagagactgcaatctcggctctttgggaggccaaggcaggcggctgggaggtggttgtagcgagccgagatcacgccactgcactccagcctgggcaccattgagcactgagtgaacgaggctccgtctgcaatcccggcacctcgggaggccgaggctggcggatcactcacggttaggagctggagaccagcccggccaacacagcgaaaccccgtctccaccaaaaaaatatgaaaaccagtcaggcgtggcgatgcacgcctgcaatcgcaggcactcggcaggctgaggcaggagaatcaggcaggggcgttgcagtgagccgaga

SEQ ID NO: 40892 - DNA, 1368 bp, Artificial sequence
  DNA replication origin
gtgaaggtagcggcgagcggagaccccaggagaccgggctgggcccccaccctgaggcggcagcagccccgccccgtcgccacccgccgccctgggcccgcgacatcacctctggggtgccccaggcccttcgcggcctagcccaggggccgagccggggactggagtagcggccgcagccgcccccaggaaggggctggagcgggcagaaggaggagggcgggcgggagctgttcaaacggggaaggcgggaaagctgcggggccgggagggggcgtgcggccgccccgggggcctgcggacccgggccgcccctccccctgcccgggccgtctccgccctcgggggcgccgtgaggccgccggagacgcgggaacccgggttcaggtcgagctgtgcggctcggaacccgcgatgcgggggtccctcgggctgtcagggggaaagggctcgtggccgcggccacgggagggctggggctgcggctggcaggagaaagtacgaggagctttcttcttttcctcttcacagagctttgttgagctagctgttgccgcaaaactgccgggagaatcccactggtttgccttggggaccacaaaaatggtggtcctgggggctgtttgtgtaaatcacctggtattttgtgtgtttcttgcgtgcaacccggcttggccgtgccttcgtggtgggcgccttctccatgcaggcccattttccctccaccaactactacttgtagattcactttatagcgtgcaaaagcggagaaacatctctgtcccctcttttggagggctaagctggtggctgattatatttcctcctaatagaacaaagtaaaaaactgaatcccaaataaagcctgttgattggacaaggcttctcaaaattcgattgctggtcttatggaatgtgtgttgtcagccaatctgtgcggtggtcgtggttccgcttaattgcactgcaatgagaggattcaatccccatccccgactgtcgggatctctgcagcttccagagctggcaggggctgggagtgctgcctaggtaggtccctggagaagggagtggcaagaggattcggagtcaccgtgttcggagattggaagaaacctggacgaagttgagaaggcatcacttgtctgtatcgtagaagtaacaagaaaatttcagaaattggcaaccggcggatgtgcatcttcctttacctgcactgactggcattttgagttcttgaaaggagtggttggaagaagagaatgcagaatcttggacatggctctcatcctggaacagacctggagttcagaatttctcttactgtccgtgtgacggggcttactttgtttcctttttttcgatact

SEQ ID NO: 40893 - DNA, 1029 bp, Artificial sequence
  DNA replication origin
ctatcacaagccaaggcttcctaatggcccaagttcttgtcaatcaagagtgggaggaaagctgggcggagccaggtcggagagctacacgccagcctccttgccctccctgcctccgtgactaggcacccggaggcttcccaggggaccgaagctgggtgcggagcaccggggcggagctgtggggggctccagggactcaccgatgcgctgtcccactggagagctgaacgggttccccaggagaaagtccattgctgctaccgccgctgccaccaaccccgggaatcagctgacagcaaccgccagcgccaccgacccgtcacgtgacgcactcggaggccggcgaggaggcgtgggcggggcggtggcaccgcgaagctcgaccacaagccccgccctgagacgccagggtcccgcccccgaggcggagggcgatgacctcactgcggcttgctcggcggcggcgggcgtcacacacgatgtagggtctggggtcggggcccgggaagcgcggtcctctttaagccacgcccctgaccttttagggcgaggtctaaaggaccctttacacatttgggaaactgggtcgtagaccagggaagtgacttgggtgagttacacagaagccgagactcttagggtcatagcccttagtccttgggacctcactgtgactgcacacctaccctgggtgacagcctctctgggctgttgtctccttgtcccggtaagactcttcctgtttgatgtcaaggtctccccgctccaagatgcaccctgctcgcagcccaaattatcttaccttaaatcagaggcaagggcaaggggtttgtcatctgttgagactgagaggcaatttaatgaattgcagcgcaattccctctagcgcccaggatggcaaaaagcacagatgtagtcacgagtggggctttaatacccgtctctgccataaatttactgtgtgagccaaacatagctcccattttctctagatactggaattagatcaaggactcgtaaccattt

SEQ ID NO: 40894 - DNA, 1867 bp, Artificial sequence
  DNA replication origin
cgcctcttagctgccagacgggctaccttgtccttgcccgagactcaagagcaggaaccgggcacagaggagctgcggaagctgggctggccgggccaacccggaaacagcctgagccctggggtcccgcaagaccctcagctgcccctccttgctcctctgggccttctcctgggtcccactcccttggagagcagcacggtgccccacgcccatgcctggcaggagccctgcgagcacccccagctttccgggtggccgggcctggcccctgctcaccatgccttgtctcaccatccagtcactgaggcttttcccgcagccgcctcccatctgggtgagagagagtcacgctgatggcggagggacggcagcgccagggccactggagggcgcggcttctaacaggggtgcgcctttcgggtcaggaggcctgctgccactttgggaggcgtgtgtgtgtaggggtgtgtgtaggtgtgtaagggtgtgtatgtaggtgtatgagtgtaggtgtgtgtgtaggtgtatgagtgtaggtttgtatgtgtaggtgtaggttgtgtaggtatagatgtatgtggtgtgtgtaggtggtgtgtgtagatgtgtgtggtgtgtgtaggggtgtgtgtgcaggtgtgtaggtgtatgagtgtgtaggggtggtatatgcaggggtgtgtatgtaggtgtatgaatgtaggtgtgtatgtgtaggtgtaggtgtgggtaggtgtaggtgtgtggtgtgtgtaggtgtgtatgtgtaggtgtaggggtgtgtgtgtaggtgtggtgggtgtagatgtgtgtgtggtgtgtgtgtaggtgtatgagtgtgtaggtgtggtgtgtgtaagggtgtgtgtaggtgtatgagtataggtgtggtgtgtgtaggtgtgggtgtagatgtgtgtgtggtgtgtgtaggggtgtgtgtaggtgtatgagtgtaggtgtggtgtgtgtaggtgtgtgtggtgggtgtagatgtgtgtgtggtgtgtgtaggtgtatgagtgtgtaggtgtgatgtgtgtaggggtgtgtgtaggtgtatgaatgtgtgtgtgtaggtgtgtgtggtgggtgtagatatgtgtgtgtggtgtgtgtagggctgtgtgtgtaggtttatgagtggaggtgtgtgtggaggtgtgtggtgggtgtagatgtgtgtggtgtgtgtgtgggggtgtgtaggtgtatgggtgtgtaggtgtggtgtgtagggctgtgtgtgtaggtgtatgagtggaggtgtgtggaggtgtgtgtggtgggtgtagatgtgtgtgtggtgtgtgtaggggtgtgtgtgtaggcgtatgagtggaggtgtggtgtgtgtaggtgtggtgtgtggaggtgtgtgtggtgggtgtagatgtgtgtgtgtggtgtgtgtgggtgtgtgtggtgtatgggtgtgtaggtgtggtgtgtgtagggctgtgtgtaggtgtatgagtggaggtgtggtgtgtggaggtgtgtgtggtgggtgtagatgtgtgtgtggtgtgggggtgtgtaggtgtatgagtgtgtaggtgtggtgtgtgtaggggtgtgtgtaggtgtatgagtggaggtatgacgtgtggaggtgtgtgtggtgggtgtagatgtgtgtgtggtgtgtgtaggggtgtgtgtaggtgcatgagtgtgtaggtgtggtgtgtgtgtaggggtgtctgtgtaggtgtatgagtgtaggtgtgtgtggaggtgtgtgtggtgggtgtagatgtgtgtgtggtgtgtgtgtaggtctatgggtggaggtgtggtgtgtggaggtgtgtgtggtggatgtggcggctggtgtagagggatgaggcaggtattgtgg

SEQ ID NO: 40895 - DNA, 774 bp, Artificial sequence
  DNA replication origin
atagaggttccctaaaacagtggtgcggggagtagcaagaggctagaggaggagtgagaggaagggtggaggagctgctatggcttccctaggattcaggccccagacgaggccgaggacgtgctggctgaggcatgtcccgactccagactccagccggacagtccggactttgccccaggggattaaacctggagcagctggaactctgaggaaaacaaatctctagaccgtgactcagcgaaaacagacaccgggaccgtgactcagcgaaaacagatctcggggcggtgacttagcgaaaatagacctcgggaccgtgactcagcaggaaaaacacggccacgtggctcgggaaaggattactcagcaggggcagagcggcgccagatgggctgggcgcggcgagcgggtggggggcggggtaagggggggtacgcctgggcggggggggggggggcgggtggcatcgcgccccaggctctggggacagtgtgcctttctttaggacctggcccctgcctcttcgactctctaagctctaaagggtggttaacagccttcagggctgctggtaggcttaagtgagcccagaagtgagcagaagtgagaactgcctagtagttgatactcaccgggtcccttaacaaaaaaccttgaacgaataaacaatgcctctgccaatcacaggctcggcagcaccgtgggaacttttttttttttttttttttgagatggagtcttgctctgtcacccaggctggagtgcagtggc

SEQ ID NO: 40896 - DNA, 1309 bp, Artificial sequence
  DNA replication origin
tggatgaatatgtgggtgggtggatggatggatggatgggtgaatatgtggatggacggatggatggatggatgaatatgtgggtggatggatggatgaatatgtgggtgggtggatgcatggatggatggatggatggatggatggatggatgaatatgtgagtggatggatggatgaatatgtagatggatggatgcatagatggatggatggatggatggatggatggatggatatgtggatggatggatgaatatgtggatggatggatgaatatgtggatggatggatggatggatgaatatgtgggtgggtggatggatggatggatgaatggatggataaatatgtgggtgggtgagtggatggatggatggatggatagatggacggatgaacggatgaataggtgagtgggtggatggacggatgaatatgtgggtgggtgggtgggtgggtggatgaatatgtgggtgggtgggtggatggatggatatgcatgtgggtggatggatgaatggatggaagtcagacaagcagcagttcccaggctaagagcagggttatttacacatacccctttggcatctgtctgaaaggtagggatggggtttcctaagagacaatggtccgtgcctgggtccttctgcctggaagatctttaccctttcccttccttgccctcgcttggtgaatagggagatgaagaggacaaggggaaacgacaggccaaacattaccactaacttgctgtgtgtcctgggactagtcactccccttctcctctgggcctgtctccctcactaaaatgtgaaaaaataggactagattgacactttccaacctggctggtatcagaatcctctgggaagcttgtgaaaatgcagatgcccaggcctcagacccattaaaccagcatcagtttttaacaggctacccaggtgactctcacaattggtcagatttggagataagggactaaaaggtccccagggcctcagttgtgacaccccgactcatggctaggtatggccctttctgtaacccgtcttctttccctctttcatctcctctctgatagtcaggaacctttcagttacaaggtcaggagcccgacccaccctaactgaaaggaaatctatttgcagacatacaaagaaattcacaaagcagaactgccttcaggcttagctggatccaggggttcaaagattctcaaggctgtcattccatctctcagctgtttcctcagtgtatcagtttcattcccacgtaggctctgtctacatggcatgatgatggctgct

SEQ ID NO: 40897 - DNA, 1267 bp, Artificial sequence
  DNA replication origin
taccttcaccggagcaggacactgtcctatagcattttgtttaaagcaattatttaattgttgtcttccagatggatgagaagagggcctgtgtttctcttattcatggctgtgccttcagggcctggcacacagcaaaagtgaggatagatgaatggatggatggatgagtaagtaagtagatgaatgggtggatgaatggatgggtggatgagcagatgaatggatggatggatggctggatggatgagtggatgaatgggtagatggatggatgagtgaatggatgggtggatgggtggatggatagataactgagtgggcaaatggatagatgggtggatgggtggatggatggatgaatggatgagtggatgaatgggtagatggatggatgagtgaatggataggtggatgggtgggtggatagataactgagtgggaaaatggatagataggtggatgggtggatggatggatggatggatggtgggtggatgggtgggtagatggatggatggatggatggatagtgggtggatgggtgggtagatagatggatgagtggatgggtggatggatgaatcatgggtggatgggtgggtagatcgatggatggatggtgggtggatggatggatggatggatggtgggtcgatgggtgggtagatggatggatggtgggtggatggatggatggatggatggatagggtaaatgatgccctggaaaggctgggtctggggcctcagggggaccacttgccttctctccacctgctgctcagaactgcagacttgtgacatcacctctacaaatcctctgttggaggccttggttcttatgatccgtgggctagtccctgagcccctcaagcagggccagagtggcaaactaaaaaaccagatctgacaaaggataaagatagaaggaaggagaaactgggggtaggggttggtggtgggggcaggacagcccagaacaaagggctgggaaggcagagaaagtagtaggtggaggagaagggaaggagggcaggagagggaggcaaaacagaagctgaaggcagacagggggacttgatcaaaggagaggcaaatagggcaatcacccgctccctgtgtccctctcaggactttaatgagcctgcgcgtgggtaagagctccacttggctgactttcaaagcccttcctctccattagcacatctcagtctcacaacatctttgtgggtcggttttattattatcctcccaccagcatggcc

SEQ ID NO: 40898 - DNA, 1150 bp, Artificial sequence
  DNA replication origin
ctcacttttatttattattattattattattattatttttttttttttttttttgagacagagtctcactctgtcttccagactggagtgtggtggcatgatcttagctcactgcaacctccgcctcctgggttcaagcaattctcctgcctcagcctcccgagtagctgggactacaggtgcatgccaccatgcctggctaatttttgtatttttagtagagatggggtttcaccatattggtcagtctggtctcgaactcctgatctcaagtgatctgcctcggcttcccagagtgctgggattacaggcatgagccactatgcctggccgagtctcacttttaatcccagctctgcccaagtggaacccgggagtccacttgggctagtggacaagtgtcaggaaacgctgcccagagaggacgtgggcagagtcaagaagggggagttacagtcatctgaataaagacggaggggaaaagggacagtgcaaggctggcaaggtcagtgggaggtgggtggatggggtggcaggagcaggtcctgccagcctgtgtgtcaggacgtctgaccttgtcccatgggcagtgggagttactacaaggttctatgcaggagagaggctggtcagatttgtgtctaatccccacaaaccctgccctgtgagcttgaacaaggggtcttcctttctaggtgggaactcctcctctgcaggatgaggcacccagccttggcagtccttagctcccatatagttctggtgccggattaggatgcagaacaaggcgtgggctcagcagagccactttgggggtaacttttgggcatgggagggccctgggcctcaaattgctcccagtgcaattggtcccacaaggcaagatgtttccctatagatgcttagatggcctggacctcaccttgacgtgcctcctttgttcccagccacactttggcctcactgggcctgtgtcgatcctgtagccccacggctcttcttggggagggaagtctttgtggggtccttgtcgagtgtgtgggtcataggcctgggtgtgtgaaagggctgcaaagcatgagggaagggggagaaaccgctgtgcagggggcaaaaccactgtgtagaaggcaagggggagagtccgggc

SEQ ID NO: 40899 - DNA, 1637 bp, Artificial sequence
  DNA replication origin
aatgaagaatgcgtgcgtaccgcagctcctgagccccaggagtggttaaccctcacacgtgcaccatcctgcaccacccacatcgccctttcactcagccccatgagttagctgaggtggaatccttcaccagcctcatcttctagatgaggacaaaactggggctcagagcagcttagtagctgatccaaggtcacagagctttggaggaacagaggaatataagcctattgattgcctggcctccttccacgtaacctcccctccaaatcacctgaaactcagagaagatctggaaacacacaatactcgaaaccctgtgagtcaaggctggcagactcaaccacagggtagactcaaaagacctcctggaggaggtggggactcctgctggttcctaaaaatggtgggacaattggctagagcagagcaggcaccctggcaaaggaattgcatgtacaaagacccaggggccagagtgagcttttgagcagtggtgggagcagagaatacacctggagcagggagcacaccagacacagggagcacacctgggggagggagcacacctgaggcagggaacacacctggggtagggagcacacctgagacaaagagcacacctgggggagggagcacacctgagacagggagcacacctgagggagggagtacacctgggggagggggcacacctgggacagggagcacacctgaggcagggagcacacctggggcagggagcattctaggacagggagtacacttgaggcagggagcatacctgagactgggagcacactaggacagggagcacacctggggcagggagcacactaggacaaggagcacacttgagacagggagcacctctggggcagggagcacatccggggcagggaacacatccggggcagggagcacatccggggcaggggacacatctggggcaggggacacatccggggcaggggacacatccggggcagggagcacatccggggcagggagcacatccggggcaggggacacatccggggcagggagcacatccggggcaggggacacatccggggcagggagcacatccggggcaggggacacatccggggcagggagcacatccggggcagggagcacatccggggcaggggacacatccggggcagggagcacatccggggcaggggacacatccggggcagggagcacatccggggcagggagcacatccggggcaggggacacatccggggcagggggcacatccggggcagggagcacatctggggcagggagcacatctggggcagggggcacgctaggacagggagtacacttgagacagggagcacagcggggaagagggagcagagaacacacctggggcagagatgacacctgaagcagacacagagtatgcctggagcagggaaggtcgaccgactggggataggggtggagggcacctggcttgcccagggacttgaaagccaggctggatttctagaatatgggagctgggggggagatgcaaaggagggtgtgggggtgtaccaggactttccctccactgagtctgggacaggatttggcagaccttgctgtttgacctgaacggtcacttttcctttctg

SEQ ID NO: 40900 - DNA, 1090 bp, Artificial sequence
  DNA replication origin
gctcgggagggaggcggcggctgggacaggcaggttggacacctgggagggcacccggggacttccgcgaaggaggagggcgctggaaccgtggcgcgctcgacctggccgggcgcaagccgctggagaccccggccgagtgggcaggcggccggaccccatgcgggtcacctgcggccaggccgggcgtgcgtgtgagcgcgtgcgcagacgtcagcctccgaggcccgggccgccttctgggcaaggtgcgcgcgcccagcggccccggccccacgcgcccggacacgcggaaccgcagaccgcggcgccccggaggccgcgaaagggatgggcggggccgggccgcgggacccgcctcccattggccgggcgccggggcgaggcggggcgccggggtggggcggggcgagcgggctctggggggcagacgctggcgctgggcggcgggaggcgcggctcgcggggggccgaaggagcaggtgggcgacgctcgcaggggcgcgggagggtgccgctgggaccgtcatcaggagcctggggttctgccacctttcggagggatcagcgacctcttcgccctgcgggtgacagtggggcatctgcctgcgagagggggaaggagggagaacccagggccacacacaaagttctcctcatctggggacaggaggaggtgaaggaggaggagccgggttgatgctaacttggagctgcgaaaccttggggcggcgttcaaggccccctcccacacgcgcgcagagcagagcgccctgctcctccttcagctgctggcgtcgccgcgcggggagaaagaagccgtccctccggcgctgggagagctgcagagccgcgggcagagaaggaggccgcggccgagcccggcagcccgataccccccatccgagcgaccccctttggggcaggcggagaaggtggcataggcgaccaggagggttcgcccacctgggacacgcacccacagtcacctccaaaggaccccccctccccaagtctctaggagctgctccttcatcactggagtcgcccctacctctctgcccccagcccgagagccccaggcggggac

SEQ ID NO: 40901 - DNA, 1025 bp, Artificial sequence
  DNA replication origin
gggttcgcccacctgggacacgcacccacagtcacctccaaaggaccccccctccccaagtctctaggagctgctccttcatcactggagtcgcccctacctctctgcccccagcccgagagccccaggcggggacccccggatcggacgtccccaagcctccgggcacctggctcagcaggaggcccccggctcggggcagggcagggccggcggcggcgagccggagcccgccccctgcccgggccccgccgagccctcggagcccacccatggggcacctgccccttgcgcctccttgcccggccgcgcccagcccggcgtcccgagcagcgcaggggaggatccccgcgcagtgacccgggagccaccacagactctgggaggctcggcggctggagcagcaggcagctccccgcagctcccggcgcttccaggcagctctctgagccgtgccagaggcccggcccgccattcccaggtaggagacgccccaacagagctgggcatctgggggaagtggagcagccgggaagaaagggtagaggcttggaggaggaaagctcagtgattccttagatgaccagagaaagtgaaattgattgagcacctactatgtgccgggatcgtctggcaactttgcatacctagagagaattaaattcgttgagcacctactgtatgtgtcaaactgagtgctatacccttgacttaatcccaggaaagaaagatttattgagcttctactatgtgctagttttggtgccacaggctttgcatttaaagagctagagtaatagcccatttaaataggaggaaacgggggctcagggaagacgagtcaactaccacaaacactcctgtccctcttctggagctggctgcagcctgcattacctggaggtggggaaggaagattaagaagctccttcgttatccagagttcttgagctttttctgggttggtgcagagtgagtttcctggatgattcccttcccaggaggggtttcctgtaacttagctg

SEQ ID NO: 40902 - DNA, 998 bp, Artificial sequence
  DNA replication origin
cccgccttggcctctcaaagtgttgggattacaggcgtgagccattgtgcctggctcatcacttgacttcttataatgtgtttatgatatgtttcttctgctaaaatgtgaatgacaggagactaagacacacttctcccagcatagcgtagtgcctggcagacagtaggtcttagataaatatatcaggagttggatggatgaatgaagggagaggcatatcagatacaccttttggaagccccctctggctgcagtgagtgggttggaagggtgtttgaaaggaggccgggagagggggtttcagttatccaggtgggagccgatggcatgagtctctctggagagccaacatgaggatgatgaggggtcgggtttgaggtgggagacagaagagctggaatctcccaggtggagggcgtcgcattgggtggggaggcaaaggtggggctcgggattgccatgtgcgaagccggtggatggtgatgccgcccactcaactggggctccaagaggagagagtgcacatcggaaggcctcctgcggtgagcatcaaggagatgagtcacatctgtgttatgtggcatttgaggctcccaggggcccttcaagtgcaattgcctgacaggagcctggctgtaagggtctgaagctgaggagagaaggctgaccagagtgaaaatctggggttccatcagccatggagagggtggccactaggccatacagcgagaggaggaccaggaggaacgccgtgacttagggaaaggcagaggggggagggatggaggaagaaaggagagacggacagaagacaagttggtggggtcatggaagccgagggtaggggaaggtttgagaagaaataaatggtctccgatatcaaaagctgccaagaagcaggttgaagggtgtcgactaggcccgtgacgggaaggtcactggaggcttggagcccaggctgtggagacaggctatgttgcatgggaagaggaggg

SEQ ID NO: 40903 - DNA, 995 bp, Artificial sequence
  DNA replication origin
ttttactattattggcagctattattacaatgttgagcatacaggataggcctctataaatgtcccatgaatgggtggatgaaccaacagacaggctaataagttgtttggcagaccagtgggaagtggggtggagagatggatgaatgggaggaaggtggattgatggatgggtgagtgggaagtcggcaagagggtaggtgggtggatggatagatagaccaattgacaggcagagaggtctgttttggggaagaccaataggtagatgagagagagtgtaagatggacaaatggctggctggatgagtgagaggatggaccaatagtaatcagacagaaagactggtggtttttcagagcatggaaggaaggaaggaaggcgggagggaaggaaggaaggtggatgtgtgggtggatggatggatggctggctggctggatggatggtggatggtgaacagatggaaggaaggaaggtggatggatgggtggatagatggatggatggatgatggatgggtgggtgggtagatagatggatggatggatgctggatggatggatgggtgggtggatggatggatggctggctggatggatggatggtggatggatgggtggatagatggatagatggatggatggatggtggatggatgggtgggtggatggattgatggagagatgaatggatggatggatggatggatggatatgtgagtggaatcattgggtaggtgggtggagagataaatgcatggaccaataagcaggcagatagagaggtgggaggacagaagaccaggatgtggatggatggcagatattccttccccttgaactgaagccagagggatgatggcagcagctacagccttaccatgggcatcctgagggtgaggaagagaggtaggagatgattgttcacccagggcacccctggaatgaggcagtgagcagttgcttactgtaccccaacatccaaggttgga

SEQ ID NO: 40904 - DNA, 770 bp, Artificial sequence
  DNA replication origin
ccacctatggggttggagggattaagggagatactttgagtgaagtccatagtgcagtgcctggtgcaccaagtgctcagaaatgtgagtgtcatcatcacgattcaacagtggcacgcaaagatgacaaagacctggcccgagttataactgtgaggcctaacatggagggaggcactatctgaagcatttcctagcagtggtgtcacctaatggaaggcaatgatctagtatgggagatgggcacataagacaagcattggaacaccctggacagggtctgggaacacagcgggggggagagaaagggggaggagggtgatcttcctgaccccgcaggggaggggtgcctgggaaggcttccccgggagtggcacagccatctggagagatgagtgggcagagaaacttctaggcggccaataggggctggagggagcacagggtctgcaggggacagcaggtagctccatgtagttccaggtggctggaactctggtctctgtggacgcaaggaaggagatggggaaacagactcatgtaatgaatggggtgggccttgcccgtcacagttgagtgggctttcctgtggggtgggatcaatgagcaggagggccggaggaggcagggacggacagatttggtggtaggagtttcctctgggtacagggaggaaggagtggaggcagggaggccagtggaaacacaaggccaagcaagggatggtgaggtcaggcccagggcaacaggtatacgaatggaggggatga

SEQ ID NO: 40905 - DNA, 1422 bp, Artificial sequence
  DNA replication origin
gagactcttcaggcagggcagatgggatgccgctggggagggctgggaaccgatggcattggccatgaggatggcataaggtagcaggtgctaagcccttagcccggggctgggatgccagtgacactcgtgctcatgcctgaatcaacagcccatgctacacaactcttagtcgtcactcacccaagcccctgagcctggtctgcctcttcccagaggtgtgatttggacatgttttttcactactgtgtgcctcagtttcctcacctgtgaaatgaaaataataatttttcttctaattacttatgccaaaggcgtttgtgaggatcaaatgaattaatacacaccaagcgcctagaacaccttgttcttcccccatcatcaatgagagtggcctcaggggtggacggtggcaggaactgggtcccgttttcctgaatgtatttctttccttagtgaagggatcccaggctgcagtttctcactgaggaagggaggaggggtcttggggggaggagcacacgccacgtctcaccctttgctgagagggcccacaggcctcatgggaaggacacgtgctcggctggatcacctctgcccctgtgcagggagcaccaaggaccagagagggggtgcaggtgctgtgcaggggtggtgaggggacagtcacggtaatgggacaactatgggctgggaggaaggaggtggaaagtcctgcccgcagcactcaggctcccctaggtcccacccaccaccgtgtcgctgtgtggcctcggaaaaacgtctccgcctctctaagcaccagcatcccatatgctacatgggatcagtcatattgaaccaacagtggagcactgagtgtcaaagcattatccaaatctgaggaatgaggaggctgggaccattcccaagtggcctcagcatcacagggtctgaatgccagagttccgggagcccttggtggtcacgtagctcagatttgtttttccaagtgaggaagctgaggcccaaagaagataaaccttgatcaggctaccatggtgagagggaggccctgcacgccaagccctccccctttcaaaggatttgtgctagggactccgcaactgccctctggctctgtttctgtttcttccatctcgttctggcttctcttctgcttttttctctgtgccttcccactcttcctctctctctctctctctctccccctcccccttttctgtctttctttccctttctctctctctttctctccctctccctctctccccttttctctcctttccctctcttcccctcacctctccctccctctctctccctccctctctctccctctccccacctctctctcccttttctctctttctttctctttctctctctctttccctctctctctccctctctccccctccc

SEQ ID NO: 40906 - DNA, 1007 bp, Artificial sequence
  DNA replication origin
cctcgctgggggatctttggccttcttagtttggagatgggggagcagaggagggagaggagaggaggaggaagaggggaggaggaggaggaagaggggagaaggaggaacaggggaggagggaaggaggcggaggggaaggagaagaggagggggggaggaggaggaggggaggaggaggggaggaggaggaggaggagaaggagtcccactccaccctgcccccatgatgtgcgagcactaagatggcctgggacagaactggatacgacacagtttggggagctcttctgaaggctaataatggtaagttcaagtacacataaatgtctttctctctcaaggaacagtcccaggcttaaaagccttgtggggctgctccaccaagcagccctggttcttcctgtggcattgctcagccccgacccacacatccacattccagccccagccagcaaggaggactgggaagggagggcacatcccctcctaagggaaggcccacactcagctcagtcctcactggctggaatgtggtcacatggtaaagccggctgcaagggaggctgggaagcctctttaactatgtggccatggcacagctaaaacttggggatcctatcattaagggaagaaagagagaagggagacagtgtatctaagcagagaagcctgagcttttcctgctggttccccgtggattgagggtatcgtgcagggtctgacattcccgggtgctccgctgaggggaggtggagttgtggaggtggctggtggtccctggaaaactgggaattgagacaaaagagctctgagcccaaagattcagcacgtagacgcaaaaggtcctggccatgaacttgacagcacaagaccacagaaggcccggtggaccaggtacacctcagcaggcgtccaggtccccagaacaaaacagtcatcctggagcagagagcagggacctggggacgccccagcatctgcacacctgtccaagggcccatctt

SEQ ID NO: 40907 - DNA, 1040 bp, Artificial sequence
  DNA replication origin
atgggtgtttccacagaagaccaccccatggttgttagcaatggctggaaagcgtagggagcctccagcccatctgtccatccacccatccatccatccaaaaccaaaaaggcattgttctaggcactggggaaaagcagtaaacaaaatgaatcctgccttcacgaagttttcattctcaaggtggaggcaggggaacacggaaaagaaacacagtaaatcagtgttacggtgtattataaagtaatgagtgttggggagaaaaataagtttgggaaggagttatacagaattgttggatggggcaggagcacagtttcaaataggatcatcggggcatgcctctctgagaggctgatcttccagcaaagacgtgaaggaggtgagggtgtctgggagaagagcattccagatggagggagcagcaagggcaaacacctgcttgcgacgttcagggggccgcaggtggggcgccgtgccgggaacagagggaggcgggggaatgggaagggagggtaggagaggaggctggagagagagctggaggccaaaagtgcagggtcttagagctacagtaaggatttgggcttgtactctgagtgaggcggggacacatgggggatttcaggcagtggagttacctaatggcttagattttaggaggatcactctggctgctgtgctgagaggagaccgcaagacaaggcgatgccagggatatctgttagcaaatgttggaaacaaccctctggagaggggatggtgacctgaaccagtgtggtggcaacagaggtggtgagaagtggtcagattttggatctgttctgaagggagagcccacaggatttgttcatggactggacctgtggtgtgagggaaagaagagccaggataacggggggttgtggcctgagcaactggcgggatggagctgttggcacctgaaatggacaggtgggagccggagtggggtgagagcaaggtgctcaggatggacgtgtcacgtttgtgatgcccaaagacacatgcaaggggaggtg

SEQ ID NO: 40908 - DNA, 1167 bp, Artificial sequence
  DNA replication origin
gcgcggcgggccgggccgggtttcgcgtgtgcgtgcgggggcgcgagcgagtgctcatcacgacccgccagtggccccgcgccgacaacccggcgggcgggcgggcggggagcaagcggtcaggcaaggagcggcggccgcgaggcgcggaggggcgcggagtccgctcgcgcgcacgcacgcacgcacgcgggggcgggggcaggcgcgcgcccgcctgtcgcgacagtcggggccgaggcccagggggaggtggcctgtcgcgggtcgcccggctcccggaggcgaggggggcgcgggcggatggcggagggcgcccagccgcatcagccgcctcagctcgggcccggcgccgccgcccggggcatgaagcgggagtcggagctggagctgccggtgcccggagcgggaggagacggagccgatcccggcctgagcaagcggccgcgcactgaggaggcggcggccgacggtggcggcgggatgcaggtgaccgcgcgggacggggcgcccagttattgcgggggtgggcgtgagggtcgacaccgggctccccggcttggagagagggagggcctccgggagtcctgggttggaggtgggatggggggccattcggggcctggttggaaggtggggcgagctcgggctaggaacgaaggttgcaggactgaacctggtgtgcccgagagggtcctgattcctgaggggccaggaggcacgacgagtggataggttttggggggaaatcgaacaaggttgagatggattccattttttcaaatccttccttagtgccttggggtggagtggaagccgggaaatcctggcttctctggactgagtcgaggaaaaggagatctggtgggaaacctcccgagaagagggagtaccttttggcagccctgggcacacgctgggatggggaagagaagtggcatttcaatgagaggagtgaaaagaaaactcctcgagagagccccgaggggatgtggctgagattgtgggttaaatcacacagagtgtgagaagtacaaggagtttggtaatgttatggggacacggtggtgctcagtctcatttactttgtggagcatactaatgagtctgaagggagacactagacatgtccctcctgttctttgccaattgcattctacatcacca

SEQ ID NO: 40909 - DNA, 1114 bp, Artificial sequence
  DNA replication origin
cgcccgccgggttgtcggcgcggggccactggcgggtcgtgatgagcactcgctcgcgcccccgcacgcacacgcgaaacccggcccggcccgccgcgccgccccgcctctcgcactcccggagctcgcccaccggccgcgctggctcacactctccctcacagcacgccggccgagggaggaagggggcggtccgggctcccgaggcgtggggagggctgtttattttggggggaggaggggcgcgaggcaggaacgagctgactggccgggatcctccgacccgccactgtggcagcaccgggaaggcggggagagagaaagagggagggagggagggaccgggatgtagaactccagcccgcgcgggaggctacggcgaggggggcggtggcggcccgcggggggggcggggccaggccccctcggcaatctccgtagtctcctcgctggctgcccgagggaggccgggaagcgatcggggaagctcgggaatctccggcacgggcctgggattgtcctggaggcacagcgcggctggagtgcggggcagcgcggggggggcggggtctgtctcctttctgggcggggccgtatcctggagcaggcggggcttgagagacccgaaggccagggagtggctcctgcttgcggtactagttgtacagagttaagtcctgagtttactcgcctgagcaccttggttcccggagagggaatgggcactctgtgagaggcaggctatttgcctgcttcccctcccgcagaagaaaaaatgtctcaaattggaaggtcgaggaatgaagccacccctctatggttcaccccagttctgagagcttttactctaatataactcacattcctaatgaagttagtaataatacccgatgtttgtaagagctttagagtttgcacaatgcatccacagacccgtttcaaactggtgatataagtagataccatgatctccatttcattgatgatgaaactgaaccttagttaaatcctgcagcaaaaaagtggcagatccggaattcagaacacgagaacatattctctttcttcgtaccttgctgcctgaggagcactttatgacttaccaacttcgtgg

SEQ ID NO: 40910 - DNA, 941 bp, Artificial sequence
  DNA replication origin
ccatctaggaggtgaggagcgcctcttcccggccgccatcacatctaggaagtgaggagcgtctctgcccggccgcccatcgtctgagatgtggggagcgcctctgccccgccgccccgtctgggatgtgaggagtgcctctgcccagtggcgaccccgtctgggaggtgaggagcatctctgcccggccgccccgtctgagaagtgaggagaccctctgcctggcaaccgccccgtctgagaggtgaggagcccctccgccctgcagccgccccgtctgagaggtgaggagcccctccgcccggcggccaccccgtctgggaagtgaggagcgtctccgcccggcagccaccccatccgggagggaggtgggggggtcagccccccgccaggccagccgccccgtccgggaggtgaggggcgcctctgcccggccgcccctactggttagtgaggagcccctctgccaggccaccaccccgtctgggaggtgtacccaacagctcattgatagcgggccatgatgacaatggcggttttgtggaatagaaaggggggaaaggtggggaaaagattgagaaatcggatggttgccgtgtctgtgtagaaagaagtatacatgggagacttttcattttgttgtgtacaagaaaaattcttctgccttgggatcttgttgatctgtgaccttacccccaaccctgtgctctctgaaacatgtgctgtgtccactcagggttaaatggattaagggcggtgcaagatgtgctttgttaaacagatgcttgaaggcagcatgctcttaagagtcatcaccactccctaatctcaagtacccagggacacaaacactgcggaaggccaaagggtcctctgcctaggaaaaccggagacctttgttcacttgtttatctgctgaccttccctccactattgtccta

SEQ ID NO: 40911 - DNA, 1917 bp, Artificial sequence
  DNA replication origin
cccggccgccgcccgagcgctcgagaaagtcctctcgggagaagcagcgcctgttcccggggcagatccaggttcaggtgagcgagccccaccgcggtcccgccccgggcaggcggcggcgggcgggcgggggcgagacgcgctgccgccaggccgactggtggttcttgggctcagtgcggcccgccacccgcgcgggcgggggcgaacgccggcggctcagggcccggcaccgcatccttcccagggggaccgggacccccacgcgggcgctcggggagggcgccggcagcagcgaggcctaggggtgcaggggcggcctcgggacccggcgctccccggcgccccccgtgtcccccggcgcggtctcaggactgggcactggagccgacctcccccagccgctggggcacgcgccccgccctcgcctcgcccaggcccgactcgggcaaactttttaaccccttccgggagccgcggcccctgggacgcagcctcacgggttgggagcccggggcagccgctcccgtggaagtttctggcgtctgaggcacggaggtaacgggcagcgggcaccgtttggcagctgtcagggcgtcctcctgagtcagagtcggaccgtcccgctgcagaccttgcacccggcccggtttccgcctccgcggccgacttcctcattcgcccgctgccgtcggactggtcggggagggcccgggggaggtgcggcggctgcccggacaagggggacccggcggggacccgggcgcgagacaggaagggccacccccagtccctgctccagccctcgacctccgacttctgatcctcgggggagggaggcccggaatgcagcagccgtcggggccgcccaggcgtgcacctgattccaccgcacccaggggccatcccgtctgggcggggtgcgggggcagctagctctgccgttacgagcaggcctgggcgattgcatctttcctgtttgagccaaatcggagttttctattctccactccacgcacccgcttccctgtgctggggtcctcaccccatcctgttctggggccacgcacaggagacaggactgcggcaccctcattctccagggaagccccgctgtttcaaactgagactcagcacccccagcactagcttgccggctgtcctgtggtggggggcagggtgagcgcacggccccacccagccggtgtggagagaagactccttgggaagtcccaggtcgtagaggcaggcggctgtctccaccgggcagttgagaggcccagccacttctcggttcactgcgcccttttctgggtttaacaggatttcaaagtgactgatgagtaaccgtggaaagggaagagagccttagctccttctccgtgcagcgcagcactgtggccattctaactacactgtctgggccagtgtttggctcacctgatggcttaggagtccctttttggtaaggagggaggccttttgagacaatcactcaattaataatagtcagtttatatacaaggctgctatgtgtgggggaaggggacacagatgtgtaattgagcaaatatttaactgccctctctgtgccagggactctgccaggtggtgggggggtgggaggttgagtaagacctggcccgtgcccatgggcacttaggggagaactgagacaaatctgtagatgagtctaacgtgaggtagagatgacagggaccccggaaaggtactgtgagtcatggggattgggagaagggagccagactgccctgtgaaatccccggggccctgcctctgcccttggggagtttacagtcctcaaggggaaagtggcagaaccagtgaaatacaaaggcagcctgtgatgtgtgtcccaagtatgccatagacaaaggactcaggaatttcaaggct

SEQ ID NO: 40912 - DNA, 1326 bp, Artificial sequence
  DNA replication origin
gaggccgcccctgcacccctaggcctcgctgctgccggcgccctccccgagcgcccgcgtgggggtcccggtccccctgggaaggatgcggtgccgggccctgagccgccggcgttcgcccccgcccgcgcgggtggcgggccgcactgagcccaagaaccaccagtcggcctggcggcagcgcgtctcgcccccgcccgcccgccgccgcctgcccggggcgggaccgcggtggggctcgctcacctgaacctggatctgccccgggaacaggcgctgcttctcccgagaggactttctcgagcgctcgggcggcggccgggtggggcgagcgcacgaggcgggagctgcagcaggtcagccttgcttagccttccgtgccctgcccaggaaccgcggtgatctgcgcgcctcaccgcacccagctcggctcctcgccgccttcccgccccgccctcggagccgcgggaccattcccagccgggagccggctccggggcggagcctggggcacaatcccgcccccttcctgctacacccactgcaggccgcgcctggccttgatgggcagacgtattggcctgtggaaagggggtgggcggagcctctgcggccagatgggtggggattcaacatcctctttccgccccacctccacccgctccaccttcccccgcgcttcctaggcgggagccccgccctctagggcgggtccaacggacagccaggttctaggacaaggattgacacagggggaatccaatcaggaggcggcgactcggggcgcggagagctccgggccggggttttggtgccttgcctgggccggggcgaggccctgcgggagccgactgggaaggtctggaactctgacaccccgccccgcgagctgtgctctcagtctcatgtcatcccaccacaaggacagatattaagtaccatatatgggaaaaatgctattttacataattatgatccctgtgggggcgggcatggactcagccctggattccattgtgagcgtcttgagttcgattcctgaccctgcctctttaggatccgcacgttgctgcctttcagcctccaaaccttcgctctggccgttctctccacctggaatacccttccgagcctctcttcacctccatgtcattaactcgcatacatcctttcaggtacttgttacaaattgcactttttttttgttactgtccactacaagaggataaaaaatgttttcatttttaaatgaaaaatcttttgatccatttggaatttatttttggggtaaggaagaaacctaagataatttttgtaatagccact

SEQ ID NO: 40913 - DNA, 1230 bp, Artificial sequence
  DNA replication origin
agaatgccctacatcccggcagatgtgagggttgatgaccatcacagttaggggtctcttctctccccgacccctactgcctgaaattcattcattcgccaacaaacactggttcaagatctatatatgtgccaggaactaggtatgcatagctggaaaaggaagaggccagccttcatggcactcacaacacatacatgagcaattagagcacaggaagaggaatttggtcaacgagtttttcatgagcagctactatatgccaggcattttacaaacattaactcattcgatcctcacaataacacagtgaggtggggattattttacccccatcttgcagatgaagaaattgatgctcagaaaggttaagtaatcactacaaatgtcaggaagaagacgctaagaagtatctctctgaagggtgagcacgtgtctgggagtgtgcaaggaaagggctttccagaaaggagcagcaggtgcagggctgggaggcacggaacggcaaccagggaactgtaagctcacagagccctgtgcactgagccgagggaggacactcaggtgatcgggaggctgtgaagcggagtaactgtcaacgagtggacggcaagtagcaattggacagatttgggtttttaaggacccgggctatgaagagagcttggagggagaatatggtgggctgcgtcatgctggcagcttcctcttagggttaaagtcttgtctggccaagaagggcccagttagccaaacacttccagtggatccaaggctcatgtttaccgaggcttgggctcagcctggctaggagacttcctttgtgccagttagagaaaggcacctgcttggggctgaccggattggggaagcctcgccatgtagccgggaggctcaggcttggttatctgggggctccgaggtgagctcacttaaaggaccctccctcggctatctagcgaggacctgcggcccaggtggggtgaaggaaaaaacgccacacagcacaaaccgagtcagtgccctagcagggcctgaggagggcagacccctggggaaggcaggccccagggtttctgcaagttgagcccctgcagggtggagcccgtcgtgagtcttagcctgggtagggacccctctcgggacctggggacgccgctgaggaggctccaccctcgcagagaagtttcccccctcgggggttcggccgggcctcggtgcggagccagc

SEQ ID NO: 40914 - DNA, 1285 bp, Artificial sequence
  DNA replication origin
gcccgcgggcctgcagatggcctacttcctgcagcgcgctggacgcgactacgcagtgttcgagcgggccccgcggcccggcagcttcttcacacgctacccgcggcaccgcaagctcatcagcatcaacaagcggtacacgggcaaggctaacgccgagttcaacctccgccacgactggaactctctgctcagccacgacccccggctgctcttcagacactactcgcgtgcctacttccccgacgcccgcgacatggtgcgctacctgggtgacttcgcggacacgctggggctccgtgtccagtacaacaccaccatcgcccacgtcactctggacaaggaccgacaggcctggaatggccactacttcatcctaactgaccagaagggccaggtgcatcagtgcaggtaaggccggtgccagagctcacctgcggaagctgggaccttccccacacgaaccacacaccttgattggccagtaggtatgggaggaatggacgaaaaagggtatttcgcttttttttttttttaagacggagtctcactctgtcgcccaggctggagtgcaatggcacgaggtcagctcactgcaacctccgcctctctagttcaagcgattctcctgcctcagcctccccagtagctgggattacaggcaagcaccaccacacccggctaatttttttatatttttggtggagatgagatttcacgacgttggccaggctggtctcgaactcctgacctcaggagatccacccacctcagcctccccaaatgctgggattacaggtatgagccaccgcacccggccttcaattctatttttgaaaccactctgtgatcaaagcattcttctgcaagccggcaggatccaagtccccagctgccctcccctggatggcgatcctcaccaatggaaggagcaggactttggaatcaagcctatctgtgtttagactctggctctgctgcttttaggagctctcaagccatgggcctgcagggcctgtgcctcctcacctgtaaagcaggccacataccacctccaggttgcttggaggagtcagaaagatggtgcacagatacacttagtacagggcctggtacagaattactgctcagtggatagatgtatctgtcagaggactcagaaaggggaaagtagaatgtcaggtttcatttcatcaccagcagtcatacctggtctgactgctatgtgcaaagttaggtgaattctccatttctcatactgtcatcttctcctctctcacagggc

SEQ ID NO: 40915 - DNA, 1179 bp, Artificial sequence
  DNA replication origin
cacccctttgaaccaccctccaggttggaccttccagaggccttggcccctctccagcgaccgggtgggagcctgaagtgggtgtggcctgcgtgcgccccgccccctgccagggtccgcgcgccccaggctcttcggccacgtgacagggatgccgcgcacacctgccgcccgcccgcgtgcgcttcaggagccgccaggtccctacgcccgcagctccggcctccccgcctccgaccgaaccctgagaaacgcgcgaacctcccagccgctccggctgcaacccgtggtctaatgaggccgcgcttggctcgcttgctccgcggcggctccgcccctcgcgcccggaccaatggcagggggcggggtcacgtgcgcggcgcgcggcacgccgggaccagctggcaggctgcctgctccggcccagcgcgggagaggcgcgcgcgtgctgcgttcgctgctccgggggctggtagaggggcctggggctagcgcgcacccgcgagggtggaaggtctggagatccgggatggggaactgggtccttcgttttaaaaggtgcctctctacacggagggaggggagcacgtgatttttggagctaatcctagctctcatattccatgaatgtagccaaacgctaaaactagttggcctacccagttttgtgggactggaaaccagcgtggtggagccaggaccgataagccaattaacaagcgtttgctacagtgactcagtgtactgcttaccaagtaacatacacgactgtcctaatcttccaccaaataggagaggtgggcaaggcattgtttccgacatttggtagctgactggtcaaatggagacatagggatgaagggatatgtttacaatcacaggaagtggagcctggaattaaaactcagtggaggcaagataaatggcaggaggaagataacgtgaactggatgatgaaggttggcttcccaggggtggcaagtggcccctgcatgagatttacatggggagaaatacgaagtcagtgtaggaaccttcaaagtccagtgaaatggggctgagtgttcttgggggaagggcaggtggaaagaactgcgagcctgcagatttgcatggctggagattctttgaattaaaaatcgtagctggggactccttagaaaaattttcctgacctct

SEQ ID NO: 40916 - DNA, 865 bp, Artificial sequence
  DNA replication origin
ggcctaaggggggagatattaaagcctgtatgatactagtgggaatgttctagtagagagggaagaagggaggggctgggggcagtggctcagccttagctttaggaagctgaggcaggaggatcccttgaacccagcagttcaagaccagcctgggcaacatagcaagaccctatatctacaaaaaataaaaacaaattagccagatgtggtggtatgtgtctgtggtcctagcttacttgggagtctgaggcaggaggatcccttgaacccaggtgttcgaggctgcagtgagctaggatagcaccactgcactccagtctggtgacagagcaagactctgtcttgaaaataaaatcaaaataaaaaagtaaaagaaaggaggacagaagggatgacctgcagagatgggggagcaatacaggtgcactgtgcaaggagatgaggcccaggacacagcacaaggggggtggtgctgtgccaggagggacagcagagctcgtgggtgcagtgctggggatgggcagacatggtgggagggtgtaacacttctcttctgttgcttctattttcccaacgaaatgggaagcaggatcatcaactgagagtgaggaagggttggggacgggaggacaggggaagggaagcgagagtgggagacagtggaccaggctgtgaagtgtgtgtgtcagtggcttgaaggtcacttctgagattctgtggttttctctggccacatttgtggcatgggtgcagttagctggagagttgcgtctaaccaggaggaggtttgtgaggtgagtgcaacagggagagggtggaatgggagggattatgaggatggatatggagtctaagctgggta

SEQ ID NO: 40917 - DNA, 1464 bp, Artificial sequence
  DNA replication origin
ttaaaaactttcgactctgaataaaaagatgtgccccttttcccacaaagagaaaaaatcatgtagttgctcttccttatgctatcaccaggtaggaaaagtccagtctctgcgagggcttggaagcattctctatattctaaggtgctgcatcagttacttttaggccctaagcactaaaccaacagaaagaaggtggagggatgaagacaaactaaaagggaagagccatggaaatacaaccaacaagcaaaagaaaatgatccatcgattaataggcagagagatgaacagatagatgatagatagatctttagcttctaacttactcgtgaaaaagatacaaattcttagaataataaaaaaagaataatttttctgtttttcattctcattctttttaatggataaatgtataaataaagaagttgacaggaaaagaaaagaatctgagacataaaggccagaatcagagtttttcagatgtgctgctggtggtggtgatgatggtgatggtggtggtggtgatagtgatggtgatggtggtggtagtaattgtaaccatgatgcaggtggcagtaatcatgaaggtggtggtgattgatggtgacaataacggttgtgataaagatggtggtgatgaaagtggtggtagtggtggtggtgatggtgatggtagtggtgatggtgatggtggtagtggtgatggtggtggtggtggcagtgatcatgaagatggtggtgatggtggtgataatgatggtggtgttagtggtggtgatggtggtagtaattatagccatgatgcaggtggtggtgatcatgaaggtggtgctgatggtggtggtagtaattgtaaccatgatgcaggtggcagtgatcatgaaggtggtgatgattgatggtggtaataatgactgtgataaagatggtggtgatgaaagtggtgatggtgatggtggtgatggtggtggtggtgatgatggtgatgatggtggtagtgatggtggcagtgatggtggtggtaatggtgatgatggtgatgatggtggtagtgatgatggtgatggcggtggtaattatagccatgatgcaggtggcagtgatcatgaaggtggtggtgatggtggtgatggtggtggtgttgatgatggtgatggtggtggtgatgatggtggtggtagtggtggtgacagtgatggtggtggtagtgatggtggtggtaatggtggtgacggtgatggtggtggtagtgatggtggtgatggtggtggtaattatagccatgatgcaggtggcagtgatcctgaaggtggcggtgatggtggtgataatgatggtggtggtagtgatgctgatggtggtggtagtaattatagccatggtgcaggtggtggtgatcatgaaggtggtggtgatggtgatgataatgattgtgatgcaggtggtgatgatgaaggtggt

SEQ ID NO: 40918 - DNA, 987 bp, Artificial sequence
  DNA replication origin
agtgtcagggagaaatttgaggatccaaggaaaactactggggattcatccacagggtgtccactgcgtgcaaggcagtgctccagaagcttgtgacatgtggggaacaaaacaggcaaagagtttcaccctgggggagctgatataagtcagacaaaaaccagcaatcataaatcgccttcagcaaattctcctaaagtagatacttaagtgaaatccttcaataagggtatcagaaggtgatacttggtatgaaacaaagaaaaagtaagacagcatgagggagaggaggggcatggggtgtgaggtgtggacaattcaaccttagtgtggtcagggaagaagaagctcactgagcagactcgcaggagataaggaagtgagccatgtgcgtagcaagagggaggagggagcggctggtgcaaaggccctgcggcaagagccagcctggcgtggggggtgactgcaagggaccagtgtggctgagcagagcaggcaggagagagctgtgggacctgagtccagatcaggagggtcctgggggcccttatacctttggcttttaccctgagcaaaatggaagtcacaacctaggcttgagcagataggggacacagtctgactcctgtcttcaaaggatcatccagtctctgtgttgggaagggatgaaggtggggccagtgtaggagctgggagcagggtaggaagataatggggtaatccaggcaagaaaggatggtggctcagactagggtggaggtggtagaagggaaagaggggatcaattcctgacccatgcatgatttccaaatggatgagatgtgggcaagagagaaagagaggaagccagggatgactgcagggctttggactgagcatgaggaggatggagttgccagcctgtgaggtgaaggaagttgcttgagtagcagggtcggggagtgagggagcccaagagtatggatgtgtggggcttgaggtgtcttc

SEQ ID NO: 40919 - DNA, 1396 bp, Artificial sequence
  DNA replication origin
gcaagaaaactgcctcttcatttgcattaaattattaagtagcaacattccattagcaatattaagtggctatcatttaacctagttagttgcactttcagctgagggttttactcttccgaagcaatagcaccaggaagccttctcccctggtgccctgggtcggagccctgccttcacgcacggttactttctgtgaagcaggcagagtgaaaggcaggtctgatggacacttggaagctagagtcccagcccccactccctctcgtgcagccgtgggctgggcagcccctgcaggcctccgcttaccccagctcatcctcctcgatgaagccacttttgtccttgtccagcatgtgaaacaccttcttcacatcatccgcactctttttcttcaggccgaccatttggaagaactttttgtggtcgaaggagtcggtagctgtggggggaagagcagggtcaaacaaggaccagaaaggctggtagggaagcctgggagaatggggggcatcaaggcatttgttgatggattcccacatgccagtcatggggaatgagaggtacccacctccattggagggctgagggagcccgggcaagggaggataacctgtccaaggtcacaaggctgggagtggaagaggtgtgctcaaacccagacctccctggctctcaagcccgcccccacgccccacctccactgcacccattgctgatgatgggagcagcacctaagaaccaaaggcttttgttcttctgagaaccttgtgcccaggaagacttttgagtgccagctggttgggagtgggctggggaattgaagggggcatgaacatggtcctggggttagggggaggagggttgaccttctttcttggccacagactttgttgccagaaaattgacatagaaaggacaggtttccctcaaggtcatacagtgggaggaggaggggcaaacccggaagtcctggctctgcgcagaaatccacttcggaggcagtgggaagggggtgttaggaggctcccgagaaacacccagttaagtttcttcccacatgggcttgaggtgaagggagagggttatcccaggaccctgggagggtggcttcccagagaggttcttgtgcccaggggagggggtgcaaagcagaaaggaaatgggggtccttttctacctgcaattttctgtatcttggggtcctgttttagaacacctggggaagggtacaatgttagatcatgtattttgtgtgtgtgtgtgtgtgtgtgtgtgtgtagggaatggctgttgaagtcatgttctcttcccctcagcacagggctagagacaaggaaagttgccctgtccacctccgacactaggctgggcaacccagttctaataccccttc

SEQ ID NO: 40920 - DNA, 919 bp, Artificial sequence
  DNA replication origin
ctcagcggcgcggctggactgagccgctcccgctgcgctcagagtccgggcccctggcgccatgccaggcccggcgggcgtgcgcccggcgcgcagcactgcagcgctggtcatatgagcagaaatgatgagaaaagcactttttaatcttttcgcacttgctctgcccgctcaaacagttgcaggatgtcgatgacagacttgctgaacgctgaggacatcaagaaggcggtgggagcctttagcggtgagcaagcgcgctcccctccccatccctctcccctcgtccaccgcccgcgcccctgcactccgccggccccgcagccggcggatcctccccagcgcgcttctgcccacacttcccgctgggcgccggcgaggtcggggcgggggcgtccttggcagttcccaaactctgtccgggcgaggcttggcgcggggagcgggcggggaagagggcgccccgcctaagttacagaaacttgagggtgctgaaggcccggtggctgggaggactcagggtccgggaccaagggcgaagaccagggtcggaggagagacctccagggtccttgtacgagctctctggacgtcctctttaaggcacttagaggggactgcagggggcatcctcctctccaagagacccctttcctggaccctcattctggacaggacttttcccgccaggcggtagcctttgttggccccctgactgtcctagttcctttactgagattcagcaacggacctgcgggcgaggtgaccttctggagccggcgcacagctctgcctaagcccgcacggggcatcctcagtgcctcaaacctccagcctccttaggcgggcaggggaggggaactggcagtctcacctctcccagctgcccgggacttcagcgctaagctgcccgccttcc

SEQ ID NO: 40921 - DNA, 1822 bp, Artificial sequence
  DNA replication origin
gacgcccccgccccgacctcgccggcgcccagcgggaagtgtgggcagaagcgcgctggggaggatccgccggctgcggggccggcggagtgcaggggcgcgggcggtggacgaggggagagggatggggaggggagcgcgcttgctcaccgctaaaggctcccaccgccttcttgatgtcctcagcgttcagcaagtctgtcatcgacatcctgcaactgtttgagcgggcagagcaagtgcgaaaagattaaaaagtgcttttctcatcatttctgctcatatgaccagcgctgcagtgctgcgcgccgggcgcacgcccgccgggcctggcatggcgccaggggcccggactctgagcgcagcgggagcggctcagtccagccgcgccgctgagcagcgccggccgccggcaagaaggcgcgcggacctgctaccactcctgcaccgccaggccaggggtccgcgggatcccaggggctgcggccagggcacgagggaaggggccacctctgggatttagggggcactggcgtcaccagctgggtctggaaagtccacctgccgtcaaggacacgcaggaggtgcgccgtctcagatctgggaaccttggcggatgtcctgccgcgtgggggaagatcctgaaccttcagcggccagcctgcacctcaggacctcctaggccctgctccctttctctctccactcctacctcagcctctgctctggtctgtcctggatgcaaatttatgctgcaaaatctgagcgctgaggtcctgaaacctgacccacccgacgcagggaggaggtggcagggacagggacagggacaggcaggagctgctggggcccacttcgggtgccccatcccacatctggccagggatgcatattctaaaacctgatttgatgttttacttttattttttatttttttgctggcttgatttttcgaagaacacttctcagatctctactaactacttgctttcctggtctcctgggtcctggcatcatgggtccagactccccctactcctataaaccttttttgggcagagtagggtgggagagtccgcttggaattgctatgctccctcccagaaagccccatatgtgtttggaagaagggtagcaccttcagaccacactttctagacaacctaagcaggtgtaggggtctgaacttcacctctggaaaaatgtcacggtgcctatctgtatgcagccagagacccgttgtgttcttccccatggttcccaaggtttcaagctgcaaccagctgcttctagagtgtgtgagcgctggacagggagtcaggaggcctgggttctagatcctgggctgcactaagtcccagtgtgaccttgggttgtgaccttctctgggcttctgtctccttctgatgtgttgatgacgtcagtggtcccatgtagtgggacctggggactgcaacttaaggtattggcaggtaggcagggccttgggctgtggtggccctgggtggtggggaccagggagagcagctgtccagctgcccagtaactcaagttccctgacatcgctgtcaacattgtctcctgcagctcagccctggatggctgcccttcctggaaaccttaggatacctctgctggctccagctgccccctccctgtgagtcagctccttcaagccacagcccgccagatggcttccaaggcaccaaggatgcagctcctgacctgatgcctctcagctccaggacttcccaggacccctcagctgccctggaccctgctgctactgccgtcacctctgcaccttgtccccagctgggct

SEQ ID NO: 40922 - DNA, 886 bp, Artificial sequence
  DNA replication origin
aatgagaagacctggaatagctttatggatagaaacatggagagccaggggtgccggcctctgaaaaccgctgactctccaggaaggtctccaaggccaggacccagtgtccttgctggggaaatgaggagccacacggagaggaagaaggggagaatcagagaatgtgaatgctggaaggggctggggctgggggctcagacgcactgtggtctggaagggcctggggctctggaaagagggtgggttagggctcaaggggccggggtgaacagagctcttggccacctgggtttatgttctgccctggaagactccaccccatcccagtgctgcccagaggaaccctgggaaggggttacggccccacgtggactggagtgtgaaaggggagcagggcacccctagatcatggctgaggtcatgggctgagggcgcaagaaggaggcatgtactcagaaggccggagaggattggaaagaggaggtctctaggttctcccttcttgggtggtactggagggtgggcctggaggagccgagggaggaggctggtccacagggcttgagaacgctcggccccaaggcatcttcaccccagctccaaacgtaaagggggtcctagattaaaaaggtgacgtcccctctcactgtatcctctcttcctcagtcccctccccattagtccctcctgcccccatcactggcacagcccacgccctgcaacagagtagaatggtccttgacagaggtgtgtgtccgtgtgtgcctgcatctgcgcggtgtgtctgtgtgtggtatgtgtggtgtgtgtctgtgtgtggtatgtgtggtgtgtctgtgtgtggtgtgtctgtgtggtgtgtgtgtggtgtgtgtgtggtgtg

SEQ ID NO: 40923 - DNA, 1284 bp, Artificial sequence
  DNA replication origin
gccttcctgcacattcctttgacatgacaggctcctcttttgagggctgttttaacctctagcttctccctttgatatattcaggaggccccaaaaatgctgagccatcatcctcactcctgatggccttgccatcattctgagaactaaaaaagaattaaattgcagtggaaatggtcacagaatgctcttttctctttggaaagctaatgttaatttggagtgagatttatgtaggaagcttaaggaatctgttaaaagaaacattgagttgattttctaattgaccaccatgttgcatttacatgtgtgacatctgcagatgctccaatagtacgactacacacataaagctttagtgatttggtgattgccaaaaaggcagtattttttctgattggcataatttctacctccaatttactggaacactgggcatgactgagacgcctttttagtgatgtctgctgttctgcatgttcaataaacataaaattgagaggcttggccatggttgtgtatgtgcagcatctgtgatccaagtggaatttaatggtggaattggggcttaacaatggaatcctgggagtgatatttgggcctcagggcccttactctgcagaaatgagtgatggggcctgtattagtccattttcacactgctgataaagacatacctgagactggacaatttacaaaagaaagaggtttattggactcacagttccacatggctgggagccctcagaatcatgtcagaaggtgaaaggcacatctcatatggaggcagacaagagaagaggacttgtgcagggaaactcccctttacaaaaccatcagatctcgtgagacttattcactatcatgagaatagcaggggaaagatgcgaccccatgattcaattatctctcactggtctctcacacaacacatgggaatgatgggagctgcaattcaagatgagatttggatggggacacagccaaaccatatcagagcctattcatatggagccgactctgtgtgtgtgtggtgtgtgtgtgtggggggggggggtggtgtgtgtgtgtgtgtgtgtgggtggtgtatgtctgtgtgtttgtatgtgcgtgtgggcagtgtgtgggggcagtgtgtgtgtgtgtgtctgtgtatgtgtgtgtgtgtggtgtatgtatgtgtatgtgtgtgtgtgatgtgtgtgtgggggggtggtgtgtgtgtatgtgtgtgtctgtgtgtgtgtggtgtgtgtgtgtctgtgtgtgtgtgtgtgagtaagg

SEQ ID NO: 40924 - DNA, 1499 bp, Artificial sequence
  DNA replication origin
ctacgctcatccggacagtttacctgggcctcctctgagtcagccctgccttaggcatggaagctgcagagatgactcagacaaggcccagcccacgatgaagcctggggaccagggtgggtgctcagcccagagagttcgaacccttccctgtgtgctcacccccaccaggtttggaaggagcacccatcctggagtcagggagacctgggttcaattcccagctcctccactaaaaaatggggtggcctcagagaagtcgcttattctccccaagcctcagtttctacatctgtaaaatgggagactaaagtatgtaaggcacttctataggaactcagtgagtgttctctccttccctccttactgcacgcttctcctcaggctctatttgacttcactggaaacagcaaactggagctgaatttcaaagctggagatgtgatcttcctcctcagtcggatcaacaaagactggctggaggtgagttcagaagtgaggatggaggtgagattgaaggtgaggttggagggaaattaaaagtgaagatagaggtgagggtggaagtgcaattggaggtgaggatgaaggtgagggtggaggtgagattggaggtgaggatggaggtaagagtggaggtgaggatggaggtgagattggaggtgaggatgaaggtgagattggaggtgagggtggaggtaagagtggagatgagattggaggtgaggatggaggtgagattggaggtaaggttggaggtgagattggaggtgaggttggaggtgagattggagatgagattggaggtgaggatggaggtgagggtggagatgagggtgaaggtgaggatggagattgagggtggagatgagggtgaaggtgaggatggaggtaagggtggacgtgaggatgggggtgagactggcagtaaggttggaggtgaggatggaggtgagattggaggtgagggtggaggtgagactggaggtgaggatggaggtgagattggaggtgagattggaggtgagggtggaggtaagggtggaggcgagagtggaggtgaggatggaggtgagactggaggtgagattggaggtgaggatggaggtgagattggaggtaaggttggaggtgaggatggaggtgagattggaggtgaggatggaggtgagcgtggaggtgagattggaggtaagattagaggtgaagatagaaatgagaatggaagtgggattggaggtgagtttagaggtaaagatggaggtgaggatagaggtgaggaaggtgagtttgcaggtaaggatggaggtaagattagaggtgaggatgggggtgagtttggagttgaggatgaaggtgaggttggaagtgaggttagagatgaggttggagatgaggttgggaataaggatggaggtgaggttggaggtgaggatggaggtgagaatgcaggtaaggttaggctgagattagaggtgaggctggaggtgaggttgctt

SEQ ID NO: 40925 - DNA, 677 bp, Artificial sequence
  DNA replication origin
catcaacataaataggaaacgtgggaggctcactctgcctagaggctccagaagaagactggtctctcccaccacacagaggtatggcccggcgtccaggagcagggctgaggggtggggtcagagcaggggggaatgtggggagtccaggatgaaaaaggacagggggagcctggggggcgtcctgtgggtagctgtgccctggggacttggaggagttagggcttggcctcttaggatgacctgagcccagactcctagggcggccagtggatggggaggcagccaggggtgccaagctgcttgggtgttgtaggagagctctggggaggactcagcctcgctagcgggatctggttggtcctggtgggaaggacgcctagtggggtgaagagagctcaggcctgggagtcaggcacctatagtctgtcttcgctttgtcactaagatgctggtggtagtgagagcaccccctgtccaccctgggcttctgtctcctcatctgtggaatggggagcatggatagtccctgacatcttggtttagaaagagagagaacgcatgctcgtgtgtttgcccgtgtgtgcatttgtgtgtgtgcctgtgtgtgtatgtgcatgtgcggatgtctggggatgcaggagtgcagagagactaagaggcagagggtgaaacct

SEQ ID NO: 40926 - DNA, 928 bp, Artificial sequence
  DNA replication origin
gacttaaaaacaaaacaaaatcctccctgttgtttagtttgagccactaggagctcccatttagcaaagggagatggggaagacagaggcagcagagccactcgggtgagagggggactttggttgaggacctttgtagtcggagatgcctgttgtctaagtgacaggtggagacgccagtgcgcctggagggctggagcttaggggaagtgtgggctcaaggtcgcctttgggagatgccctcatggctggaggtggtctctgcagagtggatacagcagagaggaggtccatggactgggcctggggcgtttcacccttggcagccgagagaacaaagaggcagcagacaaggagaaagaggaggatgggcagggccctgggggtgctgggtgagctgtgggcagagtcaggtgcaggaggaactgcagggaggccgcggtggtcctccttgtcaggggctgcccctggtcaagtaggaagaaggcggaggcccaaccatgagattctgctcctgggatgtttgctgacttgaaccagagcagtttgggtggcctgatgggggcaacatcctggggaagtgggctcaggaagaaatggctggaaagacactggacatgatgagcgtggacaactctttatggggttgctgctgtcaagggaagcagagaaagggggaccgcagggttgtgagctcaggagatgcccaggcgctgcactcctgtgggcatctgtgagggggttggggcaggtttgcaaggcgattgggaaagatcctgggagagggcacggtgggtgacacagggaagagtggggacttgggggccgtgatgttcctgagcaacagggccagactgcatcgggtctctagccttagacaggagccccagcccagaaccaggcccaggcccaggccccagtggtgggc

SEQ ID NO: 40927 - DNA, 1111 bp, Artificial sequence
  DNA replication origin
gattaagaacaagaggtggggagggcgcagtgactcatgcctgtaatcccagcactttgagaggccaaggtgggtgaatcacttgagcccaggagtttgagaccagcctgggcaatatggtgaaaccttgcctctagcaaaaatacaaaaaaaaaaaaacagaaaagaaaaaaattagccaggtatggtggcgcgcatctgtggtcccagctacttatgggggcaggggggtagctgaggtgggagggttgctttcttgagcctgtgaggtggtgatttcagtgagccaagattgtgccactgcaccccagcctgggcaacagagtgagacttcaaaaaacaaaagaagggaaggaaagggaaggggaggggaggggaggggaggggaggggagagaaggggaggggaggggggaggggaggggagggggggatgggaggggagggaccagaggtgcctgactgccaactgggatgaatcatccacacatcaaggacaggggactggatgttcccagcactcgcaagctgacatagaggacacatgggcatgaaataagtgtccttgaagatgtgccctggggtcctagaccccatatggagtggaaaccccaaaggccttccctgcccaatgcctgggagaccatgggtgttcacggccccacccttgccctttgacttgacctcgaaacaagtttgaccgcatgttgtagccgaggtcatagtagtctgagaagacggaggagatttccacaggattctgggtcctgctgggccatgagcttgcccttttctggccctcgaagacttcatcaatagccttttgagcctgagcagggaggcagggatgacagacaggggatggaaaagcagtttcaagccccatatctccctccaactcctcctcccttgaccctgccctccccaccccgatcccacctgtagcctgcagccctcaacctattcacagggctggggagctggggtatacaaaggccccagccccaactcctctcatcatctgcactgctgtgggtggggggcatcaagttaatgatcataaaacctcttccaagcattgagcatctgctacctgcaacattgggacgggg

SEQ ID NO: 40928 - DNA, 877 bp, Artificial sequence
  DNA replication origin
agagggcaccaggggcagcttaggaacctctgatcaggggcgggcagacagccacaggccttcctgttcagctcccagctcatccttgttcacagaaactctgtgtgttatctgagacgatgaaacgtggtgctttgtttacaggactaagcttggaattgcctgtcccacagcaagaggctatggagctgggccacggagcaggtaggacaggcagaccagggatgtgctgaatgcacatccaggcttctggagggactccctggggcagcagggcaccggccctttctcctcccgctccgtcttgtgttggcctccagacccaccatcggcccaggcttcctaggggggcattctgttggaagacagaaggaaaaaggagggaacggaattactgagccctcccatcctgccatgtgcagggattatcaccccgatatggtctccatcctgagggggtgactcaggtgctctgagtcttgtgtgtaccagaagggcagggctgtgggggaacatggtgaggggcctggcctcaatggatgggaggtatatatggggttacacgtgagccaagagcaggggtagtgtagcccaaggagtggaggggagtgttccaggcaggagaaatagctcaggcaaaggcttgggagggagagacggctggcacttttgtggagtcccgagagcaggcactctgccctgaggacaagaggaaagattttgatgcaggcgtgactgagtcaggcccgctctgagaatggtccccaggggtgagtgcaggttggctggggctggcaggtgggatggggagaagagagtccagtgagttggggcagcgatcctgctaaaatcttcctccaatgacctgaatgcccag

SEQ ID NO: 40929 - DNA, 994 bp, Artificial sequence
  DNA replication origin
tgggggtacgcccgctccgcccagcccaggcccgcgcggcccccgcgccacccggcgtccccctcagacccccgcgggtcccggaggccccgcgcgcgaggttggcaggtgccgggcgcgaagcggccgcgcgggggaggcgcgggatggcggcgggcggcgcagggtccccctctggcggtggcgcgatggtgcgcgccgcctggggagctgcggccgggggtttgaaccggccaacttctccagccggccggggcgagcgccagcgcggcgtccggggcgagtgagtgcggggcgggggcagcggccgggcgcctgggccgccggtcgggccacctgctgcccggggaaggatagcgttgcgagagtgggacggggtgccccgggaacccctgatccacctagggcagagggcagcgagctacgggccggactcgggcactctggaggcgggcgagctcgggctgcctggggaggccgcaggcgatggcgtgtgcgcggctcgcggagcttcctagccgtgcgcccaccccctctgccttggaaggaaaggggattctaagcccaagatgccatcgccccccatcccgggcatgctttcattgctctttcctggcgggatcgagtactgtaacttctaggagccagatccccgccccaggaagcgcccctacttggagtcctcggaaactcttgccccacccgcttctgcgctgggcccccgggccggctgggaggggcggggccggctttccagagggaatctgcaaacttatcccgctgcacgccccagcctcgctggcttgctgtaaacaaggaacccgggggagtgcggagggagaaagagcttctcccaggcctcaccctactgcacacaccgacttccttcctcacgcctgtctctctttcctggttcccacccgtgccaggtgacacgcagagctgaagccatggttcatcaggtgctctaccgggcgctggtctccaccaagtg

SEQ ID NO: 40930 - DNA, 1428 bp, Artificial sequence
  DNA replication origin
gcagcaggtggcccgaccggcggcccaggcgcccggccgctgcccccgccccgcactcactcgccccggacgccgcgctggcgctcgccccggccggctggagaagttggccggttcaaacccccggccgcagctccccaggcggcgcgcaccatcgcgccaccgccagagggggaccctgcgccgcccgccgccatcccgcgcctcccccgcgcggccgcttcgcgcccggcacctgccaacctcgcgcgcggggcctccgggacccgcgggggtctgagggggacgccgggtggcgcgggggccgcgcgggcctgggctgggcggagcgggcgtacccccacggcccggccagtggaaggcgcgggcagcagcggctccgagtggccgcggcggtgggctgtgccggagtctcctccctttggtccgctgcaggttggtggcgggaggaggggacagctgcgggcgcggggagggggcgccgcgccgcgggggccatggcggagccaggaagccgggagtccgagacccgggtaactgccgcggcgtggcggcttgcctttctggagggggagggagtggctctttgggggtgctcggcgcggggctcccgcgcgggacctgggcggaagagggggcttagtctaggagagaaggcgcgccgctacgttggcactaagggtgactgtccgcttggggcggcctgccgggtggggtcgtggcgagtggcgggtggggagccttgggtggaagtgggtgacctggtggcaccagagagggcgggggagagagaggaggacagggagacgagaccccgctgacccagaggccccaggaagagacactagccaataacttgttagtgagtgaaaggaactaacattgtccagccctgcttggtgtggcactttgctgggtactcccgtggtgtgacttaattcccacaataaccctgaggagtaggccagaaacttactaagacaggagagagcggcagagcgagttgctggaggacacacccagagttgaggccgggcctgatccctggtctgaagcccacgtggtaccagctgcctttgtttacctggctcttccctgaaggttcatgctttttaaaaaattgcctgttttgaacttagcccgtttaatcataagttgatgtaattcaatttttaataatagctgtatttaacaaccagttggcaaaattcctgaaaagctcgccatgggctcttgcaaactgggggacaccattgcccctccctagcttttgcagaggccagcctggaagctttccctgtttcccaaccctgaccttttgttttgttttgttttttgagacaggctgtggttctgtggcccagactggagtgcagtggcgccatctcagctcactgcaacctccgcctcccaggctcaagcgatcct

SEQ ID NO: 40931 - DNA, 1160 bp, Artificial sequence
  DNA replication origin
tgagcgcggaactcggcgggagcaggttggctcttgccggagctgagcgggaggttctggcgcagccagtggcggaggccgccatcaagcagtgacacggcgtggtggccgaaggcgcggaacatccaccagacgcgcggggcggagtagaggccctggtcgctggcgtcgtagatcacgacgtgggtggccgcgcccacgcccaggcggcctgcgtactccgcgaaatgctcggccccgggcagcatgtggtcgtagggcgaggtgcggtcgctgcactggtcgatgtcgaagaaagcggcgcccgggatgtggcgctcctcgaactcgcgtcgcgcgtcgcgccccagcttcggcaggtaccaggaggcgtccagcagctgcagaggctgcccagcgcgcggggcccgcagcgcctccgccacccattgcgccgacaccagcgcgcggcagagctgcggcgaagccatggcggcgacactcgggctgcgggcctgggcgacagggaggatgtcagaagggaagcagggagaggccgctgttggggctagggctggggctggagcatgggcgagggccggcgggggaggtgcggcccgtgcagggcagagtccagggaacgcagaaaccagtggtggtgaacccgggcacaaaggtgggtagccaggggcctccctctgccaggcctcatataaacacaagctccgagtgacccaatgaccatgacctcccggagagccccaggccacgcccctcacctccacttgctgggcaggagggtgggtggaggtatcctagggcaaggccctgctggcttcaaggcacaaacaggggcaaagtctccacccctccctaagatgcagctcggctttatttgcaaccaagtcccagacggaagtcattcattcactcatcaagcatttatattggcgacctaataggaacagtagctggaatttactgagtccttgctgggtaccactgaatcctaacaatatcctagaacaatgcctgacacagtagactctccagtatgtgttgaatgagtgatcttaagaggcctggtatattattgtcaccgtttcaaggaggacactcaggctcacagaagtgcactaacctggcctggtgcggtggctcacgcttgtaatcccagcact

SEQ ID NO: 40932 - DNA, 1526 bp, Artificial sequence
  DNA replication origin
cggggaagggcgaagcggggcgggaccgggggcgggagcagcgcggggcgggaccctacccgcggcccacgcggagccaggaggcgcggactacagctcccggcctgccccgcgtgcggtccccgcccgcccccagcgcccgggaggaggatgcagacgccgcggccggcgatgaggatggaggccggggaggcagcgccgccggcgggggcgggcggccgcgccgcaggcggctggggcaagtgggtgcggctcaacgtggggggcacggtgttcctgaccacccggcagacgctgtgccgcgagcagaagtccttcctcagccgcctgtgccagggggaagagctgcagtcggaccgggtgaggcccccggggtgggcggcgagcgggcggtgggtcctccgctcgcccgacgcggggctgtcgggcctggctcgcccgccaggctggggacccggccgggttcatttccgaggaactggaggcgggaagaagcggcaggaggaggggagggggaggtgggtctggtagtgagggatgtacccattgccgtggcaacgggacgacgcaggccgcggccattagaagctctccagccgccccggatcggggcctctccttctcctttggggctgtggacagggagagacctgggacctttcctccctcccaaaggggactcctgctctggggaaggagtcgacgaggctacttctcccgctctttgggatgtgggtggcggaggggtgcagggagctagctggatggaggagccctggggcgccttctgagcgggctgaatctagaaggagcgttggcccagcgggcactatttctgagcacccaccctgactctgctgcacactgcctgccgcgaccttgagtcggacccttccctgcactgcgctcagcctccttcctcatctgtaacacgaagggctggtctgaagatgacctctaaggtctcctgtcccccatccgtgaccctccgatgctgtggcctttggcaagtcgcctcacctctcaatgtctccgatctctctgtagagtcgcatggaagcccaccctgcctccctgcccgcccgagtgtccagtgagatagtgactcctttggaaacttgtaaacatcccctgaaagcctagggacctgggggcgacagtggggctggcttcaggggacagcctctcagagggacattcttcgagccctgtgctgggccagttgccactcagacatcctctcaccggatgctcacagcaaaccctgattagggggagaggagtgagtttcaaagaggccaaatcattagcctaaggtcacacattcaggaagagtcagaagcagggcttgaactcaggtccatctgaccccagtgcctttttgctactttgtgcctgctccatccagggaagagctctccctccactctccttccctccctgtgcgtgtgcggggttggctggggagaagcctcactcttctctcaccgagcatccctcacctccataggatgagaccggggcct

SEQ ID NO: 40933 - DNA, 741 bp, Artificial sequence
  DNA replication origin
gaaagttcccactccctaactttcttctcctctcagagcctcacccccaaggccaaggtcggatgagaaactttggtgggtggagataatcagccgaaagctcggctcaagtccaaggatcaagagatgagcaccctcctcgctccacccctccctccagcaccgccaagctacaaaccagggatggcagctctgggggcgggcgaggggccgaggagaagccctcactgcaagctcagcctcaggtctgagagggtgcggacgggaacctgcaaggaggaaacgtgaggaggaggccgggaggagaggagggggggcagggcctgcagccagggcccagtctcagaggtgcccggcagggttagtgggcacagaggaggtgcagctgcgcccctcctccccaggctgggaggcaggaggtaccagaaggggcgcaggaggcggcaggcaggacgctctgggatgcagggccagggggcctgggtggagggcacgggaggctgggaccagggcagacccgggatggaggcgtgagcaggcagagagaaaacccggacaggggcagagagggaagaggcagggtgcagatgagatccaggaggaagaagaggtggatgaagatgaggcaggacctccagcgggaagcggaggaggaggcagtggtgggagggagaaaaggttagcgggatcctgagatgactgggctgcaaagagaaagtgagagaagggatggttatgcgg

SEQ ID NO: 40934 - DNA, 742 bp, Artificial sequence
  DNA replication origin
cagatttcttttttcctgtgtgctttacagacccaggctgctctgaattccctgaggctggtgggtcctagtggggagcgggtgggagttgagcgtggaggaattggactgcggcagtcagctgcctgggtggcagatgggcagccttcgggtctctaccctctacctgagggcagtggggagcctgagatggggttaaagagagctaggtggtcagagcgccctgcgtcccagagaggatacaaaaggggatccctgtgcagggcctgggggcgggatctggagcccagatctgtctgggggtggattgggggaggtttcagcccaccaagcagatgggaaagatggccatgaggcctgatgagatgtcccctgggggctccccagccccacctgctacctcgtgtcacacctcggggagtgtcatagcttatgaccaggttgggcagttctgtcctttactgaatccccagcatctagcacagccctggcacatagtaggagcacaagtgttgctgaatgagtgaatgagatgaatgaatgaattactggcccaacttaaagcaagataccaaaagtagatggcagagaggtggaacaatgtgtccggggacccagaaggtcctggtggagccaggactagaactcacatcacagtagcctgtctggggggtccaccacccttccctctatctgcaaagagctcagacacagtgcacctcccaccgggccttccctgccc

SEQ ID NO: 40935 - DNA, 1794 bp, Artificial sequence
  DNA replication origin
accatcaggacccaggcaagggggcagaggatgagatagagagagaccaggggacaacagtgagatttccctccagcttcctgctgtgggcaccccctccctcccaagctccagggccccggcagccaggcagggctcaccacagtgctcctcatccgagccgtccctgcagtcgggccgcccatcacactgcgggttgggcttcttcacgcagctccggtcctcacactggaaggtgaatgtcccacatggcacccctgggacagaggggatgggggcagggcacagaaggtgggtctctgagccccaaggaaaccttccaaagtggggtgcaggaacgatggagccagaagagccaggaggtgactagagagtcttttcctgagtctcctttagggtctcctaaaagcaggccatgtccccccgccccccacagcccctccactcagactggcctattgagcacaaagtggtgtctccattctcagactggagatcctgaccacaagatcatgcctccccctccagtgtggaacttgaaggcagaactgtgcctccacttttagaccagggtccgcacctagcctggcaatctcccaggctctggccctgcccggttgtccacattttcctccctgctcttcactgtaaagaactttccactccaccacttggtctttgcctctctcctttcctcctgcctatttaagttttagctctcaccaagggccaaacacctacctcctccaggaagcttttcatgtctgacctcctccctgccctccaatcttcctacaaggcaggagagtcacccatcatatcctcctactaacagatgagccttggaaggcagggcctgcatctctgctgttttattctcacttccttactgcaccttgcctatcgctgggtagcctgcaagtgttggtcagttggtcagttggatgggtagatggatggatggataaatagacccagacagaagactgagcagacaagccaatgggtggagtggtggtccattagggagactgacagacagctagaaggttggataaacgtgtggatataaggaccagtggacagacagggggctagggagatcagtggatgggtggatggatgggtggatggatgggtagatggatggatggatgatggatgggtggatgatggatggatgatggatggatgatggatggatggatggatggatgatggatgggtgcatggatggatggatggctgacggatgaatggatggatggtggatggatggatgatggatggttggatggatgatggatggatggatgatggacagatgatggatggacggatgatggatggatgatggatggatggatgatgggtgaatggatggatgatggatgaacggatgatggatggatggatgatggatgaatggatggatggatgatggatggatggatggatgatggatggatggatgatggatggatggatgatggatggttgcatggatggatggatgatggatggatggatgatggatggatggatgatggatgaatggatggatgatggatggatggatggatgatggatgggtgcatggatggatggatgatggatcgatggatgatggatggatggatgatggattgatggattgatggatgatggatggatggatgatggatggatggatggatggatggatggatgatggatgatggatggatagacgatggacagatggatgatggatgaatggatggatgatggatgaatggatggatgatggatgga

SEQ ID NO: 40936 - DNA, 756 bp, Artificial sequence
  DNA replication origin
aaaccgagaagagggctgggaccctgagtgggagggagaagagtggggagagaggtgaggcagaagcagctgccaacactctatggcctcctctctgccatcctcccctcctgagctccagaaatggcaaagtttgggcctcctgcgcagaagtatggctggtccaggcccaggacagctgtcccatgcggggtgggacgtgcccttcctgggaagggggcaaggagggaggtcccgaagcaggaggagggtgggggctgggaaggcagtgggagacctgccacaccagtggccatggcctggctgtgctgccatcacacctccccaagctccctgcgccctcttggctgtaagcggactgtctagggcggaatccaaggagttcttagtcctgctgcaaacagacccgtgttccaggcccagccaccggtgggtgccaaggggagagggcagggagggggtgaggggcagaggggaggggacacaggtccaggcgagtgaggagggaggagaggcggtcagcacagaaaagagaaaaggagagagaaggaaggacagagaaagaggagggaagcaagggagcgatgccaggaagacagagactgcgaatggtaggacggtcaaggggaagaggggggtggaagtgcaaacgacggaaggaagaggggggccggggtggggagtggagagcagcaggagcttccagaatcttccctctccccatcccatcctcaatttgggcaaaaaaggtgagca

SEQ ID NO: 40937 - DNA, 1451 bp, Artificial sequence
  DNA replication origin
ataggggtgtaaaccagggctgtgagtctaccctcttcacttcagccaaaatagcctttgcaaaacagaagtctgatgacatcattcctgattttaaacttttcatggttacccttgttcatcgggtaaagacccaatgggccctgccctgcggaggccccagctccttgccgcccctccccatctctgactgctccagccaaacaggctttcagcccgggtcctcaccatggtccccgtgctaccggccccgtgccccatgctgctccctctgctggaaggtacttccctccctcttctcttaccaatttacagtttccccatccctacatctcagctggagggtcactccactctggcccaggctgagtgtcctcgtcacatcccctcaacagcaccatgtggcactgctccctgatggcactgcccacagacagatgccacatgctgtgtggttgccagagccacgcctttcttacccaccactgtcagcttcacaaggggaggcacatctgtcttggttaactggcgtaccccatgtagtaggtggttagcacacactgtgggatccctgggtgacctcacgagtggaaggatgcctagtggtgctgacccatgaccttggcctcctgggcctatgtggatttcctggccttcatgtcattggtgtcctggactggtcactgtgtcagcctctccctgggaacctgtaggacaccatccatctgggagcctttcacctccctggtaccttgcagccagtttgtcatccaataaactttagatgaccatgatgacaatgggagtgacaaagatgatgatgatgacattgatggtgccatggagacccaagacactgaggctgagctgagggtgtgggtggcaggagaaggcatggaagagacaggagactttcccacctgcttcctccactaaccctgctggttccttcctgggcagggtacaaggcggaggtgatggtcagccaggtgtactcaggcagtctgcgtgtactcaatcgccacttctcccaggatcttacccgccgggaatctagtgccttccgcagtgaaaccgccaaagcccagaagatggtaggaaaggatctgggggatgagagggagggaatatgggggtgaaaagagaggggtggggtctgatcacatggagccagttggtcaacccatctggagcattcacagggaccacagccctgctccaggcaccatggaagcagatgaggttgagggtcatgggaaagttagtggatgtttgggtcaatagcactcggattagatcctgatcatgcctcttaccaggggtggagcatgaccttgggaaaggtcccacagtgcagctgacactattgagggcccgctcctgcccctccgttacaggacggtggcccgctcctccccctccgttacaggacggtggcccgctcctccccc

SEQ ID NO: 40938 - DNA, 1015 bp, Artificial sequence
  DNA replication origin
gtacgccagttaaccaagacagatgtgcctccccttgtgaagctgacagtggtgggtaagaaaggcgtggctctggcaaccacacagcatgtggcatctgtctgtgggcagtgccatcagggagcagtgccacatggtgctgttgaggggatgtgacgaggacactcagcctgggccagagtggagtgaccctccagctgagatgtagggatggggaaactgtaaattggtaagagaagagggagggaagtaccttccagcagagggagcagcatggggcacggggccggtagcacggggaccatggtgaggacccgggctgaaagcctgtttggctggagcagtcagagatggggaggggcggcaaggagctggggcctccgcagggcagggcccattgggtctttacccgatgaacaagggtaaccatgaaaagtttaaaatcaggaatgatgtcatcagacttctgttttgcaaaggctattttggctgaagtgaagagggtagactcacagccctggtttacacccctatccatttactcagtaaatacctcttgagagcctgctatgtgtaggaactgagccaaagtacttgggactatatgagcaaaacaacggacagaactatcaagaaaaaactgcccttaatagcttgtagactagcaaggaatcagacggtaaaccacacatcgtgtataacaggttagaggtggtcagtgcggtgggaatcagggcatgggacgggctgcgatatggaggtcagggaagaaggtgatgtacatctgtggaaagaatgtcccaggcaggggcaagtgcaaaggcctggtgtgtttcaggagcagcaaagagtgagcaacaggacagcaggagggtatgagatggggaaggggagaggctgggtagggctttccaggcctgggaggactcgggctttcaccctgggtaagatgggaggaatgggaggtggtttttttgttttctttttgtttttgttttgttttgtttttgagaca

SEQ ID NO: 40939 - DNA, 1081 bp, Artificial sequence
  DNA replication origin
caaccaacgcgataacaatttttatattgattttatgttgaaataacactggtgatcatgggataaataaaatgtattattaaaagcaattttcttctggctctcttgtttttttttttttcagagacagggtctcattaggttgccaggctggtctggagctcctgggcccacatgatcctcctgcttcagcctcccaagtagctgggattacaggcgcgggccaccacaccccttgttgcatgtggatattagacaggttaagtcacaagtgtgacctgcgttgttgttctatggaacagcgttgctgtggagatgggtttgagccatatgcgtgccgaagtgccggatgggagccagggctttctagggtgcgtgcagggcagcgggcgtctgtctcagacaaggctgactttcagcgagtctacatcctgaggccagaatgcggggtgcacgcctgagatgctgtgtgctgtgggcatatgggtcccagagtgtgtgtgtaagagagacagtctggaatttgtgtgtgtagattatgtatgtgtagaatgtgcgtgtgtgtgtgtgtgtgtgtgtgtggagcgtagggattgtgtgtggggtataagatttgtgtgagaggtgtgtctgtgaggtttgtatggtgtggggtggggggtgtgtgaagtgtgttgtgtgggcatatggactgtgcatgtgtgtgcagtgtgggtgctgggaatgtgcagtgtaaggtgtgtgtgtctttgaggtacgtatggtgtgaggtgtgtatggagcatgagaggtgtgtgcagctgtgtgtgtgtgtgtgtgcatgctcacagtatgtgtggaatatgaggcatgtgtttagtgtgaggtgtgtgcatagtgtgaggtgtgtgtgtagtgtaaggtgtatgtagtgtgaagcatgtgtggagtgtgaagcgtgtgtgtagtgtgagacgtgtgtggagtgtgaggtgtgtgtggagcgtgaggcatgtgtggagtgtgaggcgtgtgagtggagtgtgcagcgggtgtgaagtgtgagatgcttatggattggctgggatgggacagggccccg

SEQ ID NO: 40940 - DNA, 807 bp, Artificial sequence
  DNA replication origin
caggtatcagctcatggccatatcccacaagtctatgcctggggaaatattgcacttgatgacgaatctctctctctctcctctctctctctctctctctctctctctctctctctctctctctctctctctccccccccctctatccccctccctccagataggtagatagatgatagatagatagtgtcctgataaaagttggaccagaccagggatggcaattcctggcattcataaagccacactcatggcagacattactaatcaattgcacccatgcacggcagacatttctaattgaacacagctctcctcctgcagagcctgggtgcagcttcagattctgcaatgctgcgctataggcagcccccagttggtcacagctgatagctgatgacatctctggaccgcataattcctcaggttcctaacacaaaaggagctcttaggtttcccaactccgatttcccaggcagggaaaactgaagctgagaggatggagactggaaagctgagagggacctgtgagaggcaagcccagggagcccagctgtccccaccatgtctggtgagagacttgagctggcagggagcagagtcagggccaccttataccgggtgcagatgaagggatgggccagcggtcactgtgtgtcatgcccagtgtggatccgagtgtggatcttgggagaggagacaaagaggaagcagctggcggcaggggtggtggtcagattgcaggaggggcctgggtcagattcaggagacaggagcggcaccagctggggaccgggcagccgctgg

SEQ ID NO: 40941 - DNA, 856 bp, Artificial sequence
  DNA replication origin
ccaggacggggaacctggttccggagagcgaaactttccccggcccctgggcggttcaacgtgggggagtcggtagaaccaggcccggggctctcctcgtgggaggaagccggtttgtgtgtggggggtgggggttgctgcggggactgcgggggtttggaggaagaagcgagtgcatgggcgccctggcctgccccaaagttccctgaggggacgggctggtgggacgggcgggggccggggaccggggagcggggagcgtcccgggttcccgggcgcgggggctctgcccagcaggaggcgctcgcgtcttcctttgttgaaattgatctctgcgcttgaacagttagatctgtgacttgccactcagagcctacatagcggacgccaggaatcatgtttactgtcctgtctccctttttgacaggcacacattttattttttaaatacatgaagcgcgccgtgctttgtaagcgctgactgaatgtgcctattttcacaccctctcctgaccctgggctggaacgtgggcgagtgcaggatggtggccaggggcttggctcttggtcagtatgtgcctcatctatctcgtctgtaaaatggacagacgaggtaacacgtgtgcctacgtcagagcattgttggaaggattagaggagtcaagatatggaaggcccacagaatggttggggagaaaagccagcttctggaggcaggggaaagggtggggagtggctggggaagcagggcctgtaccctgggtttctgcattggggttactcctttgctgctgggagtgatagcagggtgatgagagccaccctgggcctgcgctcctcctggtcatgctgttgt

SEQ ID NO: 40942 - DNA, 1817 bp, Artificial sequence
  DNA replication origin
tcaccaacgtctacatcctcaacctggcgctggccgacgagctcttcatgctggggctgcccttcctggccgcccagaacgccctgtcctactggcccttcggctccctcatgtgccgcctggtcatggcggtggatggcatcaaccagttcaccagcatattctgcctgactgtcatgagcgtggaccgctacctggccgtggtacatcccacccgctcggcccgctggcgcacagctccggtggcccgcacggtcagcgcggctgtgtgggtggcctcagccgtggtggtgctgcccgtggtggtcttctcgggagtgccccgcggcatgagcacctgccacatgcagtggcccgagccggcggcggcctggcgagccggcttcatcatctacacggccgcactgggcttcttcgggccgctgctggtcatctgcctctgctacctgctcatcgtggtgaaggtgcgctcagctgggcgccgggtgtgggcaccctcgtgccagcggcggcggcgctccgaacgcagggtcacgcgcatggtggtggccgtggtggcgctcttcgtgctctgctggatgcccttctacgtgctcaacatcgtcaacgtggtgtgcccactgcccgaggagcctgccttctttgggctctacttcctggtggtggcgctgccctatgccaacagctgtgccaaccccatcctttatggcttcctctcctaccgcttcaagcagggcttccgcagggtcctgctgcggccctcccgccgtgtgcgcagccaggagcccactgtggggcccccggagaagactgaggaggaggatgaggaggaggaggatggggaggagagcagggaggggggcaaggggaaggagatgaacggccgggtcagccagatcacgcagcctggcaccagcgggcaggagcggccgcccagcagagtggccagcaaggagcagcagctcctaccccaagaggcttccactggggagaagtccagcacgatgcgcatcagctacctgtaggggcctggggaaagccaggatggcccgaggaagaggcagaagccgtgggtgtgcctagggcctacttcccaaggtgccacaggcccatgatgggatgttgaggggcctggactttgatgctattgctgccaggtcttgctgtgtgaccttgggtaggttgcttctactctctgggccttgttttctcctctgtgactcagggataggagtcatcagcctggatgagctatgtcagatgagaggtttggagggcactgttgctgggctgacctggctgagcaggcaaaaggtgggtgcagactggcctccccccagggatggagtgtcttggggcatcaactagaatcttggccctcagagggataaaccaaggccaggatttcttgggctcagagtcaggaacacaggagctgctgggggctgggctggaaacctaaacagaagaaagcctaacccggtgggaggagtggggcagaaatggtcaggccccagatcagctccctcccctcgactgtgaggccttggaccagctctgctcctctctaggcctcaggcttcacctgggtaaaacccaacaacctctacacccttttggcccaggcagtcaatgctggaggtcctgtgctcctggacgggaagagcaggtgaatttcctgctcatggaagcgaatgaagtccagcttcagggtctctcactgcctgggcttttgcaaggccctgcatctacttttgtacttgtcattttgtattcgttttcttaaagagggacctcgaactgcataagcttaggcc

SEQ ID NO: 40943 - DNA, 1568 bp, Artificial sequence
  DNA replication origin
aaggatggggttggcacagctgttggcatagggcagcgccaccaccaggaagtagagcccaaagaaggcaggctcctcgggcagtgggcacaccacgttgacgatgttgagcacgtagaagggcatccagcagagcacgaagagcgccaccacggccaccaccatgcgcgtgaccctgcgttcggagcgccgccgccgctggcacgagggtgcccacacccggcgcccagctgagcgcaccttcaccacgatgagcaggtagcagaggcagatgaccagcagcggcccgaagaagcccagtgcggccgtgtagatgatgaagccggctcgccaggccgccgccggctcgggccactgcatgtggcaggtgctcatgccgcggggcactcccgagaagaccaccacgggcagcaccaccacggctgaggccacccacacagccgcgctgaccgtgcgggccaccggagctgtgcgccagcgggccgagcgggtgggatgtaccacggccaggtagcggtccacgctcatgacagtcaggcagaatatgctggtgaactggttgatgccatccaccgccatgaccaggcggcacatgagggagccgaagggccagtaggacagggcgttctgggcggccaggaagggcagccccagcatgaagagctcgtcggccagcgccaggttgaggatgtagacgttggtgactgaagggctggccgtgtgccgcaggaccacatagatgaccagcgagttacccagcaggcccaccacgcacaccaccaggtagaccagggggatcagaacgccactgacggccagccctgccgggcttgggcccgccgacacgttgcccagggtggcatctgggggccaggccgaggaggcattctcaggttctgaggtcgtggacaccgatgatggatgaagcatgtccatggctgaggggagggtggtcagcagtcagctatttgcctgggggaaggaaaaacagctcggtcacagcagagaatggctttctctgtgctgccccctcccatcatgccgaacctggggacctgctgcacgcccatcctcccatcgtctgagagatttcagaagatgggaggtgcttagcacgcaccatctcattcaccccgcacagccccgcaaggctgagtcgtgttatccccttttctcagatgaggaaactgaggctcagggaggtgaggtgatcattctccatcgtggagtgagggtgtggtgtgtggcatgaagtcatactgtttcaccaacaaatacctgcccttcctttctacatgtgaggccccagctggcagggccctgtgaagtgggttgcattgccaccaacaggtctcgccctcacatctgaaaaacactgcttcatatcacaggaccttcacctggaaacctgctccctagatgaacttcagaggatccatgaacgccctaaactccaggtgaaggttaatgtcagatctgttatcagattcttcaggttccaaatggagttaagaaccacaggcttggggtgtcccctcccctgggagtcagagtccttaggtgccccc

SEQ ID NO: 40944 - DNA, 1064 bp, Artificial sequence
  DNA replication origin
agactaacgcccctgcccctgcagccgaccgggaggtcacaggaaggcctccctcctgcctccctgggagtccccaccctctgcctccccagccccagcctcccaagttcatcctgggcagaggatgggcttccaggaccccacccttcgggacatcatccgggccccagcctccttacctgcccatggggtgagggcttccctccttgccgccaggctggttatcattctgctgtcccctctccctgcccagtccccaggtgcccccagggcactcctaactagggtccccacaaggcacccacttctagaccgcttgcgggctcaggttccctcccaggccctcggccacggctgtccacagagcctctcccatctggtctccggccctgacttcccaaccagagcctggtacgtcaccccccatctccaggacacatcctgggggggcaggggcaaggataggggggagaagcttcccagggtgaggaagagaagaggggagcaagggacacagaagccaatagaaatagaggggaaagggggtcgggaggaggtggagaaagagagagagagagaaagagggagggggagagagagagagggagagggagaggagaccgtgagtaggaggaaaggcagaatgagggggagtgatgagagatgcgtgacagggagaagacgagaaggaaagagaggagaggagacacgggtgagagggagagatgcagagagaggcaggagggaggaaggagaatgagggggtggcagggagagtgacagagagggactgtgccacagatggtgacatggagcccgtgaaggagggagtaagcagggaggggctgagggccggagagcaggtgtggggggtgggggcggggtgcaggttaagggaggaggcccggagagggagcaggaggggcgcagaccctgttaccggggagatttcagccacccacgcccgctggccttggctcctgcagggagttggagagaagaatgtgctcagtgctcaggggagccgaggctgccagccagtagccagagcagctcgtgaggcc

SEQ ID NO: 40945 - DNA, 1012 bp, Artificial sequence
  DNA replication origin
gggtggaggaggaaaaacccttctttactgtcttagggtctctggctgggctgaagaattaaactgacataaggcagatcagcaggagaaaaacatacagatttcatttacatgtacaagggagcccccccgcctcccgcccaaatgaccaagacccaaagaagtgactaggcataaaggcttttgtaccaggttgaacatagaatggcaattgtgtaactaggaagataaggattaaaagatctgttcatacagatttcttttggcctcgactctccttatctggtaatgtctttcctcctcctggcatagggagggcgtctttcacaaggcgttttagctcctgctttcaggaagaaaaggggaggtcagagccccctttctgcacctgctgtttctgaagtgcctttagtgcagagaaatcaatatgccagagtggtgtattctggggtggcgtgtcctgaaccccttcagtggcctggctcagacgggagcctgtggatggagagcagtggacgggttccaggctggagcagtaaggctcggtgctggggaggtgtgtggcagggggcacactgatgagcattcactcctttaaccttcgcaagaacccccaggccaggcagtcaggtgtgtacaatctactgaaggagaaaaccgaagtttaagttcagtgcacggcaggggtagagctggggctcaaactcccctgtccagtcttcagcccctataccccaacctgcaggaataagtgaatgaatacatgaggctgggtacgcctggggcacagaggagcgagtgaaatcagcagaggaggaggcccgcgcaggcggcaggaatcaaggatgcagtgccaggtgggctgcggcgagagagctttattctgagggcagtgagaagccgtgggtaggggtgggtggtcagtgccatggaaaacccacccttgaccctgaggacacgctcccaggagcccacccacacctcatgaacttgtacggacaaggacaatggg

SEQ ID NO: 40946 - DNA, 778 bp, Artificial sequence
  DNA replication origin
gtgctgtgccctcagcccacgcggcagcagaagcgcgcctgcagcctcctctaggggtaagagtcccccactctagtgcccaactcccatacacagcaggccctggctgagcagtggcctttggttcactgtgagtggcatttaggccaggacagaaagaaggtgggtatggaggttgcctcagtttccgcagcctacttgtcatctgcctgggccagtctcactctctggagctcatcttccagaggcaaggcccaaggtatgaatgaatgcctggtaaccccccacccccgggccagggagtgggtgtcacggagccccactctgcccattcctgcaggaggtgatggaaaagatgccttggtccctggccctaggagagcccagtcgagccagggagatcctgcacccacatatgtgggtggaggtgggagagcctgagctatgatccccagggggcagatggtggggtcagtgagttggaggcagcccacaaggcctcctggaggtgtgggaccagaaggacagagaggactggtgaggtggggagagcagcattggcagtcctggtgggagtcaaaccttgagcaaagacctggaggtgggaatgagctgtgagccaggaaggcgagagctgtggattctgcatgtccccaaattctctttccctgcttatcttccttccaggttgcaccccagcgctcccacctagatgggtctgatcctccaggatccccacccaaagcctgatggcaccccggctggccatgctgtcccc

SEQ ID NO: 40947 - DNA, 1993 bp, Artificial sequence
  DNA replication origin
gccttggcttccccactctgggcctgtttcctggtctgtgaaatgggaactcaccccggtgttgttggaagcacccagctcagtgcctggcacagggtaggtggtgaccagcgtccatccccttccatcctgccacagagaagcaagcgggctttggcggagggcccagagttcccctcccctcccttctccttcctcttggttctgacatcggcccccaggcctgcatagcatctcggcagaaggggttttgtggtttttcacttcagggaaactgtgcagcttgaaatggacatgggaagtcacacggactctttgcagaatgtcatggaacgccgtccctgggggtgggaactaggcctgcctttctcctcatctgtgccccgggctctagccctgaggggtcttcatgtgggagaaggctgggcctcccatggcaggacagaggagctctccaatgccactcctcccagaaggcccccagctgggcccaggttgagggaatacatccagcgtgtgagtttggatgagtcgcatactctccaggagcctcagtttccttgtctgtaagacagggacggtgctaaggaaggggctgatgatgttgggaagttcctggggagggggccctgagggcttcaggcctcctggggattatttgcaaccctgggagaatcctggagggatgggcaagacaattttctagaaggtgaggctcccagagatttggtcactgatgcttgagccctttccttcacagaaaagcatcaaaattcccgccctccttccacggactaagggctatgtgtccaagaaagacacagacctgccctggaggccttagtctctcactgagttcacgctcgctattacagacatgaggaaactgaggcacggtgacgttaaactccttgctcctggtgacacagcctccaggtgaccccactgggactggatggcggcccccagagcctggtgttcagttgtatggcttgggagggggtgtacggcatggaggggtgtatggcgtgggagggggtgtatggggtgggaggggttgtatggcataggaggggtgtatggcgtgggaggggtgtatggtgtgggaggcgtgggaggggtatatggcgtgggaggcatgggaaggggtgtatggcgtgggagggggtgtatggcgtgggaggggtgtatggcatgggaggcgtgggagggatgtatggcgtgggagggggtgtatggcgtgggagggcttgtatggcatgggaggcatgggaggagtgtatggtgtgggaggggtgtatggcgtgggaggggtgtatggcgtgggagggtgtatggcgtgggaggggtatatggcgtgggaggggtgtatggcgtgggaggggtgtatggcgtgggaggcgtgggaggggtgtatggcatgggagggtgtatggcgtgggaggggtgtatggcgtgggaggagtgtatggcgtgggaggggtgtatggcgtgggagggagggtgtatggcgtgggaggggtgtatggcgtgggagggtgtatggcgtgggaggggtatatggcgtgggaggggtgtatggcgtgggaggggtgtatggcgtgggaggcgtgggaggggtgtatggcatgggagggtgtatggcgtgggaggggtgtatggcgtgggaggagtgtatggcgtgggaggggtgtatggcgtgggagggagggtgtatggcgtgggaggggtgtatggcgtgggaggggtgtatggcacgggagggtgtatggcgtgggaggggtgtatggcgtgggaggggtgtatggcgtggaaggggttgtatggcataggagacatgttggcccagaaccccccccgccacttaggccttggctctcctgtccatctccccaaccagactcggtgaaatacctggagtgctcagctctcacccagagaggcctgaaaaccgtgttcgacgaggccatccgggccgtgctgtgccctcagc

SEQ ID NO: 40948 - DNA, 836 bp, Artificial sequence
  DNA replication origin
ttagcgggaagcaggggggatgaacctcaaaggagaaatgggccaggtgcccacgcctgtaatcccagcgctttgagaggccgaggccagcggatcatctgaggtcaagagtttgagaccagcctggccaacatggtgaaacctagtccttactaaaaatacaaaaattagtcgggtgtggtggcacatgcctgtaatctcagctacttgggaggttgaggcaggagaatcgcttgaacctgggaggtggacgttgcagtgagctgacatctcaccactgcactccagcctgggccacagagtaagactctgtctcaaaaaaaaaaaaaaaaagagaaatgggagccaggtggtgagaggctctgaatgccagaacaccatttactcttcttatttttttcagattggcaataggtaagaaagaaaccctccttggtgggaaatgtctcttgtgccagatgccttgtcccaagtgctcctcagtacaaccctttgagattctgttatgagcctgccttgcctatgagtgaggctgagccttggagaggtgtcctcactccctctgggtcacatgccagatggtggagacctgagaaccgggaaccaaggtgagccctgatttgcagtttagaaaggtcactctggctgtcatgtgaaggaaggacttgatggacagattaaatgcagacaggcctcttaggaggctgttacaaaggcccaggccaggggtgctgatggttgggggtacagaggatctggggtgtgagggacctttgtgagaggtaattagatactgaaactgactggtcctggtgaaaaatcgagggtgaaggtga

SEQ ID NO: 40949 - DNA, 929 bp, Artificial sequence
  DNA replication origin
aaaaacaaaacgaaaaacagaaaacaaaaacaaaaaaaccggggttagtgacgacgcctccctcaagggaaggttgtttttgtttcattttttcaaacaagggaagttttgcagaatgtaatgaaataatccatgtaaggcagtcagcacagagcacggccacgagtggccgagggaagtgggcctggggtctctcagctctccagagccgaggcccacaggaggagccagaccagagtcggggcaggggtctggccctccttgccccacccctcgtcggtttcctaggtgaccaaagccagcccgcgggctcccctgcgtggtcgccgcggggatggcactcagagaacccaccgcctggggctcccctgtgaacgaggggacctctgagggtccttcagccccaatacccaggtatccgtggggctggattctggccgggaacagggctggacccctaggagcccgtcacatgggggaggcaatccaatccaggatgattccgctgacacgtaacgagttcttgaaacagtatgaacgggagtggtaaggatggattccacatggggagaactggggaaggggttgtcaggtgtaggggttgggttaggagagctggcttggaagagggaagggcaccgggtggtggggacagcatgtgcaagccacagaggtggagactgggcgacctctgtgtacactggtgggcaggagcacgcacttaacgctgagtgagtgtatgcgtgtggctttagcgggaagcaggggggatgaacctcaaaggagaaatgggccaggtgcccacgcctgtaatcccagcgctttgagaggccgaggccagcggatcatctgaggtcaagagtttgagaccagcctggccaacatggtgaaacctagtccttactaaaaatacaaaaattagtcgggtg

SEQ ID NO: 40950 - DNA, 1415 bp, Artificial sequence
  DNA replication origin
agaggcgctgggcacgaggctggtctagttctgctttgggtttctccctctcccccacgcccctgggcctctaccctcgactcagctgctccctgactcccacttcccctttccaaccaggcagctgtagttttgggactgggcccttttctgctagggacaggaaaacacacttgcaggtccagtgcatgcatgcgtatcacgtgcacgaagaggggccctgggttctgccccgcgccaaagtcactgcggtaggggcctggaggaagcccaaggtctcctgcgggcccaggaggtgtgtcatggggtgggatggatggaggttccagacaaaccaggggcagcctctctctgtgtcactcctccctgaggtcacagatggctgctgcagtctcaggtgtcacatcctgacttgaccatgcctaccctggctgcgctcagcccctgtggccagggtgggtccatgctcacacctggatgcaagggatcctgggaacatagcccctggcattggcagcatcgaggtgggaggtggggaggagggggctgctggtgggaatgaagggaccagcctgtgagatcctggaggggccatcatgggaataagggggagcagcagagggatggatgaaggaacccaggtgtggtcagaggctcccagatgagggccttccaggaagtgactggccatatccctggctgctgggaggtggaggtctccaatgtccatggggtcagcaaggggctgggggtgagcggtggggaggaaaggaggggaggaagtggagggtgtgaggtggggcagggacgagggctgggagaggtgggatccgctgcagcccgagggggtgggttgaagagggtgttttcgggaaagaagcaacttgacttaagtcaagctgcaagaggcccgaggtgtttctgagtagagaggaggaggaggagagcagggcacgggagaggacggcaggctaagaggaaagtccggaggaccctctccccacggggagggtaaggctggaacctgcaatcctgtcatctgaaggtgactgtttcccatttgacagaccaggaaactgaggttcagggagtcctcagtggcaggccagggctccagcccagagtttggttgtgacttctgagtggtcatggttaaggctgactcatctttctgggacgtgagttctagctctttcggagcccactccttcagtgtctgtgggagtcctttaaaagattgaaatcagtagttaaacccgtgtccgcttcagtctaccacggagtctcattttttgcccgaaagtataattgtagagctccaaccaaatggattcacacaggatctccggttacacgtgatcgctgggtccctctgtccccatttctgccattgtgttcttgtgtctttggcttct

SEQ ID NO: 40951 - DNA, 797 bp, Artificial sequence
  DNA replication origin
gggagttagccggacctcgctcaggttccagctctgcaccaccctgccagtggtcatggtctcttccttctatgggcctcagttttctcacctttattatggacaggctggtgactcaggggcccccagggctgcctcccctcctctcctgaggtgggcctgtgtcgggaagcaggtaaggcgccctcccccagggcctgccgggaaggtgagagggccagacagcaaagccccagtgtggccaaagacaagcactgtgctggtgcagagaagacaggcagcgcagttaaaaatagagccagctcggctggggcggtgggggggcggcgggggaggaagccgcactccgcagagcctgtggggcttgtggggctggggcggggagcagctccacccacaccccctctgccccagggtccctcctactgagactttgaggggcctctttatttagggccctgagatggcatcctcctcctgccctggaaaggggaagtgaggccagctgtcctggaagcagggctgcaagctcaaagatttctaaaaatacgatgggaaagaggaaggacaaagaggaagtggggaggagccggggagatgggcacattcaccagcctgggcgcaagggcagcaccagcctgtgggcttggggtgggggttcatgtcacaccttgtgaggttgtgagaagcacagagataagtgagaaggaaacggggtgtgtggtggtggtggtggtggtggtaattttattatttgtgtgtattattattagtatttaaaaattcatctcctggcc

SEQ ID NO: 40952 - DNA, 950 bp, Artificial sequence
  DNA replication origin
ggaggtgttagggggtcccctctgccactgggtgcctcctgcagggtcaagatgaaatgggcttggggtcgagttgggggaagcacaggtttggagtcagactgcgggcgtgtcgtgtcatctctctacgcctcagtgtcctcttctgtaaagtccaggggaattgcaaagtccctggaaagagggcctaggctgcctgtgcgtggtgtccccgtagtacctggcaggcacatagcgggcacttagtcaagggtgagcaacatagtaaatggaggaaagccagagagaagctgaggaagcagtagggagccatgggaggggtttgagcaggggaagggcaggctccatgcagtgctccagaaagacaccagccgggagaggcaggcagggtggaggcgggcagggtggaggtgggctgggggaggtgggcagggtggaggcgggcggggggtgcaggcagggtggaggtgggcagggtggaggcgggcagggtggaggtgggctgggggaggtgggcagtggggaggccggcttgtcgggtaggctcggctagagtgcaggagacttcatggctgcagagaggagagatgggaaggttggaaaaaggatgggcaagggatgggggcttggggaatcccactccccaagacaagtggaggcatgggtgcagacagaggtgatagtttagcatgcgacttagaaattatgagacatccagggaggggacctgtccatggagggtccctcagactggggactcaggacagaggtcagggagaggggccaggtttgagagtcgtgcccaggggtaggagtggtccttgtggtctcaaacccccggggttctggcctccacccctgactctccctgtcctgcccctgccaccccacagaagctgaaggatgagattgcagatgtgtttgcccaaatcgactgcttcgagagtgcg

SEQ ID NO: 40953 - DNA, 1141 bp, Artificial sequence
  DNA replication origin
cccaccgccgtccccctccttaatgcggagaacgacatcctgggtgtctcccagctgcctcctgcgcacggacggtttctcgaaagcttttaaaaacgaggctccctcccggcggcggcagggagggtgggaaggggggcgcccaccctcgggagcttccccggtgggcggcggcggccgctcccagccttttcgggagatctctggctgattattatggaaatcaggccccagcagcgcgcccgggtggcgcgggagcgggaggcgcttggtgcggctgagacgcgctgaggacccgctctgccagccaaaggagcggtgcgggggagggggcgtgggagcttcccgcgctcctgggacacgcgtggcctgttctggcccgggtgcccgggtgacactgttcccgcgcagggccgatgggctgagctgcagccggaggggctggggtcgcgcacggaaacctgggcgcccaagtctgggagttcatttccgccgggacctgggcccttgatatcagcggtgctggatattttcagtgcaattaaaggcaaaggcagtggggttcacgccaccaccccaggaacagaactggggcgtgtaatgagctcaagccctgtgtactgggcgcgtgtactcggcgtccagcaccgacctcagggcgctgatctatttaaatccttccgttgacttgggcatggtcaggcccattttatggatgagacaacagagacccagagaggcaaagctcacacggccaaagcagtcgaggagagacctgagctgggagttgtccaactcctctggccagttcttacaccttcggtcatcctgtctccaacctgaggatgatgcctttgaccttccagccgcgcatccagctctggcctgccctgtgcctctctgcggggggactctgcaaatggggagagagacagcgtggctaatgtcgaggagagctgagggtggtgggttgtcctggtgctgaggggctcttggtttctgactatgccttctatcaccaccacagggtttgagttgagccaggatcccccacccccaccacccctcaaggtgcaggaaatctcatcattcaaaatccatttcctttatattgtcacattctggagaagggctccaatct

SEQ ID NO: 40954 - DNA, 1192 bp, Artificial sequence
  DNA replication origin
gagagagggagagagagagagagagggagagagagagagagagagggagagagagagagagagagagagagagagagagggagagagagagggagagagagagagagaggaggagagagagagagagggagagagagagggagagagagagagggagagagagagagggagagagagagagagagagagagggagagagagagagagggagagagagagagagaggggaagagagagagggagagagagagagagagggagagagagagaaagagggagagagagagagaggttggggctgcaggttgcggggagctgtaggtctgctctctgagcctcctctcagaaggacagaagtgttgtgtacaggctggaaatagctgtccattattgagtacctactgtgcgctagagaggttacagtatctctaacctcacagcagccccaggagacaagtaaaagggactcttcctctttactccaagagccgaattgacatctccatagtaaacattggcaggattcatttgggacccaggtcctcctggtcaaagcccctgctcactgccttctgctgtgggatttgggaaatggggtagctggtccctactgcaggtgcccctggattgctgaagccctgtaagatctccaaggatggccagggcccccacaggcacaaatgtgggtaggctaaggaggagaaacagggagggggaactgcatgaatggaggcttggaggccaggactgcttcgggaagactgtatgggagatgcagcttgagacaaggttgcgggggtgaaccagagccatttcatatagggcttcaagacttgaagaccaggctgggccttgacagagagaacctgggaagcatctgaaagttgttgagccagggagggagatgatcccagctatattaattccttccttcctccgttgactcatttattaaaaatttattgtcttctccgcggcatgcctttgctgggactggtgattcagaaatactagtcataggccggatgcggtggctcacacctgtaatcctagaactttgggaggccgaggtgggtggatcacttgaggtcaggaattcaagaccagcctggccagtatggtgaaaccccatctctactaaaaatacaaaaattggccgcgtgtggtggtgggcgcctgtaatcctagctac

SEQ ID NO: 40955 - DNA, 944 bp, Artificial sequence
  DNA replication origin
tgagggagatcagggctggggtgaatgttggaggaattagggaggaggattaaatgtttggggtgagggtagggaaataaaggcaccccaggcagggcactggcttgggcaaaggcaatgaggtggaatgagctggccgtgtggcaagagttggcccctccacctgtgatgtggactcgaaaaggaggggcggccgtctctctgattgttagctatgcaggcctgtgccaaccacaccctacctccccttttacccctttcccatgcccgtcttcccacctattctgtccattctgcctccccctcactggggcctgggtgagtccctggccctctggccacagaggtcccaccggccaaaggagaaggctggcaccagtggggctgcctccaggactccagcaggggatggtttctccccgtcccctccacggtctcttctcagattccttctttcttctttctctccctcttccttcttccctgcacgcaccaccccctccaacaatattctcactgtctcttttcctgccctgggggtgattttgtccgattgattgcccaagcaatctgaattgctctgaatcagaaatctgactggtccctgccccagccccatctccatcgtgaaccccatcccctggtcccaccctgccgctgccctgctccctggctcctgccctgcctggctctgtccctcttcatcccaaactctcacttggcccttggtactcaggacaagacctgagagggggaatgattcacccattgggcagaagggaaagctgacacccagctgtacagtcagtggcagatcactgccctgctcctatccctgctctgccctgcctgcctgccccgtccctgtctagcccctcccaagccctggcttcatctgagcctctgccacagtcttaggttcccagatgggctcgcttaggtcc

SEQ ID NO: 40956 - DNA, 2805 bp, Artificial sequence
  DNA replication origin
ggtgtggtggctcatgcctgtaatcccagcactttgggaggctgaggcaggcagaccatgaggtcaggagatcaagaccatcctggccaatatcgtgaaaccctgtccctactaaaaatacaaaaattagctgggcgtggtggcacgcacctctagtcccagctactccggaggctgaggcaggagaattgcttgaacctgggaggcagaggctgcagtgagctgagattgtgtcattgcactccagcctgggtgacagagtgagacttcgtctcaaaaaaaaaaaaaaaaaagacaacaacaaaaacaaaaaacaaggaggacatggccctttgcaggggagcaggtgtgcctcagggctgtggagcacctactgtgtgccagggcgtttgactccctggcaggggttgttattaatgcatgttatgcataaggaactaaggctcagagaagtggagcgacttgctgagatcacacagatagggagagaacccagatcatcctgggtccaaagcctgtataccacttcccagcgtcaccttgcagagcatctgggaaggcttcctggaggaggtggcttctgaaggtgatggggagggaggggcagaaaggaaactgcacaatgacagttgaagaggagaaaagactggggatggcgaggaggaggccagtgtgtcaggatgaaaggtgctcacagattggtgggcccagaagggggcacaggaaggtagtgggccaagtggacatctgtgatgggggcagtgcctggtgcagtgggacccagaggagacaggcttgctctgcagggactgacgggagcgtggcccctcaggggcaggtgcctgggctggctcccagtgggagagtggtgctgacagcagggaagagaacggggagggccccctggcagagcaggggggattgtgctctgggcatggaggcggcatgggatgatgatgcccattgggggagctcgcccctcagcgccccctgcgcacctgaggagcagggtgagagcaggcgtggacggggatggggtgcctgtggcagaggggatgcgcatggtggtgccaggacaggagaaggagtttgcagaggtcagccttcgaggaccgcagaggtcagccatgctggggatcaggcttcccctgagggccacgtgcatggagtctcttgtggaaggggggtagagacagtgtggccacagtgggtcacagcatccccctcctcctgccacatcagaggcaccaggatgagggccgggaggaatgtgttcccaagactcgaggctggcactgggccaggaccaggaaggccacctgtgtgggggcagcaggggggcctctgggtgccctgagcctgggtcttgctgcccctcctgtccactcccagtgccctgtccacctggcgctgagagccggcgatgctgggggtttgggatggggtcagggctcctgggtgtatgtgcgcatgtagatttgtgtgtgagtgtaggagatatctgtgggagcagtgtgtgtaggacttgtgtgagtgtggtgactgggctgtgggagggttggtggctgccaccattgcgttgtaggtgggtgtgggcaggtgggcatgggcaggtgggtgtgggcagggggcatgggcaggtgtgcatgggcaggtggggttgggcacggggcatgggtgggggcatgggcaggtgggcatgggcaggtgggcatgggcaggcgggcataggcagggggccatgggcaggtggggttgggcagggggcatgggtgggggcatgggcaggtgggcatgggcaggtgggcgtgggcaggcgggcataggcaggggggcatgggcaggtgggcgagcagtgctgtaagccctcggcccctccacccactgccctgtcccactccctctttgacagcggcctggcctaagggatccaggggggtgtgaggggcatcaggaggaatagcactggaggaaactggggaagatgagggccaggagggttgggagagctggagagggtgtggggaggattagaaagggtttgggagctggaggggctagatagggctggagggactgaggtgggtgaacactggagatgagttggggaggctggggtccggggggggtgggtctgggagccaaggggtgggtgccagccaagaccgctctctgcactccctcctgctggtggctggcagcctggtgggtgttgatcatcctcacggctgagcagcgggagcactgaggagggagcaagacaggctcggctcacagcaatgagggaagctggccaaggtggaggcggaggaggcgtgaaaccgacagtggagcccaggccgggggctgagagagagacagaaacctcagactggaggcagcctggagtgggagaggcgggcatcggccagcagatgggaaccctcacagcagaccaagaaatgggagggtgtagtgcccatctctaggtggggaaactgaggctcagggagggcaggttgttccaaagccacccattcggagcccaggggcataggggcgggggagcagggaggagcggacctgggacacagaccgttgcagctggggcccccacctgcctcacttatgggattccttggccagaggaaggagctgggctgaggttcaggagcctgcagttgagtttctgccttccagtcgccgccctgctgtggcctcactgtgtgtcctcggcaagttccggtccctctgagggcctcagtctctctgtgaaattgaagaggcctgggaccagaccatctgccatattcctttctgtttctg

SEQ ID NO: 40957 - DNA, 664 bp, Artificial sequence
  DNA replication origin
gtcaatgccagcacccagcacctgtcactcgaggagaggtgagggaggtggagaagggcagggctagggcattaggattccagacagctctggacacccaattttccagctgggtgccctagcctgctctctgagcctcctgccagagccagtctaattgacagggagagaggaagctcctggggtgggggcaggagaggagaggagtgagggactagagaacaaggagaagacagtgaggaggagggagagaagagagaagagggagaggaagagatgggagaaggactgggaggagagaggggagaaggaggagaggagggaggagggaggagaggaggcaggcaggtgggcacttagcccaggggaccgcaagggaggagggttggctggctgattgcagctggaagggaatcaagaaatggcacccctcatttaaaagaggaggaaccgggcctggagaggagaagccatgtacccggggtcccgcggcccactgaggcaggggcaggattagagggcagagcttggtttcctgactcccaggcgggggaaggagatggaatgggtcagggggtaagggtggaggagtcctgagaggggagggcccctccgaggctgatggaggtggggtgaaaggagactgcctggaggcctcgggtct

SEQ ID NO: 40958 - DNA, 806 bp, Artificial sequence
  DNA replication origin
tccggccctacaagaagcaccaccgggaggaggtgtacatggccgccggtcacgccctgcgcaagaaggtccagttcgccaaggacgaggatctgcatgacatccttgattactggaagggggtctccgcccagcagaagctgtgaccccccccttcctccctggtgaggtcggagccagagggctgggggccttttgggggaagggtccaggcggccagggcggggagcagactcgggggccaaggcccaggagaggacgcacatgcagacccgcacgcacgcacgcacacacacacctgaccaccacccgactgtgaacaaaccaacatccgacaataacggacaggaaaacagagacacattttccttaaagtttacaaactgataccgaaaccagtcgtctttactgtgctgcccagggactctgctggggtgtgcagggccggggggctggcggggggaggaaggaagccaagagagggtgtggggtctggggggtctggggctagaaacaggtgtgggggtcaagaaagctggagtagagagggactgaagcccctctagggcagggagagggtcccttcccaagctgggagtcaagtcacctgcagatttagcattagacatcgggcaatgtctccttccactttagagagggggggaaactgaggcccagagaagggagttgacaaccccagggtcacacagcagcttagcctcaagtcccccaacttcccagcccagtgctgtcccggaaccccctgcagctctcttgtggacccctgcccgccctgtgcccacccc

SEQ ID NO: 40959 - DNA, 1143 bp, Artificial sequence
  DNA replication origin
atctccaccattgccaaggaggtggacaaggtcaaccagatcattaacaactgcatcgatgctctcaagctggactcggcctcttttctgggaggcggcagcagcagtggggaccccgagctggccttcgagtgccagtccctccctgcagctgctgccgcctcctcagccactggccccggggccctggagcggcccagcttcctttcgcctccctacaaggagagctcccaccacccactacagcgccagctgagcgccgacgcggccgtgacccgcaagacctgcagcgtgtcgtccagtggttccatcaagagcgccaaggtctttagcctggacgtgcccgaccatccggccgccacagggctggctaagggcgactccaagtacatcgagaagggcagccccctcaacagcccgctggaccggctcccgctggtgccggcgggcagcggcgggggcagcggcgggggcgggggcatccaccacctggaggtgaagccggcctaccactgcagcgagcaccggcacagctttcccgccctgtactacgaggagggtgccgacagcctgagccagcgcgtgtccttcctcaagccgctgacccgctccaagcgtgactccacctactcgcagctctcccccagacactactactcagggtactcctccagccccgagtactcatccgagagcacgcacaagatctgggagcgcttccggccctacaagaagcaccaccgggaggaggtgtacatggccgccggtcacgccctgcgcaagaaggtccagttcgccaaggacgaggatctgcatgacatccttgattactggaagggggtctccgcccagcagaagctgtgaccccccccttcctccctggtgaggtcggagccagagggctgggggccttttgggggaagggtccaggcggccagggcggggagcagactcgggggccaaggcccaggagaggacgcacatgcagacccgcacgcacgcacgcacacacacacctgaccaccacccgactgtgaacaaaccaacatccgacaataacggacaggaaaacagagacacattttccttaaagtttacaaactgataccgaaaccagtcgtctttactgtgctgcccagggac

SEQ ID NO: 40960 - DNA, 1860 bp, Artificial sequence
  DNA replication origin
gccggatggtcgggcacgtccaggctaaagaccttggcgctcttgatggaaccactggacgacacgctgcaggtcttgcgggtcacggccgcgtcggcgctcagctggcgctgtagtgggtggtgggagctctccttgtagggaggcgaaaggaagctgggccgctccagggccccggggccagtggctgaggaggcggcagcagctgcagggagggactggcactcgaaggccagctcggggtccccactgctgctgccgcctcccagaaaagaggccgagtccagcttgagagcatcgatgcagttgttaatgatctggttgaccttgtccacctccttggcaatggtggagatctctgcagccgagccctggccgttctcgaggtccgggaggtcatcctcgggccgagccagaccgtccccgccggcgcctgtgcgcacctcgatatagttgcctttggtggctaccttgggtgtgtccagcccggcctccaaccccttggcggtgggcagcttctccccgatcatggaggggatggaggccatgcgagatacgggcagcacgggaggctcgcccagcttctgggcggcgtgcacaatggagccggcatccacatcagccccgtagcgcatctccaggatggtcttcttgacgttgacagacttctgcttctcctcctgcatgcgccgcttgcgcaggcagtagtacacggctcccagcacgataaccatgccaaagaggcagcccaggatggtcatgatgtagtgggtggtggtggaggtgctgggcgccaagtctccggggacggggtcccgcgtggtgaaggtcaggcaggtgtggttgaagcggcggctgttgcgcagcgaggtcacgcagaaggtgtactcagtgtgcgcccgcagtttgtccagcgtcacgatctccttcttgttcttgagggtcatgacgtcggagaagtagctgttgttgtactgcacgaggatgtacatcttgctgtaggggtgtgggatgatgaccaccagggtggccgaggtgaacgtgacgtggtgcagcttgatggctggccctgccgacgcatccgtggtggacgaggccggcggctccaccgaaaggatctcgtcggggttgaagcccgagttctcgtctggctccctctgggcgtcggtggagtagggcgtggggtggctcacgggccgggcgggcagcgagccattccgacacttggcctggagtacggtgatggcgttgaggctgtggtagggccggggcaccagcagcgggtagccggcaaactcccgcggcgactcacactgcaggcggtcgtagttcttggtgacgttgttgaagaccaccagccaggccaggaagccgaagaggtcgcactcacagttgaaggggttgccggccagctcacacaccatcaggctggcgaggctggcaaaggtggcaccgtccaggcggctgaggcggttggaggacaggtcgatgctgatgaggctcgggcactcggagaaggcggtgggcgtcaccacctcgatgaggttgtgctggacaaagaggaactgcaggcggctcatgcctcgcagcatgccctccgtcaggttgctgagcttgttgtagcccagctgcaggacctgcaggctcgactggcccaggaaggcaccgtcctcgatgtaggagatctcgttcttggtgaggttgaggtcggtgaggttcccaaagcggttgagcgaggagtagagcacggctttgagcttgttctcgttgagccgcaggtcgtgcacggtgctattgatgtgctgcgggatggtctcgtagggcggctggttctggctgcagatggccagccacacgtag

SEQ ID NO: 40961 - DNA, 1142 bp, Artificial sequence
  DNA replication origin
ggtctcgtagggcggctggttctggctgcagatggccagccacacgtagcccttgtcgccctcaatgagccagcagtcggcacgcacggcacccggccggcacacgcacagcagcgccgccgcgcacagccccaggcgcagcatggcgctggcctcggagtgaggggccagggcaaggcagggggtgcctagcggccagaggctggggctggcagtacagtcctccctggggccgccaccatcttgggggcgacccccagcacgggggccccaggcaaggtgggtacagctagtgccaactgctggggatcttctagggtgctacagcaggcactaggcctggctagggctgggggtgggggccccacagcctgctccccaccgcagcgttgctccttgtctcctgctaggaaggtgcaagggttctcagggcttgacttcctctccctcctcctcctcctcctcctcctcctcctcctcgtcttcctccttggcttccgggctcagaacttcagatgattcccacaggaggctggagagtgccgcactgagccaggagtgagagagatgggggcaggaaggaagagacccatctgcacctggttcctgaaaggcagcatcgagagcgggtgacagatcagtgtgagggctcagagcagccccgtcaagctccagcgcaggccccccatcccttctccacaccccgtcccagggcctctgtgccagcaagcactctgggggtccctgttacatcaaagaagcagggggttggtgggtggcaagaggcaggagggggcccaggggctgggacggagggagacagaagaatagggggagtaggggcagagactgaggatcatgggcacagaagggacactggagagaacaggtgagcacaggtgcagacacacacccccagcaccctggaggccatgctcatccccctacctgcacagagacccacatgcccccacatgagccagacctccatggcatgcacacgcagacagctacacacacacacacacaagcacacctacaatctgcacacgacaagcaggcccatacacacgtgtccacgtacccaagcgggcacccctgaatccacaaaaagaattaagaagcccagcaaaatgcctcct

SEQ ID NO: 40962 - DNA, 721 bp, Artificial sequence
  DNA replication origin
ctcggcacattttgtgccccatcatgagcaccccatcacagggggggcttctccctctgatattgaagattcttttttttttttttttttttttttttttttttttttgagacggagtctcactctgtcgcccaggctggagtgcagaggcgcgatctcggctcactgcacgctccgcctcccgggttcatgccattttcctgcctcagcctccggagtagctgggactgactcagccgagtcaggggatccaggatctccccaccatccctagcctggagctctcactccacacagcatgtcctgagaacccgctgtacgtctgaccctgttctaggcatgggggttacagcagtgaacaaagttaaatcctgctttgcttttctgctgggggtggggcaaggcagggcgatgatgaagaattaagtgacgtcaggtagtgctggctgctgtcaggggaccgaagcctgggttgggtgaggagtgagttatctcagactggggggctagagaaggtgggggtcaggggcagggagtggttgagcagagatctcaggtggattatggggattctgggggaagaacattccaggcagagagaagagcaaaggtcctggggtggggagtgtgcctaggggtttgaggagcacagctggcctggaatcagtacttcctgattgatggaaacatcgaaatctctcgaggcttgtggacaactccc

SEQ ID NO: 40963 - DNA, 1314 bp, Artificial sequence
  DNA replication origin
gaagccactgtgtagcagttgtgaggcctcagtttcctcatctgcaaagtgggaatagtgatagtgcttttaagatgtttaaagttggctcaggattaaatgagttaatatgggaagtgcggaggcccagccagtgcaagcactgaagacttttcatcttgtcggaggccgcccatccctccccgggctacctctcagggggcttcgctgtccgacactggagcctccatttcccccttgcggtccccacatgcactgcccctgtcttgggacagccctgagggtactggagggcagggaagcgttcgccccttgggaccctgggggaggagcaggtggaggaggcagagccaggagggcgggcctagccggcgcctggtacatagtaggtgctccataaatgtttattgaatgaatgaatggaggccatgcaggcagaggcagccgtgctgcgcaggcactggtgaaagagcgggtccagtggacactggtgagtagtgcccaggggctgcagctgagggggccagcaggggccggggggaggcgaaggtcaggtcgggagagggcaggggtcaggagtgggaattggggtcaggtggggagagggcaggggttgggagtgggaagcggggtcaggtggggagagggcaggggttgggagtgggaagcggggtcaggtggggagaggccaggggtcgggtggggagaaggtaggggtcaggtgggggaggcagggtcaggtgggggaggcaagggcaagtggggagtggctagaggtcgtggggggtggggaggtggggtcaaatgggatgaggccaggggtcaggttgggaaggtgggatcaggtgtgggaggcacagtccatgggggaggtgggatccaggggaggagaggtaaaggccaggttggggagagaaggggtgagggaggcagtctcctgagtagcttggaggattctgggaaagccaggaggtgggtttttaatacaggtcatccttggctgtgggacaatcctatccccaggtgcctggtggtgggtgggctggggtgggggtttgccagggagtgggccctgctcacgggccatgtggttacagctgcccctagaaccaggctcaggtgtctcctgtcaggccacagggtggtttgccaaggccaagacctttggtaaaaccttccaccccctgcctctctccttccaccaaggcctggacatggagtaggtagtaaagatgactgtggcaccctgtgagcaggggaggcacggggaccgggtgagccatgggggggtgacacggtgggcaggtgacaggg

SEQ ID NO: 40964 - DNA, 639 bp, Artificial sequence
  DNA replication origin
agaggagcccgaggggccgcggcctgggaggtcgcgggaaagcaaagctgcaggtccccagcccaggaagaaggtggcaggacttaggtctgtggggagatttcagaaggcgacatgtcaggcgctgtgcctggcaccagcgcggacgaggtgcccaggagggtcagctcctgcatcttttcacctgaaggcagaagcttagtctgtcccttaccctcctgaggaggacgaggaggctacagagggggaaggtgtcagggaaggaggaaaaggggaaaaacatttgcatgcatgacaaggctgaagtgagggagagagaaggggggagaaagaggaaaataaattaccatacaccaggatcttgttattcaagctaattttcaaaggaccacagctgtcacgctgagataattcgttaattataacagccattgtgctttggcgctgggagagaaaccgaggccggggaacaggctgaaggtgggggtgggagcaggctattggggggcctggacatcagagaggggacagggacagaggcaaagaggggtgtgttgccctcgggactgaaaggaagacaggccaggccccatccttcctcactgtcatggttgcggtgggtaatgaggtcctcctgcc

SEQ ID NO: 40965 - DNA, 667 bp, Artificial sequence
  DNA replication origin
ggaactgggagagaagcaggggaggagggggaaggggccgtgggagatgagtccagccgtggaggtggacatggacgagtgagtttcaggtgccagggaagggccccggaggcagctgggtacggtggtttgggtgtggtcagcccagagctgacattagaagccttgggaagggttgaagggctcttggggtaggggagggggaagcgggtttgagagaggcagtgagcagggaccaggacatcaggggaggccactgcttggcttacaagcagaggagcccgaggggccgcggcctgggaggtcgcgggaaagcaaagctgcaggtccccagcccaggaagaaggtggcaggacttaggtctgtggggagatttcagaaggcgacatgtcaggcgctgtgcctggcaccagcgcggacgaggtgcccaggagggtcagctcctgcatcttttcacctgaaggcagaagcttagtctgtcccttaccctcctgaggaggacgaggaggctacagagggggaaggtgtcagggaaggaggaaaaggggaaaaacatttgcatgcatgacaaggctgaagtgagggagagagaaggggggagaaagaggaaaataaattaccatacaccaggatcttgttattcaagctaattttcaaaggaccacag

SEQ ID NO: 40966 - DNA, 1169 bp, Artificial sequence
  DNA replication origin
aactgaggctggagggaggctgaagtcccctgagatctgtgcaaaagctgacccctccccgacttccccagggagcagaagagcccagaagagcactggagtcacagacctggttcaaatcctggttttgtcttttgcatgaactgtgtgatctgagcaagtcatgaattacttggagcctcgatttccttatctatatgagggcggcgagctggcctccttcactcagccatgaacaaatatttattgagcacctactaggagaagcaggacccttcctcggggaactcagtccagaggtagcagcagcagttatgattccggttgtgatggaggaagcacagggggctgtgggaacccacaggagagaccccggccaggttggaagaaggcaggcaggtaggagggcagaacaggcagcggctcccacaagaccatgtgggctgggctctggatgctgttggaattttcccagatcagcccgagccaacgaagacttttcagcagggagtgccatgctcaggttgatgttctagaaagttcatcttctgctgggtggagggggcatggagtggggaggtagggttggaggtagagagaccagcaggagcagtagggggaggcggcggcaccaaggcgggactaggggcaggtggggaggtgtgggtgcctctcactgtgtctgggaactgggagagaagcaggggaggagggggaaggggccgtgggagatgagtccagccgtggaggtggacatggacgagtgagtttcaggtgccagggaagggccccggaggcagctgggtacggtggtttgggtgtggtcagcccagagctgacattagaagccttgggaagggttgaagggctcttggggtaggggagggggaagcgggtttgagagaggcagtgagcagggaccaggacatcaggggaggccactgcttggcttacaagcagaggagcccgaggggccgcggcctgggaggtcgcgggaaagcaaagctgcaggtccccagcccaggaagaaggtggcaggacttaggtctgtggggagatttcagaaggcgacatgtcaggcgctgtgcctggcaccagcgcggacgaggtgcccaggagggtcagctcctgcatcttttcacctgaaggcagaagcttagtctgtccct

SEQ ID NO: 40967 - DNA, 1462 bp, Artificial sequence
  DNA replication origin
aggtgggctggtggtccccgtggtcggtggaggtgggagaggtgggctggtggtccccgtggtcggtggaggtgggagaggtgggccggtggtccccgtggtcggtggaggtgggagaggtgggctggtggtccccgtggtcggtggaggtgggagaggtgggccggtggtctccgtggtctgatcaacttgcttgctgtgcctccaggcactcaggggtggcacaggagggagcatgtttcctcagcagacagttctcaaggagccagtatgggcctgggcatgaaaagagtccctgccctcaggaagcccacacaggggcagacttgccagccagtccttacagggtggctgaggcctggtgggctggaaggcttcctgtaggaggcagctttgagtcctgcctgagaagtagcactcactgggcggggatgggacaggagggtactccaggccggggaatctcaaggggaaaggccaagagctgcaaaaagcctctccgagttcagagaggggtaagaagctcacgtgcccatccctgggagtggggagggaggatccaggagtctggggaggacaccagaggcccctgagctccctccgggccaggaaaaggctggacgctgtgtcttccagcagcagggagcatgtatgtgtttgggaacaggccaggtggatgctgtgttccaggaaggagctggtaggggagctgaggaattacagggggtgtttcttggaggtgctgttctggggttgggctggaggtgggaaggtgggtaaggcaggagtggaagtagaggcccaagcaagggaggagcctaggagatcccgcaccagctggagaggtgtacatgtgtgcacatgtgtgcacacatgacatgtgtagatgcgtgtgtgtgcacgcctgcgtgtgtgaagcggggagcagtttgtcttgatggtattggagggcacattgcagagacagagccaagccagatcatgaggggcctaaactgtggagcagaggagctggggaggcgccagaggctttagagcagggcggcgatgtgagtgcgctgcgggaggcttccttgggctgctgtgcagaggatgggctgaggcagggtaggcgacagtcagttaggagactgctgtgctggggggctttactggggtagggggaaggggccggacaggagtggggtggtggagcccagggcggctcagtggaagaggtagcatttgatgagaatgtaaagggtgagaggtttgctttctggaagtggaaggagaggcacggcaggtggctggaacagtccctacgaaggcttgcaggagggagaggccaggctggaggccagtatattcaggggcctttgaggaataaagggcaggttggagtcaaaaaataatgttgtttagtgaggccctccatgtgcccggcacggtctacccaggcctgagcgctagctccaccgcc

SEQ ID NO: 40968 - DNA, 1333 bp, Artificial sequence
  DNA replication origin
cggggagtgaggccatgtccttccctccaggggctcaggggctgctcccagcaggcgtgcccaccgagggtgggtggggaggctgagggggccttggggagtcctggcacccctgcaggcctcaggctcccatctgtctaatgggtgacagcgaagaggtttaagctcttccaattctgccaggctgtgattcttggtagtcaggtttggtcaccaggcacctgctaggaggccctaagatgccagaatgcctttgccccagccctgcccaggcagccctggccctccaggtggctgaggtgctcctcaggcacaggtgtgtgggcctccgggggtgaggggaggggacaactgcccctgctgctacccccaggcccgtgtcagtgggggcagctctctgtccacagtgggagtcggcctgtggacagaaggtgaagtctgattggaccggagtggggtgggatgggggtagacacgagggggtgggtcagcatctctgagtggagtggagggtggttgaggcccctgacctgggaggataataaccccgcctttccttacattcttctcccttgcactcccttgcccctcccggtttcctagggacctgctgcatgggctggggacgtggagggcttggcctttggaggcagggagggggtggttgcaggcctcaccctgcagcagcctggctttgggcagttgtttcccttctctgtgcctcagtttcctcctctgtcctttgcgaatgatgctggtttgagggttcagtgggtgctgaggaagcacgtggtcaagctctgcaagcccttccttctttcatttaccaggaggagcaaggcggccatggcggggaggtggtggctggagcaagtgagtgaggtgggaggtgaagaagtgaagtctgggaagattttggatactattccaatctcatgggagccagcagccggtgagggcagaggccggtggcccaggtgtgcgacgcagggggctcagtgggggtgggagaggtgggctgatggtccccgtggtcggtggaggtgggagaggtgggctggtggtccccgtggtcggtggaggtgggagaggtgggctggtggtccccgtggtcggtggaggtgggagaggtgggccggtggtccccgtggtcggtggaggtgggagaggtgggctggtggtccccgtggtcggtggaggtgggagaggtgggccggtggtctccgtggtctgatcaacttgcttgctgtgcctccaggcactcaggggtggcacaggagggagcatgtttcctcagcagacagttctcaaggagccagtatgggcctgggca

SEQ ID NO: 40969 - DNA, 1017 bp, Artificial sequence
  DNA replication origin
caagcccactggggagggtgggcaggaagcccctgttggctcaaggaccccagctcctgccccatcacccggcagagaggctgaggcaggcttagtctgcactccagcaggtcagggggcatctgtgcacctgctgggggtggagagccagcttccaggggaaggcctgggacaacatggtgggggtctcgctcaggtgggggtctgtccattgtagagagagaggctggaagtgagccgggagcaggggaaaacgccagcagaattgatatggggcctgatcctatgtcattgaattttggaggcacagggagagccgtctggcactaggaggccgcaaacaggcagacaggcaggcagaaggagctgctccgtcctggctggggctggtggctgccctggagaggagaggagaggagaggctggggctgtcaccgaggctgtgttggtggcggccacgtggagggagctgttgtccaggcggcgctgagtgacggtggttgccgtggtgagggagccgcctctgtggcattgtggtctccgtggagagaggaggagacagagaaaggaggctggctggctgcgcacagtgttggtggttgctaaggatagggagatgctatctccaaggtgcggtggtccccacgtggaggggctgtggctgtccaggtgttggaggtccccaggaaaggggtagtgatgggtgccctgaagggggcttgtgcagggtggtgggtgcgccccggaggacggaggaggtgtggtgggggaagggctgctgcaggggacttggtgttgctgtcacaggctgaagtgggggttcttggtggtggagggctggggagtgaggcacagtgggcgggtctgcacttatcctgcctgcccctgtggacagaccggagaccctgctgcaccagcgcttgcttcctcccagtgcctccacccagcccttccctcccacttctgtggtcatgatcttcccacctctgcctccttgagccctctcgctccccaggg

SEQ ID NO: 40970 - DNA, 1543 bp, Artificial sequence
  DNA replication origin
cctcagcctctctgccgggtgatggggcaggagctggggtccttgagccaacaggggcttcctgcccaccctccccagtgggcttgtcttagcccccaacaggcctgccgctctgcaggccgcctcataggccctgtggaaggaaagctgggtgggaggggtgcccacggctgggggcaggggccaggcccacaagaaggaacacacagaagcctgaggctgggccacatcacaggtttgcaaggccgggtcatgtgagctatgctcacagacagcgacacacacacaggcaaaaggaccctgtccttaccagatgtctgcagcagaggaggcccctccggcactgtccccaacctgggtctcagaaaggttccccaggcagcagcggcagcagtagcaatgagatctcaggtcctggcccagcccgggtggcagcagctcctcacccaagtcctctccttctgcagggaggcgagggggagagaggggagggagggagagaaggggaggagagggaggggggacagcaggagggagggaggagggaaaaatgctgaagtcttgaagggtacactcacttctttcttgggtttcccatggcaaccgaatataccacaaatgaatatcagggtgagacagagaggaggtaaagggagaggaggaatggagggagatggaagagagatggagaaagacagagatagagagatgggggagacagggcagggagagatggagagatgcagagagagatggaggcagagatgtgaaggcactgagatggagagatggggcagggagaggagaagagatggaggtagagacagaaggatgatgaggcaggagagatggagggctgaggcttccaatcgtaacccatggggctcaggggccagggaagaggccaggggccacagggcttctttcaagcccctgggcaggaggagcaggcacagatgagtgagctttctgggaaccaaggggcccccactcccaccccttcaccttgtcccacactccctactgggctccacagcctggaggtgtctccccagtcacaccccagtcacagccatggtcacacatgtcacacccacgtgtgtgtgcacacacactctcacactcccctgacccccagtgcccccacacagccctcaccccctccatggccaactaccctcctctcctgttggtcactcggatcaccaacgccgcccaaccccatcgtcagccgggccccagggaacaaagacaccctcgccctcggcacaccctctcctcttcagaactctgccaggactggcacacgccttcccctatgtgctcagcctgttcccagccaggtgtaatgcctctaccccaccttcccgccacatgggctcacacacagcctaagagcacagtacctggctgacctccacctgcacagacaggcgctcccagacagacgggcctcggcggaacctcgtctccatctgcgcaaacacgtgcgcacacacactcagctcctcccgaggaggcccctctccctgtcccgccccac

SEQ ID NO: 40971 - DNA, 1239 bp, Artificial sequence
  DNA replication origin
tgggtctggaggccggctgggattgtccgtcctgggggcgcacggggcgggtgcgcgatggctgctgggccggaggagggggcgggcgggaactgccgcggacctggcgtggtggggacgggagcgcgcgctcggagccccgccggggccgcaccgccaccctgctcccccccgacctcgccgcgctccccacctccgcaccgtcctccgccgtccgcggctcttcgaggcccccgtcccccgcggcccaccccgccagcctccggaacttgcgcccggctggcccggctttcctccttacttgcctgtgtttagaatttgcagccgcagcccctgacgctcgcagccaatttcgcagcctctgggctctgcgcggtgcccgggatcggaaagcgaccggcaggggcgggggctggcggcggggcgggccgcgctgggcaggggcacagggggcgaccggagccaggacccggcgagttgctggcgagggggtgtgtgtgccgggtgggtgtggacggcatggggacgcgccgcgtgaactgccctgggagcgctgtggcgtgcaggcgtggctgtgctgggggtgtgttggctcatgtgcattggcacgtgtgtccgggagtggttccctgtgtgtgggcatgcttggggcatgtatgttttggcgtgtgtctatgttgggggccccgtgtccctgggcacgtttttctgggtgtgtttggtgagcgtggggcggggcagtccacggtgcccctggtttgtgcgtctgtgcagtggccgcatgcattttggcaccagcgtgggcctgcgtgttggggagggtgtctgtgtggggcgcccctgtgttctggttcagctgtgtgcagtgcaccttggtctctaggcccacgagtctctgggtctgtgatgtgcgtttctctgcggcggtgggaagttctcctgtgtggattctgtctgggtgtgctctgggaggacaggtctatgtgtgtgtgtgtgtgttagggtatagtgtgtgcctctggggtgctttcccatccctgctggctgaggggctgagggtcaattgtgtgctcccagctaggcctgggagcctttcctggaggaagccggccctgctagttctctgcctttgggagggggtgagggagttgaggcagtgtggcggggagaggggaagggaggcccgagtgtgtgtttattttccgttgggcgccgctggctgccagcacttggtgggtc

SEQ ID NO: 40972 - DNA, 2603 bp, Artificial sequence
  DNA replication origin
agggggagggcgagtccaggcgcacttcgggcggccccgccgcaagtttgcccccagctgttgaatgcgctggcggaggccggacccggacccggacccggatcccgcggggtgagcagcgcagggggccgcggccgggacaggggtccgccaggccggggctcgggtccgtggggccgccttcgcctccccgggcgctgcagctgcagcggcggcgccaggcgcggccccagccccgcgggcgtgtgtctgcgagcgcgcgtgtgtccgtggagcgtgcggccggctcgggggcgggagcgggcttgctgcggaaaggcctgcggagggcaccgggagcgggcgggctggcggacggacagacggggacggacagacggacacagcctgccgcggtccctgacgcgcgccgcttggcccctcccgggcgccctccccgccgaggcaggggcagaggcgcggcggcggggaggagggggcggcggcgtctgcgcgcacacgcgcgctcccagacacacacacagacacacgcgggccaccccacggccacgcaccccgcacccacacccgcgctcacactcacattcacactcacactcacacgcgcaggccccgcggccgccgcttcccggaggcggtgcttggcccggatcccggctggggctggggtaagtgaattcctctggatccgagcgccgcgaccgaccgaccggggagacggtgggagtcggggctggagccggagggcaccccctccgtcagtgggggtggggcttggagagggacacggaaggggggatgagacggggagagccacccccagtgtctcctgggtctggggatccccgtgagacccccgggggaccaccctgcgcgagggaggtggtggtggtggcggtgggcggaggcggtgggaggacaccgaggacggtcggtgaggtgagcgtttctgggggtggtgcagaggctcgatggtggacggtgtgccagccggtgccacactgcacctctctgccctcatcttttcgaatcgggggccctaacccctctctttcacggggtgctgccgggtcaaggcattcatcctctagctggtaagaggggttgacggggtggatgccttctaggggaaggggggccagggtggggcttgacggcggtggggttggtaagaccagaattggggggtggggaccctttcagaggcgctggccagggacaaggagggaggcagcccagggaggcggcataaatcgcagacactgcagctctggcagggccggggccactgccgggtgtgtgtgtgtgtgtgtgtttgtgtgtgtgtgcgagcgcgtgccagtgtgtgtgtgtgcgtgcgtgtgtgggctccagcagctgtcaggggacggggagggggtgggtgtgttggctggtggggcgccgtgtgcatgtggagaggattgtgcgtgctgtgtgtgtgtggtgtgtgcgtgtgtgtgtggacatggggtggaccctgctctctgtctgtatacacacaagcgcacacacgcacactgtcagtggcctggcaggatttcctcggaatgtttggagggaagggagctgatgtgtgtgtgtgtgtgtgcgcgcgcgcgcgtgtgcatgcacactcggggagcttgtgtccaaaacagaggccacaggccatggtgtgtcaggcgtgcccaaggagggagacgagaaggggacagtggtgctgaccgtgcactcagctggggaggaacgtggtactcggcactttctgcagctcagggctctgtgctgtgccccttccccctggactcctcccacccagcagctgcggctggagggcactgccttggtcccttgctgagacgcaggtgttgggctggagtgtgtgtgtgtgtctgggctgcggctgtcgctatcagcaggccaggctgtcggagtcagaaagctggagggagtggggtgctggcagcacctggaggaatgtggtggaagctgtggggcgcggactgcccggcgcggttaccgagaggcgttttaatatgcaagttgcatcatgagatgggactgggagtgtgtgtgtgtgtgtgtgtgtgtgtgtatgtgtatgtgcatggctgacacccctgttctcgtggcccgtggacacctgtgggacgtgtcacgtctgggccatcagcaaagcatgtgggcatgtgtgtcccctgagaggggtgcacaggcaggtgctgtcctgatgagccgggggccctgcaactgtgtgggtggggaggtgggtacctctgggccatcaacgcctaggcaggaagaaagagtgttaattgtggggacatcaggaaaaagtatgtatgtgaggtcagtgagaacctcaggtgtgacataagctccaggccgcaggtgacgtcactgggacagttttgtcggaggttgctccccccagccagagtgtgtaaatgtgatgtcacgggagtgtgtgtggccgagtgtggttatgtctcttgtatatgaggggtgggaaggggagagggatggagccttaggacgcgtggcgtggtccctcccaagaggccgcctttcccagcatcctgagtgggcatgggacccctttc

SEQ ID NO: 40973 - DNA, 1935 bp, Artificial sequence
  DNA replication origin
ggcagccacaagccacattatggctatttaaatttaaagtaataacaattaaaattaaaaatttagttcctcagccacattagccacaattccaatcactcaatagccacatgcagttagtggctactgtctttgacagtgcagacatgtatcctttccactatggtctagagaaagcccagtcgagtgtctagatggtgtggtccactatgaccctcaggccaggccaactctatcttctatatggtggcagaaagtcagctaagagctgaaactcttgtcaatgtacatctgcccagtaagggcaaagtctccaaagggagattcttagaccgttttagagcttcaaacaaattctgaccaaatccagccagacctggaggtctccagggagaagggagtggccggcactgtgctgggggtactggctgcttttgctatatttctttcacaaaggaggaaacaggctcagagagggttgtgacttgcactctggaagatgactgggaatgtctcggaaacagagcagcaagaggctgttttgccactgactccctggtattctttggggtcatcactgctcagtttcttgggcaggagcggattaggtggcatctgccagtgcccatctcagaaagtgtctgggcctgagagccacaggggggctgttggcttggggagcactctaatttctcgagggatccgccagagggcgcagaggccgttatgttccgcctgaggggctcttccagcaaggtcttggagctgggaccctgcttcttgcccagccttgtcagggatacacaccatgtgttggataccgcccctgccctgtaggagggctcagtttagagggcagagacagcacatggcttgtttgggtttgcagcgagggaccttgaaggatgggtaggagtgtgccaggcagcctggggtgcaggtggggaacgcccaatagtccttctgcataccccaggacaacaagtggcctgtgacccagtgcttgtctgccctcccagccccatcctgggccgttccctgttcttagttgaaaggagggaggaatttctggacagacgttctttctgctctactaatacccaactccgtggagttccctgtacacacatacaaagctgtttcatgcctctgtgcctctttgcacatgctgttcccagagtccaggacacccttctcctccttctttagctggccaactcctactcatccatcaagattcagctcaggcagtggcttcttctggggagtctccttattccagacctgcatgagatgtcccgacggggagttcccgcagcctggacttcatctgctgtgcaacacctgagaacaggcgctggtgcatgcggtcctataaaagtgatggagaagtacagggcctgctggcagcaggcctccgacatgcagctcgcagggcctcgggaggaggtgcttgcatgcccaagcaccaagttataggccccgggtgccaggcttcttgcatcttccacctcctcctcctcctcccagcatccacccctttgcaggtggcagcaggtggcaggggctttggcgtaaggggcggggaactgggcctctggaaggctaatgaaggttctctagctacagatgagcccagtatcccttggacctactcctggaggggtggggaaaggcagtgagtgccctggcacaaggtaggggagcgtaaagtctaatactgtctgtaggctccctgtgtaaccttgggggaatcactcctctccgaacctcagttgtctggcctgtaaaatgggaacgcagcagccgcacttccccagtcgccagcggttgaacgcgggaccaaccagcagggcgcaggcggcagggcatggaggtacaaggcggagagggggcccatcagcggaggcggagtccagggggagggcgagtcca

SEQ ID NO: 40974 - DNA, 997 bp, Artificial sequence
  DNA replication origin
agtcggagggctttaaagaggtgggacacttggaaggggtccggaattgtcctgagtcctgggccgggcagtcccagggccggggaggccctcaaaggcccctgatgctcaatgggtgagaggacccacttgggcagctgagaagctctgccatgttgggccgggcatggaatgggaagaacaccagtccccagcctggcttgtctttgtccccagcctggcttgtctttgtcgcatccatgtacttcctctacctctcattcagagtctgagcttggattatgtaggggctgagcagctttagctgcctgggaggcggtggggagaggtccggggcctatgggtttgaatctcagcctggcacttgccaatcctggtccatcactcagcctcctttttgtcatctggaaagggaacagatgacaacgcctgcctcgtgaggtttgagggtcgttgcgggcaagtgcatgtccaatctgggagagccggactgggttgtgaggcagcatttccgagatggcttgcacagggggtttgtgtggctgtgaaggtgtgacgtctccctagtggcgtggtgtcccatggtgtggccgtgggtctgttcacatagagtttgtgtcctgaaaatgggtttaagattgtgttctgtgattgtggaggagccgagtgcagctgtgattgtgtgtgtgtgtgtgattgtgtgtgtgtgtgatagaagagggtgagatgctgcccaggtgtgtggctgtggttgggtccctgtggtgctgctctggaaagggggtgagtgtatgtgtttagactgtgggctgtgtacaccctgaagttgtgtgtctacaaaagctgggttgtgtgtgttgtatgttgtcctaaaggagcgtgtgaccatgagaggggtgtgtctgtcactggaggagtacagagtccatctggggcctggtggtggtgggctgtggattggtctggggtgtcccttgggccgatgtgagtcctgacc

SEQ ID NO: 40975 - DNA, 1021 bp, Artificial sequence
  DNA replication origin
cacccctcccctgccccagcaggctgcgtgtccctttgtttcccgcggctgcctgtgaagttttcaccattgtcaggtcccctccttaaacaagtcaaatgcagcccttggctccaaagaaactctgcccatcgctctgtgccaaccttaggattcccagggactgaaagcgccagcctcactgccctctcctgtgcccccgccccctctggacctggactccccttcccggctctctccctcactctgttcatggctgctggtgttttgttttgtttattttgagacagagtctcactctgttttccaggctggagtgcagtggcacgatcctggctcactgcaacctccgcctcctggtttcaagtgatcctcagcttcctgagtagcttggactacaggcatgcgcaccacgcccggctaatttttctatttttagtagagatggggttttgccatgttggccaggctggtcttgaactcctggcctcaaatgatccacctgccttggcctcccaaagtgcctattctcctgctttattcaggcttactagatcttcaccgggaaacagtcctcagcccatttggcccatgctccaagcttgagagtgtttcactatcgggtggctgtttggtggcaaaagtttgtcgagggcagggtaggaaaggcctggtttctttgataggatcccttgaggctgtgttgaaaaccgacttggggtggaggcagggagcagggaggccagggaggagggcctgcagcaaagcaggcagcaggtgacgacagtggcggggactaggtggccgggtgggccggagggaagagcagcgtcccagacgatttggaggctggtgagcagaattgatgacaggctcgggaagaggtgtgagaggaagagaggaggagcggggagtctgaggttttgggtcccaaccagtgagagggaggagcaggtcttggggagaacgggggctcagtcttgatgtgttaagcccccaggagacgtcatggtttcagggg

SEQ ID NO: 40976 - DNA, 1734 bp, Artificial sequence
  DNA replication origin
cagaggagggccccacagatgggccaccccaacgctcagccctgcccacagctgatcatcagaggagtgtcccctggagcagggcaccaaaactggcagggtgtggcctccgactgaaggggcctggctgctgagcccaggagctcaagagcaaacccttggtatgcacgcaggttcctgagacagctctactggagagaggatggttgctcccactgggagcaatccaggcagccttactggaagaagtgccacttgagcttgggagttgggattcctttcttcaggaaccacttattggacctacgtgtccaagtgcaggtgactgtcctcagccacagtgatgaggctgggcaggtccctggggcttggggttgtgggtgtactaactaggtagggtagcctcaagggcgaaagctcagaggcagcacatgggttggatctggccaccttggatggggtcggaaatgaggttgggaagggcaagtccaggggtggggttgggagcgcaaaggagcttgggctgtgccctggaggctgtgggagcctctcaggatgtgggagcagggctatgggagctctggtttggagttgacttagagagggctgaggccaattggagtagggggtggggggcaggggcagtggaggagagaggagcagacaggaaggaggggatctgtggcctccaggggtgggtctggatctccatgtttgacaagaaaaatgcttaagaaggggtcagggctggggatttggggtggtgggtggagaagggaatggagaagctgggagaggggattggggtgtggatcagggggccacagccccatctttagtgggaagagacaaggagtgggtgtaggggagaggtggtgagggtctcagagactggaccacgcaggatgacggtgcttgggtatgaggccagggtggacggtgggcccaggctgtcccgggaacccagagaggctttcccaggatggagtgcagggtgcgcagggcactgtagtttggttgaaacccaaagctctggtcagccaggagaccctggcaactcgggtggcctctctgggcccagggccctcccctgtggagtggaggcccggatggtggagtgagcatggaggtacggattggccacggctaggtgagcacgtgtggctggggctgagccattgcttgggaaaaggtcttcccactctctacgacagggtgtctttgacaaggtgcagattggacttggaggcctgccagtctgtcaccactggggtaggggctggggagctggaccctgagtggcaaaggcggtgccctgggggaagggcagcctccctgcatgggaatcagcggcaatgccgctttctactccaggccttcccaggtgttgactctcccatccccccagccacatcctccccaccgcgggcagtggcagtggcctttcagtttacccttagctgtgctcctctgctcatgtggcccctgcctgggctgctctccctgcctgaatcttcctgatctttgaagcctggctgagatattacgtatctccatgaaacccaccaccaggtcctcccagcccttgggacttctcctggcccatgccatattctgccttgtggtgggacgagggtgtctgtgtggctgtctctcgatgtctgtggcttcctgggcatggaaactgggctgtgtgcatttgggtacatgaacctccccctgccccacagtgag

SEQ ID NO: 40977 - DNA, 1035 bp, Artificial sequence
  DNA replication origin
atgcggccgcgcaccaccttggccagctcctctgcgtgtccccactcatgggcgggcacctgcacccaggagcagggcagcccccagagcacctgctctgagccacggcactgccgcagcagctctgagtcccgccagcccggccggcccagcagacccctgccgagagaagagtgagcagcggtcaaagtgggggaccaagacagacagagagacagggagagagggacagacaaagggggaagagtcagagagagaagatggacaaccaaagagagacagatggcagatggagatggagagagagagacagagaaggggagggagagacgggggagggaggggggagggagagagagggggagaaggaggggggagggggagggagagagggggaaggagagagagggggagggagaaagagggggagggagagagaggggggagggagagaggcatcctcaaggaggaagctctcaggtccgagtgccctgcccactgccccacccacccacctcacctgacttcccggacattcttctcagtcacctccacgtggatgacgatggggtagatctcgttctgcaccagctcccgcacaccccgagcacccagctccagcaggcagtgcttctgcttggaggatcgaggctacaatgtactcctgggccacagacatcagcctcccatgcgctgcccccagacgggtcccctatcaccgccttcccagatgcaagtcctgcctccccacccagagggaccctggcaacgaggaaggagcccaaaagtacagacaagaggcctgggctcatggggcaacctggagatacagacctccccctcaggacctaggcctccccacccggaggatggagctgacccaaacccacccaccacccgccaccttatagccgactgccagctcccaggatagtggcaagttcaaggataaggatgtgtaggtgagctgtgtcagccaaacacctcaaggggggcccacatgcagtcaactgcccccacccacccaggcaacag

SEQ ID NO: 40978 - DNA, 1049 bp, Artificial sequence
  DNA replication origin
cagagtgtgtgtagtggtgcttctcacacgtgtgtggtggcaggtgctgtgaggacccaggggggttcccggaggcagtagggtgaggccttaggccagacaggtagaaggggctgggggagctcagatgagggagtagcaaatctggggcaagaggagcgggtagttagggaagacttcctggaagagagggagtttccgcgggggccttcaaagttaaagaggagttcgttccaggcagaaggcacagaggcatggctgtgtgtggtgtgcttggagggtgttggggacagcaggtgagtattgagtaccagctctgtcaggcattggggacgtgactgtccctgccctcatggagcttgctgtctaattagggggtagagagtcagataatcccacctatgaacacaatgagagagtgtgaggtgtgcagtggagaactgggggccgtggggcacatgccaggggccctgatgtctggggaccagggaaggtgtgacctaggctctgaagggagggcaagggttaactgggctgagtggtgcagggctggggctttgggcagccccagggcatgcaaaggccctgtggttggacgcagctgaagggagagtggaggctggtggtgtggggtcagtggctggcagcctccccaggctctcaggcaggactgtgtcacccacgtgggggatgtggcttttattcctgagaatctgggaagtcactggtgtgttgaaagcaggggagttaacatgatctgatttgctttttaaagcctctctggctgctggatggagaatgacccgtagggggcagggatgaggcagagaatcagggaggagcctactgccaccgtcggtcctactaagggtgtgtgtgtgtgcatgtgtaggaggagcagcagcaggacttaggaagggatgggtggcggggtgggttttggggtatcgacgagctggtatgctgcctgcctgtgcccttatctcttttgcgcccctcccctgccacagagccggagcggagcctcagaccctacagtttggtgcggc

SEQ ID NO: 40979 - DNA, 925 bp, Artificial sequence
  DNA replication origin
ggcaggggagggcctggtggagaaggacatctttgctgacccaggctcttctggcaagcctggaccacagtggcagtggggcccgctgtgccaggggtcccgtttcctcctctccctgagggggcggggctgagctctcagatgctcctctgtccctgcaccctcccagctgaagaagagagccctggaccagctgcggctggtgaggcccaagcccgtgggggcgcctgcaggggactccccggatcagctgctgctggagccctgtgcaggtgagtgcgcgggggcaaagctgtatcccgtgttgctcccattgtccagggatgtgtgcagctgagtgtcctttagcttgggtggcctctttggcctggaagggcctgttgtgagggttccaacaggagtgggggtcatgctgggggcctgagagacaagaccaccccacctgccatggtgattgccaaggttgagggagaccctgcggggaggtgcatgcagacgtggctgtgactgtgggtttgcacacatactggcttgttcttttctggcagagtgtgtgtagtggtgcttctcacacgtgtgtggtggcaggtgctgtgaggacccaggggggttcccggaggcagtagggtgaggccttaggccagacaggtagaaggggctgggggagctcagatgagggagtagcaaatctggggcaagaggagcgggtagttagggaagacttcctggaagagagggagtttccgcgggggccttcaaagttaaagaggagttcgttccaggcagaaggcacagaggcatggctgtgtgtggtgtgcttggagggtgttggggacagcaggtgagtattgagtaccagctctgtcaggcattggggacgtgactgtccctgccctcatggagcttgctgtctaattagggggta

SEQ ID NO: 40980 - DNA, 1158 bp, Artificial sequence
  DNA replication origin
gctgacccatgtcttgggctccaggtggatcagctcaagctcaaagtgagtcggctggaggaagagtgtgcactgcttcgaagggccaggggcccgccccctggggcagaggagaaggagaaggagaaggagaaggagaaggagccagacaatgtggaccttgtctctgagctgcgtgctgagaaccagcggctgacggcgtcactgcgggagttgcaggagggcctgcagcaggtaccagggccagggcttgtgggcacaggctggggggtggtcaggagggcctgcagcaggtactggggcttgtgggcacaggctgcggggtgggggatcaggaaggcctgcagcaggtagcagggccagggcttctgggcacaggctgggtagcggggctcaggagggcctgcagcaggtaccagggctggggcccatgggcacgggggtggggggtggtcaggagggcctgcggtaggtaccagggctggggcttgtgggcacaggctggcaggaggtcaggagggcctgcagcaggtaccagggctggggcccatgggcacgggggtggggggtggtcaggagggcctgcggtaggtaccagggctggggcttgtgggcacaggctggcaggaggtcaggagggcctgcagcaggtaccagggctggggcccatgggcatgggggtcgggggaggtcagaaggacctgcagcaggtaccagggctgggcctcgtggccatgggggttgagggggggtcaggagggcctgcagcaggtaccagggccagcgttcatgggcacaggctgcggggaggtcaggagggcctgcagcaggtactagggccagggctcgtggacatggagtgggggtgggggtcagacccggaaaacaggccctcttgctgtttgcttatcctcccaaggcctgggaagctgaggatttcagaaccagggatctgagatctggatggagtcccggtagcctcttgcctgaagctctgagctgagggcccttagcacgtggctgtccctggttgtctggtctagggtgtgtgagcagcctccagaaggtcctcaaactccctaaaactgcccccctgattttgagtgtgagcatttttctggggaaagggccccagctttaatttgatttgtagagggt

SEQ ID NO: 40981 - DNA, 1316 bp, Artificial sequence
  DNA replication origin
ccccgacggcgggtctgcggacgacgccccgggggtgcttggccgcacatctagccctagggagccctggtcgacccccgtgcgcctcttgcccgcagaccctgaggacacggccatgccgggccgggcggaggcgggggaggccgaggaggaggccggggccggctcggggtctgaggcggaggaggacgcgctgtgggagcgaatcgagggcgtccggcatcggctggctcgcgccctgaacccggccaagctcacgccgtatctgcgccagtgccgggtcatcgacgagcaggacgaggaggaggtgctgagcacctaccgcttcccgtgccgcgtcaaccgcaccggtgagccgcgggtcccgagtgggccacgacctgggccggccgtgccctggggcgcagcgcccacagccgtgtagcgcgaagctagggctctgctgccctggggctcggtctccgcatcagtagagtgggccggctgggtatgcccaccagcctgcctcctccccacccaccactgcgccttggcggtccgcgttgcccacaccggggtcagagttttgtctcttggggttctctcccacttcctgggtccacattagagcagaaggttggatgtggctgccagggccggctgggcctgggacctcccggtcacagccggtggacttggcacctttcctgcgctctttgatctccgagttctgtctgtcccctcctctgtgcaccatacactcctgggggagtcctttttcaagtgtcaagatccgtctcagctttacgtgggtccccactcccacagggtgtgcctttgaaccagaactcaaaaaggcatgatggaatggtctttaatggtggaatttcaggcatggccaatgggagaagtattttctttgcttctggggatagagggggcttctctgtgccattgaaaaggcaggctgcatttgcgggccggcatctgtgtctgtggggggtgttggggagctctgggagcccaggagtcatgagggaatgtgctcccctggctgtggcagaatggctctcttctcttccctgatgtgttgggacaggcccctgtgtgtgtcactggctcaaaaatctggggaacgtgggcctggagcatggtgggggcagaagcaaccaggcacctggggaggccttcccctagaccctgggtacatccccccactactctgtagggcgcctgatggacatcttgcgctgccgtggcaagaggggctatgaggccttcctggaagccctggagttctactaccccgaacacttcacgctgctcacgggccagga

SEQ ID NO: 40982 - DNA, 1011 bp, Artificial sequence
  DNA replication origin
cgcctcgggctcccgggtccgcactcgggcggcggctccgccggcgcaggggggcggtgcccgtggcgcccccggctccgcccccgtccccgcagcctcctgggctgcccgggcctccccacattgccgcccgccccgggtcgtgcgtccggcccccggccaccccgcgcgtccgtctgcacgccctccctcccggccgtccggctgcgcctccccctgcttcctgtttcccgccggctctccagcccggctcggcggggtcctggccgcccgcccacacctgcccggcctctgggcggggcgggggcgggcaggcgcgctcacaccccccgcgcgccgcgacacaccttccccgggccacgcgcatcgcctccccacgcccacagcgcgcccgcccgtgcggggctagccgctcacgcccggcgcagcccgcgggcactcaagctgggcttgcccttctcgggtccccacatgcactgcgggcgcgggagcttccctggagcgcaggacagccccgcgggggacagcaatgggcagaggtcatgggggctttctgcaagatgggggtctgaacctgcagggcagcactgccaactcccctcttacgcaaactcccgtggcacttgaggaccagggaccccacaattctcaaagggtattcctccaggtgttggtcccagagatgctgggggcgggctgtgactagccatccatactcccgctcctgcctgggaggccggtggtgtcttaccatgatactggccgagtctacacggtatctgctggtgcatgcgatacagtctcgctatgcattagaagctgccaggtacctgctgccagggaggaacagaggaggcacaaccggtacaggaaagaggtgtgagctccctaatcgccttccacaacttctgaattagatgccgtggacatatgtattacttatccaaagaattaaggtttcaatcaataaaggctctgaaaagccctgcttaaattaaggccgggggcggt

SEQ ID NO: 40983 - DNA, 971 bp, Artificial sequence
  DNA replication origin
cctccttctgccacttctgaatggttcttctcccatctgggccttggttttcccatccgtgagctggacacaggaatggtggctttttcctggtgttgttatgagaatccaaagggttaacacatgtaaagagcttacgacagcacctggtgtatggtcagccttgtgatgttttagctgatgccactgctgaatggtgggtactgtgggaggggctgcccaagacatgggttggagcatgcctggcagacagggagaggacatgccaggggaaggccactgcctgtgcaaatgcccagaggtgtgtagcacatggatgtgttggacagtggtggggtgagaggtgggaaggagcatttgaagatactatcattccctttggatattctcctcagggcagcagggagccatggaaggctcttgagcagaggagtgacatggtagagctgaacgccagggctacagagtggtgatggactggaggggccagaccagggcagagggaccagttaggagtaggcacaagaagcctggtgggagatggggttcctgaacgagggcattagttctggggatggagaggccaggagaggactagtggagggggtggggcatgtagctgagctgctggtgatgaaacaaggagcgaggaacacagtgggctgagggagatggaggagtgtgagtgtcctggaagccattgattcagaagatactaatatacttagcaggggatgttgaaggaggactttgaaatgtctgtagtagtcgtccaggggatcagcaagggaagggcatcccagacagagagctgccaaagcaagagtgcagaggtgtcaaatagcctgtgtgtttggagagcagtgggtgtggtggagtttgggttttggggggaagtagggggccaggagtttggggccttgggcacaatcctgtaggctattaggagtgggagtcagtgaaccgagtgg

SEQ ID NO: 40984 - DNA, 984 bp, Artificial sequence
  DNA replication origin
tgggaggccaaggcgggtggatcacctgaggtcaggagttagagaccagcctggcccacatggcgaaatcccatctctactaaaaatacaaaaaaaaaaaatagctgggcatggtggtggatgcctgtaatctcagctactcaggaggctgaggcaagagaattgcctgaacccaggaggcagaggttgcagtgagccgagatcacgccattgcactccaacctgggtgacagagcaagactctgtctcaaaaaaaaaaaaaaaaaaaaaaagcagtcttcaagggtattttgcctccaggtaacctgctgatgaggtgagtgaagtgcatgtgtgtgagaaagatggggacgtgctcagacacccatactggtcagcagagaccaggcgtgagtcagtgtaagggcattacaggatggaagtggaaggagtagatggacaggtgggtgagtagatggccacgggtgtgggcagtggatcaaacaatgctgggtagagtgggtgggtgggtgtacaggtaggtaaatggatgatggggtggaaggatgcatgggtgtgtaggcggctggatgggtgcataagtggatggatggatgaatgggggataggcaatgggtcaatggaagggtgggtaagtaagtggttgagtgattggatgtatgtgagtagcagatcaagacatggacaggaagtaggtgggtaaatgggtgcatggaagggagggcagatggatggacaggggagtgggcagtgggtagatggatgaattagcgatcgcatcgacagatggatggaccagtggacactcaagagctggagaacgggaaagaccaatcagtggtcaatgagcagatgcattaactgaccaaaagcccagccagactttggggtacaaaggggacatgcaccctagggaggggctgatagttgtggcctcagttgaaggctcccatcccaaacctccctggaacctggaagcagcca

SEQ ID NO: 40985 - DNA, 1105 bp, Artificial sequence
  DNA replication origin
tcccagcctttgctgtgctgtcccttgccagctgtgcactgtgcatttccactgcccttccctctgcctacacgtcctttaagacttaactcacaaccatgcagtggctcacacccataatcctagcacttgaggaggccaaggcaggcggatcacctgaggtaaggagttcaagaccagcctggccaacatggtgaagccccctctctactaaaaaatacaaaaattagccgggcgtgggtgggtgcctgtaatcccagctagtccggaggcttaggagggagaatcgcttgaacccgggaggtggaagctgcagtgagctgagatcatgccatggcactccagcctgagcaacagagagagactccgtctcaaaaaaaaaaaaaaaaaaaaaaaaaaaaaaaaaaaaaaaaaaaagagagagagagagacttaactcaggtatcatctcctctaggaagatttcctgagcccccaggccctgcaggaagtattagggacctctctgtgccctgacagcccgaggactctatagtcagatgggagtagtcaaaggagggcacaacaacgggaggcaggggccagagatctatctcccctccttgaggatggcacagggtcccgggtatggctgattccctgccctccatggaggtgggcggggtggggggagggtctgtaaagtctctgagatgcgacttcatttacctgccgagcaagcctcctaggtgctcttggagcaggaaacacttcacacaacatctgatgctgctattatctatcccactttcagatcaggaaactgaggcagagaaaggtaagtagtgactgaggcaggacaggagcccaggctgtccggctccagggtcccggtcttgacggccactctaccccactctaccagtcgccccagtatggctgtcttcctcctgggcaccgcggggcctgtaccggatggaagggaatgagaatggggagcaaaggagtgggcatgtcatgcctgtaaacatcaaggtttaaaggcccaggcattcaaggcctcagatcgagcttcccggttccccgaactcccgcagggcgcggctggagggcccaggagggagga

SEQ ID NO: 40986 - DNA, 1689 bp, Artificial sequence
  DNA replication origin
cccaatagtacccacccctcacactaccctgcctactgcggtcgagagactctgcagcgctgtggagctgagggcagggtattgggacccggtcttcccatgtggaaaacggaacagcacaccaggcagttcccctcccaggggagttgcaagggtagaaaatgtaatgaaaccctcagatactggagcagggcagccatgggttcaaatctgacacctttacactaacatctctcattccagggaccccggtggcagccacgtggcacttgctgccaaccacagggcactgctggccatcaggtgtgcctcacctggcactggagtaagcagggctccaagtgtcctggtgccaggctcacctcccctcacctgctcaggaacaccgcccgttagtgttcagaacacccctttcacagatggaaaaaacgaagctcagaaaggagacatttaccctcagtcacagaccaacattgctggtaaatgccccagggtgggggtgaagacgatggggaatggggaagacgatttggagggcttggatgcccagtgctgagcccggtgtggggtgcaggtgcaggcctgggaagacaggagacccagctctgcagattcactgcctgtgacctgggcaaggaggtcaccacacagcctcagtgtccttggagtccttatatttaccctatagaggatagtcagggcctgggcacatggcctgagctcactcaatggtgggaatgacgcaagaacaagttttggagccgggatcgggccaacaggggtcgctgtggaggcacatgtggtcgcggggaggccaagggcgggtctgaaggagagcgggggcggctgcaccctggcattcacctgggggtcacccgcaggccgcagtgctggccaggggcccacgtctcatcctggaggccactgctcgggtgcacacagcccacttcctgcgggcatccagctgggtgacgcccccccccaccgctggacagcgggtccctgtcatggttacggcagctcccccaaacctgctctggtccctggaataaggggttaaaccggtcggctgacttctcctgctcctcaaagtccagacgcttcaaggtggagagacggggaaactgaggccagaacggggtagctagttgttcgcagtcgcgctaggggacccggtcctccgtattccaaggggggcaccgtgggccattagggagcgacggggaaagtggaaaggagacgcgcttcgtgcccaccgccccgagttagagccgaaccagcccgggaccgagcgagacggagcggctgcgggccgcgtctcgggtccccgcgccacgtttagtgccgctgcggcctcccggccagtcccccctactctctaagcctcagtttcccggtctaggaaaagggcttcgaatgttgcgggtctggcactgctggggcaaaggcagaacaatctggagggcggccgggattggaagtccgggaaagacttcggccatccaacattccctggggggacggggctcaggacgcggagggtcgctccgcgggggaaggggacgaccggctgtcttggccggaggggaaccggacgggatgacctcatccgcggctccagcctggaatgcggcggtcggggaggggggcagggtgcctgtccatctccccgggccccccaccccccac

SEQ ID NO: 40987 - DNA, 647 bp, Artificial sequence
  DNA replication origin
ctcctgccgcgcatccatctctgggtagtggtggccgccatcccagcctgctccccagtgcctgccgagggcagggccagcaggtcctcggggaccccctcccactgggctggacttcacctcagccactgggcccaacccagctgttaccccattgggacagtgtccatggggtgtggagcttgcggcaggggctgggggatttgcagcaggacccgtgggggttgcggcaggtgctgaggggtttgcagcaggcgctggggggtttgcagtagtggctggggggtttgcagcaggacccgtggggtttgcagtaggggctggggggtttgcagcgggggctggagtctcagctgcaggggcttctgggaggctcatgacccctagcagctcgctgaggagtgagggcccaaggtcgaggtccaggcggaaggacaagagagagtcagagcggcgaagcccgggctcagaggggaaggaaccatcccggtctcggtcatgcggcttttccgagcggggcaggcgggagatggtgcagaacccagagtccaggcctagaagagaaatgggcagtgggctcagagctggggtccctcaccaggaattcaggaggggagacaggaccagtcctggcttgctgtgtggcc

SEQ ID NO: 40988 - DNA, 1268 bp, Artificial sequence
  DNA replication origin
ctgtaatcccagcactttgggaggccaaggtgggcagatcacgaggtcaggagatcgagaccatcctggctaatacggtgaaacctcgtctctactaaaaataccaaaaaattagccgggcatggtggcgggtgcctgtagttccagctactcgggaggctgaggcagcagaatggtgtgaacccaggagattgcattgagcggagatcgttgccactgcactccagcctgggtgacagagtgagactctgtctcaaaaaaaaaaaaaaaagaaaattagaaacctagacttttttttttttttgcaaagcaaatctctctttttacaggcaaggaagctgggctaagtgagggaggctgggagagctgtcaagcggctgcattgcggtttgtgtgggggcagagctggggctgcttcccctctcgggctctgggagcgctgaggagggggaggctgggctggagggaggccaggaggatgctccgggctgggtggggtggagctggctgaggagtcttctgcctgtttgtgctgggtactgggagatgcaggcggggagacacaaggtagaaggggcaaagtcctcacctaggaccttgagggagttaatgtgtaatattctaggatataagcttgaccacgagttgagaccctgagcacaggcctccaggagccgctgggagctgccgccaggagctgtcaccatgacggtgaggacactagccccctgctgcctgccccactctgttcatctttgtctttgcctgggtgggggcttttagggaaaaccattgctgtccctctctgggcctcagtttccccatctgtgcagcaaagaagttggacagaggtctttttttaaaaaacagcatcttgggccaggcgtggtggctcctgcttgtaatcccagcactttgggaggccgaggctggtggatcatctgaggttgggagtttgagaccagcctgaccaacatggagaaaccccgtctctactaaaaaaatacaaaattggctaggcctggtggcacatgcctgtaatcccagctaatggggaggctgaggcaggagaatcacttggacctgggaggcagaggttatggtgagccgagattgtgccattgcactccagcctgggcaacaagagtgagactccatctcaaaacaacaacaacaatacagcatcttgctctgtcaccaggtggagtgcagtggtggcaatcataactcactacggacttgacctccttggcttaaatgatcctccc

SEQ ID NO: 40989 - DNA, 1055 bp, Artificial sequence
  DNA replication origin
ggaaggaaaggagaaaatcccagccccagtgtgtcagggcccagccaaacccaggtatctctaacttctgcctggttttagactctctggactctcagaaaacccccactgtttctaaacctgagaatgttttgtatgacccacagctcaagacctgtgtctgagatcagttagccaggggcccacccatccccccagcccagttgctgctgagacccaggcggacacttccggcgttcacaacggtcaagggctgctgagtgccccttttccaccccctgcccctctggtggctaggatgactctgaaacatccctagaggtttggttctggggccaacctcatggttcaactctgctcaagcctggcttaaaaggggccggccatgaccccaaaccacgctagacagttgccggtgtgcccgggtccaagagggttccctgaggccctggcaacgacggggtcccaacagcagttaaagccttgggagagaaccctcactagaccagggagaagccagccacggctttcagaggcagagtccaggagcggggctgtgagagcaggggatcatcagggctgtgggttaaggagctcaggtggagggtttgcgggctaggaagcctaagcaataggaagctacgtctgaggagaaacaagaaaaaaaggggtgtagaagcctttgaaggaagttcagcaagagctgggaaaggcatcttggagactgaggggttaggctgaagggagtgacagggagcttggaattattaatacttctggagtctaagactctcccaagcctgtagggtgcgggggtttctcactatgtggctagagactaggagcggcgggaggaatcaaatggggcagtgggtcctcccttccaggacggggtaatgagcaaatgtgactacttgcgggctccaggaacgccatgcagggccagagagtggaggattcggggcctgaaaatagtagggtccctccctcccgggtgtgagatgcaaccccggggaaccgctcgcgtgctccttccccgggccgctactccgtga

SEQ ID NO: 40990 - DNA, 1592 bp, Artificial sequence
  DNA replication origin
caggctgacacgtgggcagagatcaaggaaaagaacctggtatgtggccctggcagaagccgtcaggctcaggtctggaactgcctgggctgtgggatgcactcttagcttccattcaccctcattagggaggaaggtctgggggcagatggccctccgtctcccctggctctgccactgttctgctctgtgatctgggcaagtcattttcctcccttagccccagttgtgaaaaggggatgggtctgcctcctgtgcagctgcgggtagtaaataagatgcctgttaagggggctggcccacagggcctctcaacaggggggcggcccctgctctgtgtcctcagagaggagaaacccaaggtcggtgctggagaagggggccccctggtggtggctccttccaactgcagatacttagcagggcctgggggaggtgggggcaggaggtggagggagagggggggacctgacctcagcacctgccctgggctcacctaaggcctcatcattgtcctctgtgtcactcgccagtcggaagagcgtgggccgcatccgctcacagcgctggtacagttcctgagggcagcaggatgggcgggtcagggtccgcgtgggctgtggagtgggcagggagtggggtaggcagggaggcaggtgcaccttcatgaggtcctcgctgctgccagctgctgcgccgccctggctgtggctcatcaccatctccgtgagcagtttcacattgttgttcacctcctcgatggcattcaccctcttcgagatcttctccatccgcttctggtcctggggacacattggccaagggcccctgagaacctttggcctggacgaggcactgccccctgccacttgagagaatgtgtgctgggatctgggttgacagctgggtgactgtgggatcacactctgggtggggctccagcaggccctgccaggagcccctcatgcctaggaagggcacgctggtccaagaagcccccagtgcccaggcctctgcacaagctcatcaggatcttcagagatggcccaggaacctgggtttccaaacccctcaccaggtgcttctgaaggcccagggccctagacctccactgtggttctcagtgactcttgccctccttgtgtttgccctttcaaaggaggttcctgtacttcatagtgcaaggggacctctgtggtcaccaggtacagcctggaaacgagcaggaagacccttccagtgtctgtcggtgcctggcagatgggggagcccgtgccttcaaaggctgcttttgggagcagcccggctttcccctgcccctccgcttactgtgcgtgcccctcctttgcagagtgaaaagtggcctcacacagtcctcccaccttggcctccaaagtgctgggattacaggcatgagccaccacatccagctttgaaacttttttttcagcactttgggaggccgagatgggagggtcattgagcccaggagttacagactagtttgggcaacaaagggagatgctgtctctacaaaaaataaaattagccgggcgctgtagcgtgtgcctttggtcccagctacttgggag

SEQ ID NO: 40991 - DNA, 1124 bp, Artificial sequence
  DNA replication origin
gcagccttcctgttgggaaaagggagatgggggagggaaccttgcctgacatctcatcctggcctgagctttgatcttggagcctcccaacttcccaccaggattccacactcaggtgggctcccatctgggaggctctggccatagcaggcagctgttgggttcccttctcagctcctcccacccccaatgagtcctgcctcattagggaggagagaagcagccagtgagtgtgccaggccctgggctaggtgctgggagtatggagatgtgtggggccaaggtcctgcctctgagaggcgcccagtctgcaccggcacacagtctgcaccggcacacagtagtggctcaaatagtctcaaactaaactgaaactaacaaagcaaagtgcagagggtgtggcaggactctggggcacaccctcccctcttccccacgcctgcggctcctgatgccacaggggtgcagggtaaggagagcctactgtttcctaaaggcgctcacatcttgtaaaaccagcagttatggagcacttactgtatgcctaactctgtgttgagtggagggccaaagaggagaactactgagtttgggggcagtcagagcagcacctacatcattgccctacaagaaggaagggggactgaggctgtttgccaggaggaatgagaggagacgggcttcacagatggagcaaactgccaggagatgtggagaacagggtgtcgcgaaccgctctgggagggttcctggtggctgaggggtggcacgcacctcccttaaagggagctggcaggggtgtcttgtccactctgcagaatgggcaggcccaggacagctggcccatcagaccattagaaacagcgagtccggagttccaggggcttgtccacggccacacagcagcccgtggccccaggaagccaaagctcccagccagtcatccagtggtggggggtttagttccagggggccagaggtcctctgcggaagagagtgcaaggcagtatccgcggcaggcccagagaggccaggacaggtcagaaaggcctacccctctttcgcttggtaccctttcctctttgcgagggatgcaaaggttatttatacttcgggtctgcagg

SEQ ID NO: 40992 - DNA, 1677 bp, Artificial sequence
  DNA replication origin
ggcaccccgcctggggcgggttgcgggcgcaggggcaggaatgggcttacctgcttcccgccaccggggctgggcggggcgctgcggggaggaggagccgggcacaacctgtggacggccgcggccggcggacacacagcagcgggggcccggccgggggtcgcccgggggcccggaagccggggaagagcgaggaaaccaacttggagagaggagtgacctgggggccgggggcggagtcgtgagcgggggaggagagagccggccgccagcaagagccgcgcggcggcccaggaagcgagagcgccgcccacccatccggggcaagagccgcgccgcaggagaggcaggctggaccgggggctccccgggcccgcgacccccgccgtgaccccgcagcccccagctcgcccccaagatgatgaagaggcagctgcaccgcatgcggcagctggcccagacgggcagcttgggacggtgagtgtcacccgcttccagccccactcttaccccggcaggacttgaggggtcgtaaaagggtcgggggagacgggggtgggggaggctggggacagctgggcagccaccctctgagcggccagactcctgctctctcttcctcctctctgaacgccgcccccgtctctcgggcagagctggaggagcaagggtggcctttgggggaagggatgcccccccttaccggattggagggggcttcaggcgggagaatgctctctgccctaggacgctgggacttctctgcctccacgagtctctaagtggatggtcctcctgacctcacttgtcccctctggacaatgggacagttcaccacctctgcttgctgggccggggagggaggagggtcgattagggccacagacctggggcgaggggaggagatgggtcctggcctggtgggaggaggggcctgcccctggcctgcagcgtccctccccctccccctccccccagcccaggggcctcctgcttctgtctcgtttctgcttttcctggactcaggtggaaatatccccaggtctcccagctcccacccccagcctctgagccggtggcacggaggccggaagtttggggagcctctcagagcctgtcttctctgctcctcttcccccagcctcaggagttccccattctctgggtccagggaggggactgggtgtccagagacctggttctagtctcacactggcacagatgcctacatagcctggacagtcagaccaccttgcagtgggccttggcatcccccatgtgtccccaggtgggggccaagggcctgtgcacccctgcccacagctgtagtccagagtgctgtgtgactgtgcctaggagtctgagctcctgcacttcccgttcttggggccagctaatactcctcatcccggggtgggctgaggatttgggagtgggcagaaaagaggcttctgtgtcccaaagctgggccccgggtgggtctctcagcctcccctttagtttcatctgtccgccctctctcaggacacagccctgggtggaggaggaaaaacccatgtatcctattcccacccccatggaatgtgctccgactgggatgaagcaactgggccacccagggcaggcctcagctgggagggacagtggaagcactggggtccaggtgccctgctgcgg

SEQ ID NO: 40993 - DNA, 1528 bp, Artificial sequence
  DNA replication origin
ccctcgccgcccagcacgaacacggcgcccggcgcgtccggaggcccgggcaggcgctggcgcagcaggcgcgcggcgcacagcgcggagctgaagagctgctcggcgcgcagccccccgaagccgaggcgcgcgaagcgcagggccagctcgggccgcgcgcgccggctgttgttgctcacaaacagagccgccttgccggcccgcgccagccgctccagcagctccggggcgcccggcacggcgcgctcgccgttccacagcaccccgtcacagtcgaacaggaccccctgcgcccggcccagcacgtcgcgcagggccgctccgcgcagcctctcgcagcgcgccatgcagccggccggccgccggcctcccgcgccgcgctctctccgcgggcacggcgcgctctccctggcacgttccacgcagccgccaattggcgcgctggaaggaccggggggcggggcgacggcgtggcctgcagccaatgggggcgagagtctgggagaggagcgaagccgcgagctaacggaacttggagagaggggcggattcgtggccaacaccgaggggaagggaccaatgaagagctagcttgatccttctccccgtccctggttctgctggaccagtcgccgccgagtttcaacgccgactacactcttacgcggtgggagactgacgctcttcttaaccaataagaatctacaaacaaaacgcgaagcgaaaggccccgtgccctccagccaatcagaagcttaggcgagctggttgctgggagaaaaacagatgttaaatgaactgcctttgggtcgaatctcattgccccctgaatcgtggacgctccagttcagagcgaagtcccaagaaacgtgtgtgtacgatggggtacgaggcacatggtgtcttcttgggtgctggagccctcggtctagaccagtagttcttcacactgcgttagagtcccctgggaacttattttcagatatcatttacatatagtaaaatgcatagatcttaaatgtacagttcaatgtcttgacaaatgcttttgaaatcaccgatgtgtagcaggacagatcctcatgtaagtgttttgggtgaagactgggcattttttggtttgttggttagttggtttaattccagggattctaccgtgagctaggatagggtagggaagcactgggctagaggctggtaggctgtcactgcagcacgccccgggagggcaggatccagaatggtcgtggccaattgcccagaatagtaatggggtgacccaggttggctgggtccctgtcttagggaggaggccttgtgatctggaagcaaccacaggtcttgggacctttgaggagccactggtctgcagtgtggggatgaatgaattgtgagctgtggtgtcacagttttgaagttgtctgccaacttcagataaggctgtgacccccaggagcaactggagctccaacgacttgggaaaaactgtaccttgtacccaaccttggaagctcaactagctcct

SEQ ID NO: 40994 - DNA, 2073 bp, Artificial sequence
  DNA replication origin
ggtcctgttcgactgtgacggggtgctgtggaacggcgagcgcgccgtgccgggcgccccggagctgctggagcggctggcgcgggccggcaaggcggctctgtttgtgagcaacaacagccggcgcgcgcggcccgagctggccctgcgcttcgcgcgcctcggcttcggggggctgcgcgccgagcagctcttcagctccgcgctgtgcgccgcgcgcctgctgcgccagcgcctgcccgggcctccggacgcgccgggcgccgtgttcgtgctgggcggcgaggggctgcgcgccgagctgcgcgccgcggggctgcgcctggccggggacccgagcgcgggggacggcgcggccccgcgcgtgcgcgccgtgcttgtgggctacgacgagcacttctccttcgccaagctgagggaggcgtgcgcgcacctgcgcgaccccgagtgcctactcgtggccaccgaccgtgacccatggcacccgctgagcgacggcagccggacccctggtgagcgcgggaatggcggggaaactgagatgggggcgacctgcgcattcgcctccacgcctaagggtgaggggcggggaagaggcgtctccaggtggcaggtggggaacaggagagtgcgagggaggcccagggtgctttggtgtggggggcggttgatccctgtagccgtcatcctgtgaggcgcagcagtgtggtccctgttggacagatgaggaaactgaggccctttgtaacttagggagttgggcggaattctgccctacccaccatcggggtggggttggagaggaagcctgggaggattgtccccctgtgtgagggttgaaacaccattcccagaggcagggtgtaggcaggtgtgtggggagcaaaggcggtggagtttgacctcagttccaggtccagctccagcttcacagctgtgtaatcgtgttcagttacataacctccaagcatctctgcctgggtgagaaatggcagtgctcagcatgcccggtgacggtgatcagggtgagtgcctggcacatagtaggtgttcagatgatgtaagttgtagccagagtcccccatgttacagagaacttaatgaaacagctttgtgtgtgttcttctttggtttccaaattactctggagatggaagttattgtcccatttctcaagtaaagagactgaggcagccggatgcagtggcaacagcctgtagtcccagctactcgagaggctgaggcgggaggattgcttgagcctaggaggtcaaggctgtagcgtgctatcattgcatctgtgaaaagccactgtacttcagcatgggcaacatagtgagaccttatctctaaaagaagaggaaagaaactgagactaagagaagggaagtgagctgcccaagaacagatatagtgagcccctccacctcctgtgtccccacacacctgcctccatcctgcctctgggaattggtgtttcagccctcacaagtagggacagtcctcgcaggcttcccctccaaccctccaaccgcaccccaatgatgggtggggcagaattctgccagcaactctctggcagagtgatagagcgcgggaacctgaatttggcctttgtgacaccgacctccagggcagtcttcactgctgtcatcttgcgagttcagccctgcaggggaggcagaagcaaaaggaggctcctccattgtggagggtttgcgttagacaagagcaggtggcagcagaggctaattggcagtggtcagtgtgtgtggacaggttaatagcccagtcagtatactggggccgtggacagatctctgtcactccgtctctgttggccactgacccggacagtcattgatattaaatcctgggggtacaggatggtattgagtggagagaagtagacacaggattatggtggggtggtgagcagggcctagtgccaggggcacctaggaagacttcctggaggaggcatgatgcagggcagtgataatacaccaggagatgtaaacccagtgttatggcatggcagagagggattctgtagtccttggcctctcctgg

SEQ ID NO: 40995 - DNA, 913 bp, Artificial sequence
  DNA replication origin
ctattgcactccagcctgggcaataagagtgaaactcagtctcaattaaaaaaaataaaaaataaaaataaaaataaaaagaagtagatgatgatggctgtaagggaagccatgagaaagtgctatggtgggctggcggctgcatgagtaaaggaggtgggtcgtgaagggtaggcggagaagtgcctggctttccaccatgggcagaagctccagaatgagaaggccagggctggagaacagtgttccgggcatgtgggggaaaaacggggatgaggctgggaagccaacaggacctggaccatggagggcctcatgggctgggcacagggcttggacattgttgtatgggaggaggctggggagccagggctagagggagggtgagtactgaggccagatttgggctctagggaagatcactgtggcagagaattgagggtgggtgggaggggtgctcaccttacactcaggaacctggtggaggaaggggcgtggggagcactgggcaaaatgaggggcatgctggggggttgtcacggggacctccttctccacctggccgtcccccttctgaaactgctggcaccaaagagggacgaagatgcggaccaggagtgactcacatctggaagccaggccaacacacccaccctgcctctcaggggcaccttcctccagatgcccaaagcccactctggtacaggatgagaggggagtgtgtagggccgcaaggcggacccagagaggggatggggttgcacccctgtgagtgccttacccctccttccagaccaagtggctgcttggaaaccaaccacagcagcttcactttttcctccgggcctccccaaaacctcaaccataggaagggctggatggggcccagcctagttccactgcccctccccca

SEQ ID NO: 40996 - DNA, 1335 bp, Artificial sequence
  DNA replication origin
atggagaggatcaggctggggaggggccgacacttggcccaccgtcacactgaatggaggggccggcccctctgctggagaggaagtggctaggggcgggcgaccccactattctccttcaagcccctctctgcaaagaggcccaggggctagagaggagaccctgaaaaacacggcctctctgcattagggagaatagccctgcagtcgggctgtggctgggctggctcagggttaacaagattgagcaaactgctgggcactgctgttccctggcaccccgagtgggtgggcaagagttaactggtttgagtggtttcttctgccagaaacttgaaccctttccctggggcccgaggaagattctcacctccctgccaccccaacctcccagcttgggggtggtggaagggaatttcccccgccccccccgccaccagcctggacacaaccaccctccacccccgacctagaagggcccatcctgggcagcttgtctcgggtcctggcaacttttcagcgttctctggagcagagggtaactctgccctggcctggtgaccgggacagctgcaggggggaggggacaggaggctctttggggtggaggagggggaaagggatagtggcctgggtgtcccccagttggccacacccttcccacgctcacttctcagagagctgcagaatgtcaaccctgggcagaaataactgtgctttcagaccctggaggaatccagacaattatcaatgcagagaaggccttgagggaccatggcgcccacccccattttacagatgtggccactgaggtccagaaaagagaaggcactggttccaggccacacagctggggctagaatctgctcccgatctgcccagctctcctctggccatcagttcctgccctatcccctggaccttgggggggggtccccacactcacacaagccatgattgagtccaggaggatgttcccgggcaggcgcaccagctgtcagaagactccacccgagagagatgggcccccggacgctcccacccttttaactggaccggaccgggtgagccccgccccctgaaagttcagccaattgcaagtcaggatagggctgggggccactgggggcggagtccgtggaattttgaagccagttttggagcagaggtgaccaatcagagtggcgagctgctgccccccctcaccccgccgcccccggccagagtccaagctccacctcctattctccttcatccctctccacctccccaccaaaattgtgctgtggcagagattgggggaagccagtggaaaatagtttgatgatgagctag

SEQ ID NO: 40997 - DNA, 897 bp, Artificial sequence
  DNA replication origin
tccaccccatgaagcccttcctgggccctgggactctacccacctcttgggccctggcctgaggcctgggtccaccacagactggcagccggaggttgaggcgctgagtgggtcctcaggggcaggtggacatcgaggcaggtcgcagtagggcacctcagcacctgaagggctcctgagctcctgggccagggttggagagaggagacagctcagcgcccacgtgggggctcccctccccctgcacagcccctcccggtggcgtgggagtctccaggcatctcctcgggggatcctgcacttctcaaggagctgcccatcaggctagaagcaccccttgggactcaagccgagggctggctgaggtacctggtgtgtgcctgcacacgtgagtgtacacatatgggccttggagcaggtatgtgtgtggataaaggcctggtattgggggcacatgtgtgcacataggtggagcgagctcttgcgcatgcgtgtctacgcaggtcccgcgggtacaccgatctgtacgtttgcatgagtgcaacttcatgtatacatgcatgtatgtgcgtgcgccccagaacgaggtggatagaaggatccaccagggtcttttgcggccaaaagacaagggcgaggaggaaggattaggctggctgagagaagggagaggtctgagggaggaagaggcagtttgatggtagaggagatgggaaagcaaggtcttggaggacagaagagatttgccccactaaaggagaggcaggggatccagggctggagggtcaaggccccaggaaaagggcgggggctagagccagctgcccactcctctctccctccacctttggcaaggccacacctgtgaaggctggtctggtgctgggctcaccaggg

SEQ ID NO: 40998 - DNA, 1064 bp, Artificial sequence
  DNA replication origin
cgcccacactcctcagcccttgggtggttgatgggactgggcgctgtggagcaggggcggcgctcatcggggaggctcgggctgcacaggagcccacggaggcggggggaagctcaggcatggcgggctgcaggtcccgagccctgcccggtgggaaggcagctaaggcccggcgagaaatccagcgcagcgctggtgggcgggcactgctgggggacccagcacaccctccccagccgctggcccaggtgctaagcccctcattgcccggggccggcagggccagccggccgctccgagtgcggggcccaccaagcccacgcccacccggaactccagctggcccacaagcgccgcgcgcagcctcggttcccgctcgcgcctctccctccacacctccgtgcaagctgagggagccagctccggcctcggccagcccaggaaggggctcccacagtgcagcggtggcctgaagggctcctcaagtgccgccaaagtgggagcccaggcagaggaggcgccgagagtgagcgagggctgtgagggccgccagcatgctgtcacctctcagtatcacccctcagattctgcatcgattactgagagaaaggcacccttaggctggggagagcgggaagataccactttcaccaagaggctgctcagcatccccagagtggggcaaaccaacataatatgccccctgatatgatgcatggggtcaggggaggggatgctggggtgggcacagaatcccttcccttctaaatcgtcctgctgaaaatgcattgcctacacctaaccccagtgaaacatcagacaaacccgaattgaaagacattctgcaaaatgactgggctcctcataggacaaaaagcggctaggggactcttcttgattaaaagagactaacaggatgaggacgtggaatgccatgtgtgagcccattgggatctgggacaggaggacacagagctgtgacaggcattactgggacaactggggcttgtttttttttttttttttttttgagatggagtcttgctctgttccccaggctggag

SEQ ID NO: 40999 - DNA, 3376 bp, Artificial sequence
  DNA replication origin
atatgcagaaacagagaaatggagcgatttgcccaaggtcacacagccggtaaatggcaagccagggggatttgaacactttcttttggcaccctaacccttcacctgtcctgctgccgagcctcctccccagcccacctggctgaccccacccccgggctcacctgcgctcttgcccgaagaggcgctccacctctgcacggccagggctgtgggtgcggcccccgctgctgcactgcgcctggggccctggctgtctctgggccagcctcctgggtgggggcaggtcggccagcacagtgtactcctcccgctccaagttgtgcctggtctccccgggaggcgctgagccccgggagcccccagagctgcccggtgaaggtgagggtgccaggaacgctaggtcactgggtgggtggcggggtggggaggaggctcggggtgcatcccggtgcccgatgcacacttgggggatcagcactggggagccatgcagagagtcagtggagggggccaggctctccatactagttccagggggatcctggaagaagagggatggctcaggagcctggcgtggtggggatgagaaggagggtgcatcccggtgcccaatgcacacaggggtggggatgtgggggcactcgtgcagagagtccatggaagggacaaggctctctgtgctggccctggggaggtcctggaataagagggaaggctctggggcctggcgtggtggggaggaggcccggggtgcatctcggtacccaatacacacaggtgcagggagctgaaggggctcgtgttggggggactgacactgatgctcggcatctgatgtgtctgggaggaaggggaaggggtcaaattgggtgtggcgggggggcgaggacgcccggggggcatctcggtgtccaatgcacacagcaggtggtatatagggaggctcgtggtggggcggttcactctcaggggcgcggggctctgggaagaaggggaaggggtcgtgctgcaaatagcgagggggcgaagaggctcgaggggcatcccggtgcccaatgcacacagcacatggaggctgggagggctcaggagaggtcaggggagccccataggcagcggggtacacaggtgaggaagttcgggaggtgctctggtggcctgggttatgggaggaagaggtggcccgggatggcaagttgtactgggtggggccaaaggaggactggggtgggtcatgctgggctggcctgctgggagaggatgtctgaggcctgtcaccttgggttggccggagggcgatggatgcccagggaacctcgctttgcttggagcgagatggggaagaggttcggggaccatcactctgagttggccggaggggaaacgaggcccaggggatgtctttgttagtacgatggggagatgaattcctgggattgttccattgagtggagcggtggggagatgatggtctcagattctccttttgggtgcagcattgagatgaggaggttccagggttgtctcgttgaaaggaaaaggactgtgtgcggtcccgctgtgtacaagtgggtctgaggttatctcgtttggtacaagaggttttagggttgtcttgttgggtagaagatgatctggggatgttctgttgaatacaagttctggggttgtcctgttgggtggctctgatgggagaggaggctctgagattgtcccgctgggcacaggatgttctggggttgtctcgtgtggctctattgggagaggaggtcctgggattgtcctgtcgggtacaggatgttctgaggttctcttgttggatggttctgttaggagaggaggctctgggattgtcccgctgggcacaggatgttctggggttgtctcgctggatggttctgttgcgagaggaggctctgggattgtcccgtcgggcacaggatgttctggggttctcttgttgggtggttctgttaggagaggaggctctgggatcgtcccgttgggcacaggatgttctggggttctcttgttggatggttctgctgggagaggaggctctgggattgtcccgtagggcacaggatgttctggggttctcttgttggatggttctgttaggagaggaggctctgggatcgtcccgtcgggcacaggatgttctggggctgtcttgttgggtggttctgttgggagaggaggctctgggattgtcccgctgggcacaggatgttctggggttatctcgtgtggctctattgggagaggaggttctggaggctctgggattgtcccgctgggcacaggatgttgtggggttgtctcgtgtagctctattgggagaggaggctctgggattgtcccgctgggcacaggatgttctggggttgtctcgtgtggctctattgggagaggaggttctggaggctctgggattgtcccgctgggcacaggatgttgtggggttgtctcgtgcagctctattgggagaggaggctctgggattgtcccgctgggcgcaggatgttctggggttgtctcgtgtggctctattgggagaggaggttctggaggctctgggattgtcccgctgggcacaggatgttgtggggttgtctcgtgtagctctactgggagaggaggctctgggattgtcccgctgggcacaggatgttctggggttgtctcgtgtggctctattgggagaggaggttctggaggctctgggattgtcccgctgggcacaggatgttgtggggttgtctcgtgtagctctactgggagaggaggctctgggattgtcccgctgggcgcaggatgttctggggttgtctcgtgtggctctattgggagaggaggttctggaggctttgggattgtcccgctgggcacaggatgttctggaattctctcgttgagtggttctgttgggagaggaggctctgggatcgtcctgctggacacagggtgtcctggggttttcccgctggggagtacaagtaggaaaagaagtttgggggttgtcctgctgggtagaagaggttctggggttatccagttgggtgcttcgtgagggagaggaagctctgggggtgttccactgtgtagatgaggccctgggggtgtcctcttgggtggatgaggccctaggggtgtcctcttgggtggatgaggccctggaggtttcctgttgggtggatgaggccctggagatttcctgttgggtggatgaggccctggaggtgtccctttgggtgattcgatggggagaggaggctctggggatttcacgtgtagaggcagcctgagcagtgtccctttgggcaggagaagcctgagacgtggtgcttcgaggtccactgtgtggtgtcat

SEQ ID NO: 41000 - DNA, 1457 bp, Artificial sequence
  DNA replication origin
gccgggctccgcggcgcgggaaccccgccgccgccgccgccgccgcccctctcggccgcccgccgccgcgcctccggcccttcctttccccgacgctgccccggccccttccatccgcccataaaactttttttttttttttttcaaacttcctgggaggacccgagcgggccaatgggtggcggggaagccgagacaaacagcggcgggggccgcggcgggccaatggaagcgcgagacgggccgggggcgggacctgccgcaacgggacgggcgcgctagggcggcggggcggcgggacggcgggacggcggggtgggcggatggggccgcagggaagggagggcggtggcggccggagggcgggcgggcccgggccgcgggcgcgctgggaggaaggaagggcccagggtgcaggtgactccggcaatggcgcgggggcggaggatgcgggcggccgggcgtgggcacgactcgcccaggctgcgcttcccgacccggccccggagcgatgggtccgctagggctcggcgccgtgatttggcggggaccggggcaaagcacccagtactaacgactcagcgggtcccactcgccaagagtcgattttcgtcctcaccacagacttgggagggaggtcttattttgctaatgagaaaacggaggctcagaggggtgagccgatttgcccgaggtcacacaggaagaggcggaattcctagcgagtaagctggacacaaagtgagttcttggatggcagggtctctcccaaatgcccactcctcacaaatgggtcttttttggtttggggtttttcaggtgtgggcgtgcacccgttgctcaggttcccagaacgctgggccgtttgttagatgctcttttcctgcaggtgagtagggaccgtggtggaattggttgctaaatgcactaggaagttcgtgtggcacggggattccagcctagtgttaccttaagcaaggcacctctcggtgctcaatttcactctctgtaaaatggggtaatgctgttacctcatgaggttgctggaaggattaagtgttaattcaagtaaggcacctaggacaacctctttatccctcattagctatccttaggcaaggaggcagggaagcttggaataattggcatttcaattattctgtcatcttgatttggggttcaaaaattattgcccttgccgggcgcggtggttcaggtctgtaatcccaacactttgggaggctgaggtgggtggatcattgagatcaggagttcaagagcagactggccaacatggtgaaaccccgtctctactaaaaatacaaaaattagccgggcgtggtgtcaggcgcctgtaatccagctatgtaaaaggctgaggcaggagaatcgcttgaacccgggaggcagaggttacagtgagcagagattgtgccactgcactccaccttgggaga

SEQ ID NO: 41001 - DNA, 2365 bp, Artificial sequence
  DNA replication origin
gcccgggcccgcccgccctccggccgccaccgccctcccttccctgcggccccatccgcccaccccgccgtcccgccgtcccgccgccccgccgccctagcgcgcccgtcccgttgcggcaggtcccgcccccggcccgtctcgcgcttccattggcccgccgcggcccccgccgctgtttgtctcggcttccccgccacccattggcccgctcgggtcctcccaggaagtttgaaaaaaaaaaaaaaaaagttttatgggcggatggaaggggccggggcagcgtcggggaaaggaagggccggaggcgcggcggcgggcggccgagaggggcggcggcggcggcggcggcggggttcccgcgccgcggagcccggcccgagagccgcgtccacgttcctgcctcctgctcccgccgccctggggcgccgccatgacggtgagtgccccagtcagccgcccgcgcccgaggccgggagaagggcgacgacccgaggcagagcccagcctctcccctccggggcagccccctcctcatttcccgaaggcgagaggagggctgggccggaagacggggccacctccgaagcgctttcggccagaccggcctcacccttcccgcaggctcctcctcgccttccctcgcccactcgcccccgggagcccaggcgaccctgaggggacggaacgacccgtctcgggcgccccctcctcacacttgcggcaccagtcacgggtggattcggggcgaccctttcccacctcccctccagccccctagacgaagacccgattccccaaggcggccaggggccccagggaggagcggaggtgggcctgggctggggaggggcgctcgtgggtgcggatgggtcgcgctgacccgggcctgggcaagccagccctccgtgtggccgctggcccgaggtcgggtgggcgagaagtggccggaccgccccacccacagcccgggaggcagtcccgggacgtctgaagcagcgggataccacgtcttcctgggcttgcactttgcagcggtcctggggccttgggacaagcctgcgagtctgagtagggggcatgatggcaggggtttgcctttctcatgggggtgagctgtacccaagccccatcaattacctgtgccatagttagcatattgagcctcacagctgggttcgctggactccccacttcacagccagataaactgaggcttggggaggggcgctggtgagttgcccgaggtcaccccaagtataagagaaggagtagctcctttccctgtccttctggcccactgaccgtgatgttcgggaagggaggggtggggctgcttttggtttctggctagtgcttcagggaggctctgacagcccagtggccctcctgggggaggatgagcagggtgtgtgtgtgcacaggcggcagtaggcctctttcaggggagtggagaccctgcggaggagtgggtgggctgctgggggcgggctgggctgctggggggcgtggcacgcctagcccctgccctgtgagtgtgatggcctggacttcctcggcgtcctcctggacatcctgccacctccctgctggcccttcctgtcgtcagcagcctccccttttctgtcaggagcagaagggatgtggggggaggagctgagtcagtgtcctggggccaggaggagagaagttgccttgcccaccgggtgcctgcccggccctcagccgggtgctttcacgttaccagatttgatccttgaaggttggtagtaacatcttaatcaaacagatgaggaaaccaaggtgtggcgaggtgaagtgtcatgccccaggtaactcagtgagtcccaggctaagccagaatttgtatccaggtccgttccagctttctttcacagttgcctgtcctgggggcagcacgtgctgagcaagggtaaggctgccggaagcagcgtgtggggtgcttggaagatggacagcacatccctgctggtggcagcagccttcctgagggaggtgtcctcctgtgattatagggccttgtcaggtggagatggactagcgaggagacagcagtgtggacagaaacgggtggtcatgtttgagaagtagcaagagcgtagggaaggggtctggggaggagggcctcactgctagggcttggacaggggcaatagagagccatgaaagcttttagagcagagaggaggctatgatcaccattaatagtgttcattgagttcatcctggctgccatgcagacctcagcctgctctcagctggtgctcctcctgtacccacctcacaccctcctcccctggcccccgtgccctgaatcagggatccatacagagcaagtggcaca

SEQ ID NO: 41002 - DNA, 1197 bp, Artificial sequence
  DNA replication origin
agtggtgatgactcttaacgagcatgctgccttcaagcatctgtttaacaaagcacatcttgcaccgcccttaatccatttaaccctgagtggacacagcacatgtttcagagagcacagggtttggggtaaggtcacagatcaacaggatcccaaggcagaagaatttttcttagtacagaacaaaatgaaaagtctcccctgtctacttctttctacacagacacagcaaccatccgatttctcaatcttttccccacctttcccccctttctattccacaaaaccgccattgtcatcatggcccgttctcaatgagctgttgggtacacctcccagacggggtgctggccgggcagaggggctcctcacttcccagtaggggcggctgggcagaggcgcccctcacctcccggacggggcggctggccgggcggggggctgacccccccacctccctcccggacggggcggctgccgggcggagggtctcctcacttctcagatggggcggctgggcagagacgctcctcacctcccagacggggtcgtggccgggcagaggcgctcctcacatcccagacggggcgttggggcagaggcgctccccacatcgcagacgatgggcggccgggcagagacgctcctcacttcctagatgggatggcggccgggaagaggcgctcctcacttcccagatgggatggcggccaggcagagacgctccttactttccagactgggcagccaggcagaggggctcctcacgtcccagacgatgggcggccaggcagaggctgcactctcggcactttgggaggccaaggcaggcggctgggagttggaggttgtagagagccgagatcacgccactgcactccagcctgggcaccattgagcactgagtgaacgagactccgtctgcaatcccggcacctcgggaggccgaggctggcggatcactcgcggttaggagctggagaccagcccggccaacacagcgaaaccccgtctccaccaaaaaaatacgaaaaccagtcaggcgtggcggcgcgcgcctgcaatcgcaggcactcggcaggctgaggcaggagaatcaggcagggaggttgcagtgagccgagatggcagcagtaccgtccagctttggctcggcatcagagggagaccgtggaaagagagggagagggagaccga

SEQ ID NO: 41003 - DNA, 1169 bp, Artificial sequence
  DNA replication origin
cctccaactcccagccgcctgccttggcctcccaaagtgccgagagtgcagcctctgcctggccgcccatcgtctgggacgtgaggagcccctctgcctggctgcccagtctggaaagtaaggagcgtctctgcctggccgccatcccatctgggaagtgaggagcgcctcttcccggccgccatcccatctaggaagtgaggagcgtctctgcccggccgcccatcgtctgcgatgtggggagcgcctctgccccaacgccccgtctgggatgtgaggagcgcctctgcccggccacgaccccgtctgggaggtgaggagcgtctctgcccagccgccccatctgagaagtgaggagaccctccgcccggcagccgccccgtccgggagggaggtgggggggtcagccccccgcccggccagccgccccgtccgggaggtgaggggcgcctctgcccagccgcccctactgggaagtgaggagcccctctgcccggccagcaccccgtctgggaggtgtacccaacagctcattgagaacgggccatgatgacaatggcggttttgtggaatagaaaggggggaaaggtggggaaaagattgagaaatcggatggttgctgtgtctgtgtagaaagaagtagacaggggagacttttcattttgttctgtactaagaaaaattcttctgccttgggatcctgttgatctgtgaccttaccccaaaccctgtgctctctgaaacatgtgctgtgtccactcagggttaaatggattaagggcggtgcaagatgtgctttgttaaacagatgcttgaaggcagcatgctcgttaagagtcatcaccactccctaatctcaagtacccagggacacaaacactgcagaaggccaaagggtcctctgtctaggaaaaccagagacccttgttcacatgtttatctgctgaccttccctccactattgtcctatgaccctgccaaatccccctctgcgagaaacacccaagaatgatcaattaaaaaaaaaattacaaaaattagccaggcatggtggcttgtagtcccagctactcgggaggctgaggtgggaggatcacctgaatcgggaggttgaggctgtggcgagctatgactgcaccactgcactccagcctgggagacacagtgag

SEQ ID NO: 41004 - DNA, 1311 bp, Artificial sequence
  DNA replication origin
tgtttagagagccgtggccgcgaccaccgccattttgctgggaagatgcgatgtctttgttaaaatgcacacagattttcccgtgctgcttggcaggtgtagacgaggcggacacggggcgccactgtctgtagggagttctgaagctcgaggggctttaggggcccagaggccagcaggagagacctcagagaccctaggaccccttgtctgcggccgacctcctactcacgtgccgggtccgcttggcagcggccctgggctgagattctgcgacgtttgctccctgggcccctctcccacaaccccgcttttattccctaagcatagaggccggtcactgttcacttaaacaataccctgggagtgggagtttgttgctggtcaaaatgatgaacgcatcccggtatggtccaagagctgtttgcagacacagtgggctactggggaggggtaaaggggaggggttcgagggttttgatgttggggacgggatcgtagctgcgtgggtgtgggagggctcctactggacctgggagtctctgaagccaggacaaattaatgggtttcccccgcacgccaagggatggattaatccaaatgattaggggaggaagggggagggggagcgcaagactcggtgtcagatgccttctctctgggcttatctccgtggcacaggcggggaagggaagcaatggggggtcaggttagttcaaaaggtcaaggttcgtcttttgatggtgtcaatttctcttaagtttcgtcatttgaaaacacaacattctggtggctttgttttggttattttcaaagacaactcgggttcccattaagacctggttgggttaatacgcacccaaatagccccccctccccgtatccgagatgttccaccctgagagcccagaaccatgtcaccccatcccccgccccagatccgtgcatgtcttaaagactggatgaatccaatgacacgacgatcaataattttatttgcacagcgctttacagtttgcacagtgctccccaccggtttctggatcctttgcgcctcctgcctttgatcactatccccatcacccctattttaccgcggaggcccgggacttagaaggatggattgggggcggggtactgtaaggctcagctccctgacacctgggcgttcatttcattttgtatctctcctgtcccttctccccgcccatcccagcgacctgtaaattcccggaactgaagccagaattggggaaaggggttgcctcgggttgcaggggcttccagctagtggacaccccttctcccgcc

SEQ ID NO: 41005 - DNA, 1481 bp, Artificial sequence
  DNA replication origin
ctggctgcctgctcccggcccggaatggcgctgcgccgccgccatctgtgtttcttccgccgagcaaatccgacctttccccccggcccgggccttcctgctccccgccgccgccctgggccgctgcctggctccctgggcttccccgccgggcggcccgctggcccggccgccgccccccgcgcccgccacgcaccccaaacggcgccgaggaccgctggtgtgccggcacatttcccctttgcggggggctggctctgcggggctagggagcctcggtgcgggaaaccccccgtagcaaagctctcccctgaggctaccgggggctctgctcccggcccgctgcggggtcccctagcccggtggagctgccggaaagcggccccaactaacacacgcggccccgagctgggcgactcccagccgggccgagccgggacaggggggaggggtcgctcccccggggtccggtcacctctcgggggtcaccccgccaccggtccctccacacctctaccccctctgtccatggggcccccaaggaaactttccctgaaagagttggaagggtactttcaaactttgtcccttccccctcctctgccgtctctcccccagcgcgccccccgacctctgccttgaggttccctcctgaggccgaacccccagtgctgcccggaccctctgagagatgaggagggcctcccgggtggcctcttctcctcaaagacccctacatctcccatataccctaatcgggaattcatttgtgtgcttctcttagcctggaagttttggggtgtcagagacagaactcgctgccccccatccgtgaggcccagcctgggggttcagtccccgtcccaaggctccttgaaggcaatgtgggggcgggggagggcggtccacaatggagaagctgccccagaagctctaaccagggacggtccggggggcccctgtaatgaggagaggccctgagtgctttggggacttgggaaagcggggcgctagggtagaggtcgaggagggggttatgtcccttgggttgtgacctgtcctcggaaagtgtggagttgtttagagagccgtggccgcgaccaccgccattttgctgggaagatgcgatgtctttgttaaaatgcacacagattttcccgtgctgcttggcaggtgtagacgaggcggacacggggcgccactgtctgtagggagttctgaagctcgaggggctttaggggcccagaggccagcaggagagacctcagagaccctaggaccccttgtctgcggccgacctcctactcacgtgccgggtccgcttggcagcggccctgggctgagattctgcgacgtttgctccctgggcccctctcccacaaccccgcttttattccctaagcatagaggccggtcactgttcacttaaacaataccctgggagtgggagtttgttgctggtcaaaatgatgaacgcatcc

SEQ ID NO: 41006 - DNA, 1258 bp, Artificial sequence
  DNA replication origin
gaaatgtgccggcacaccagcggtcctcggcgccgtttggggtgcgtggcgggcgcggggggcggcggccgggccagcgggccgcccggcggggaagcccagggagccaggcagcggcccagggcggcggcggggagcaggaaggcccgggccggggggaaaggtcggatttgctcggcggaagaaacacagatggcggcggcgcagcgccattccgggccgggagcaggcagccagcagccctgtcctcaccgcggtccgcccgccgccgctaaatacccggatgcgccgcccaagcgccagacgcggagctgggaaaagggaggcagaggaggcggaggcagaggcagaggcagaggcagagcccgagcccggtgccgagaccaagcgacagaccggcggggctgggcctcgcaaagccggctcggcgagctctcccgacacccgagccggggaggaaaagcagcgactcctcgctcgcatccccgggagccgcactccagactggcccggtagtcaggggctcaggagcagatcccgaggcaggctttgctcagcctccgacgagggctggccctttggaaggcgccttcaacagccggaccagacaggccaccatgaccgagaattccacgtccgcccctgcggccaagcccaagcgggccaaggcctccaagaagtccacagaccaccccaagtattcagacatgatcgtggctgccatccaggccgagaagaaccgcgctggctcctcgcgccagtccattcagaagtatatcaagagccactacaaggtgggtgagaacgctgactcgcagatcaagttgtccatcaagcgcctggtcaccaccggtgtcctcaagcagaccaaaggggtgggggcctcggggtccttccggctagccaagagcgacgaacccaagaagtcagtggccttcaagaagaccaagaaggaaatcaagaaggtagccacgccaaagaaggcatccaagcccaagaaggctgcctccaaagccccaaccaagaaacccaaagccaccccggtcaagaaggccaagaagaagctggctgccacgcccaagaaagccaaaaaacccaagactgtcaaagccaagccggtcaaggcatccaagcccaaaaaggccaaaccagtgaaacccaaagcaaagtccagtgccaagagggccggcaagaagaagtgacaatgaagtcttttcttgcggacactccctcctgtctcctattttctgtaaataat

SEQ ID NO: 41007 - DNA, 850 bp, Artificial sequence
  DNA replication origin
gcaagagtcaatattaggaagccataaagtcgccctgagagatgcgaaggggaacagtagctaagagtgtaggagccgcccacccccacctccaggacctccattccagcgcaagctcgggaaaggtcttggaacgactcccggaacggagcgttacctccggagacgccgtccacgcggatgtgcggcccctgacgggacgtgatgacccgctcactcttccaagtgccagctccgcggatgccttccagctccccctccagaatgccacgcagctgggccagcgctgactgtgcgcggcggccgcggggcacccagaagagtgcggcgcgccaggcgttcccaggccacatcgctcctacctcgcccgagcgcgcctgcctgcctgggagccgtgcgcatcgcggacgcagcctggtcgcgtggccgggggccgggctccagcagccaatcggagctaggggggctcgcttaaaaaggcggggaggcgggcctaggacgggtgggcggggcctggcgggatccgccagggaccgagaggcttgacttgtaagttgagactgccgaagtccggatggcagaggggagggaagggggcggaggaagtcgcgtcagggccaagcccaccagactccccaccgcattcccacgtactcacctctcggccggaaatggggtaccctctggaccccaaaggcagaagcctagaagccggctaaggcacgttccgcagcctccgggactaaggattcctggcttctgtccagctcctgaaccctcccccgccattctcaggtgcaaacgccccagatgtccccactgcctgcccgcctaaccgctccgcattcat

SEQ ID NO: 41008 - DNA, 1932 bp, Artificial sequence
  DNA replication origin
tcgcaggctgggattccctgaatcccagctttcagatcctgcagggctgggccagagcccagctcatattacattgttcatcccaagataacaggcaaatgggtgggctggaggtgcaggacgtcagagagagacgtagggctagtttcatgtcgttaatgataaagggccttttcgtcctctgtcccaagcaaactaagagcttcccaaggtcacaccacgctgagggtggagctgcggggaccccactccccaccccacaaggggtccacaaggtcgccagggagagaccgccctcctcccgcaggcccctccaacaggaaagcggcgagccgttgtggggcacaagggaggatggggccttggcagcagcaaatcgcctctcctggccttgactgctgggcagcctgaacagccgcggcccaaggcccccagtctggaggggcggggcgagccggcggccgcggcccgtgctcgcagcaccccctggtggctgatcatcgtaggccttggaatgagcgagatggaaggacctcagacctcaaggcatagtggcaggaggactgaggcacacacagggactggagcttgccgaaagccagagtaaggcagggagagagtgggcgcgaacacagggttccagactgtctggagcttccccaggggtgatcctcattcttttcttttgggcctgaatcctctgcctctccttccaaacatggacacccagcctcctcctatctgggcagctacaggacatcttccagtggggagaaggaagaagctagactctaagactagactcaggggctgcagagtagcgggcagtggcagggtaaaaggcctgtggggctagttctcagcagccctccacagcagcacagaaactacccgagacaaacggtggactgggcctatctcccaaaggcctgggtgccagcttttttttttttttttttttgagacagacttctgctcttgttgctcaggctggagtgcaatggcatgatctcggctcaccgcaacctccacctcccgggttcaagcgattctcctgcctcagcctcctgagcagctgggattacaggcatacgccaccacgcctggctaatttcgtatttttagtagagacggggtttctccatgttggtcaggctggtctcaaactcccgacctcaggtgatccgcctaccttggcctcccaaagtgctgggattacaggcctgagccaccgtgcccggccactgggtcccatcttaatctagggaaagaggtcagtggagatctgcagtcctcaggcgcctcccctcagagccctggctcctgcctgattcttcaaccggccacaggactgggcctgcccagagacaataaagcagaccagagtgtcacagccaattttcacactgttgtttcacattctcacagccctcagcacaggtcacgtcccagcccagctctgggactttggttcagggctcagagcctctggtctgggctgatcgaaaacctcctttgaccctgtggcagtaggcggaccttggctcttctcgtccttacccagagctcagggcagtgccccgtgcagtcgccccacttccacgaaggcctccacgcagcggtcaatgtcttcctcgctatgcactgctgagatctgtacccggatccgggccttgcccttggggaccacggggtagctgaacccgatgacaaagatgcctgggagggtagaaagcaagggcgtgccagaaccaacaggcttgggggcagaacacagagggcaagggaactgccccaggtctcagattcgggactgcctcatggcttggggtgttcaagcttagacagacagctggcctaagaggccgcagcgtggctgggtacggggctgggtcacagtctaggggtttccctttctcttctctcaggacc

SEQ ID NO: 41009 - DNA, 1048 bp, Artificial sequence
  DNA replication origin
agtaatgtcgagccagcagctggatgagcatggtctgctctagccagcagctcatgttaagcgccacgggcagctgcggggtgacgtgtggcagtcggtgtgctgcacccggcggggccagaacagagggcccaggtccacccagaccgacgtgaggcggcacgaggcgagatccagacagcggcgcagaaagtgcgtcgccgcccctgtggctcccaggagccgccgctggcgttgccctgctgcgctggcagcgccgcgaccccctgggctagccgatcgcggtagggctccacgccgttggccaacccgcggctcagcgtgtcctgctgcaccagcccgggtccgccgccgcgcttcttccgcagtcatccagaaggtgtctgtaggaggcgcagcagccgctctgggtgcacgtgtttcggcttgggcgcctaccggtagtcgccggccgcccacgacaagctgtagggccacgcggggcgggagggccggccgtggaccagctgcaagtctgcgttctgcagaatcagaggctctgaggaccgccccaagggcgcaatgtccttgttctctgcgtcgcgcacggggttcagggccgcgggctaccagaagcggcagtaggagtggatggaggtggcaccgggcgcacccaaggtctaggctcacggccgcgctctttatggccgcctgttccttcctccttccctccacctccgctctcatatcagcttagccttgccgctgctgggagctcatcgccctaggccaagaaggaccttgtgggcagggggctcccaagggccaggagtgcgaagtcatgaatctcagatgctttccagcccgttccagggttcaggcatgcacattcgtccaggcttctgggagtctaagggtgcgttactttcacgcagtggttgcaggtctgtcaaagtttctaaaatcccaccaagctgagtctcgccattcagggatcataagagtctacaattcctttgcgcaattcaattctgaattcaattcagaattaattcaattctggccgggc

SEQ ID NO: 41010 - DNA, 899 bp, Artificial sequence
  DNA replication origin
tctacagcagagacatgacccgcacattttctttctttctttctttttttccccccacattatcttttgtaaaaagtttgttatgggccaggcgcagcggctcacacctgtaatcctagcactttgggaggctgaggtgggcggatcatctgaggtcaagagttcgagaccagactggccaacatggcaaaaccctgcctctactaaaaatacaaaaattagctgggcatggtggctcacacctataatcccagctactcaggaggctgaggcacgagaatcgcttgaacctgggaggtggtggttgcagtgagccgagatcgctcgcactccagactgggcaacagagcgactctgtctcaaaaaaaaaaaaaaaaaaaagtctattattgcccggggtgaaaaggatggacagagtgggagagatttgatgagtgacctgttaggagcctctcgtctaggcaagagccaaagaggagaataggtcttggtgaacggctgtgtgatttggtcatggagttctgtcctgaactgtgtggaggaggggccacatggccaaatgcctccagagggttagggaggctagcacctggggagcaaggtacactggattcagcaatgaggaggctgctggtaaactggacaggtgttttgagggcaaaaggcagtctgcagtgagttaaggaagggaggggagaggtggaggggctgagtgtagtgtttttagaagctggggctggggttggggagcatcaaggggaagtgcgtaaggggagagaaaacagtgtgaggggcgctgatggagccaggactcgcatcccaggccggaggagctggggtagatgctcagaactagctccttaaggccaggcgtggtggctcatgtctgtaatcctagc

SEQ ID NO: 41011 - DNA, 3079 bp, Artificial sequence
  DNA replication origin
gagcgcgtggtgcggaccccagcagagcgcgtagagcgcggccaccgccagcatggcgcgccccgcgcggcccgtcgccctccgccgcgcctcggccgccgccgcgcccgcgggacccacggcggcccacaggaagcgcagcgtgcgcccgtaggccaggctcaccacagccacgggcagcaggtagccggcagcgaaggtggccacgtccagggcgcggcggcgcgcgtcctcccaggcgggcacgcagagctccagcgcgccgtagcgcacggtgccgtagtagctgaggtagggcgccgagaagagcgccgccagcagccacaccagccccactgcggcgcgggcgttacgcggcgtgcgcagggcgcgcgagcgcagcgggtgccgcacggccaggtacctgcggagggcgcctggtcagcggggcgggcaggtgccctcccgcaggggcccgcgccacgtcccgcgcccgggccctgcggcccagtgcgcctcctgtgaaccgtgggggacgtggcggggattaagggtgtgaacgcgcaaggtgcttaggcccttgcacctagcaagggcccgatcccggtgacttgttatttctaggattattttatggatgcgtcagatgaggtccagagagaagtgacttgcccagggtcatcagctggagtgagcctggatttgaccccaagtttcaagctgtggaagcagatgtgtgcacagcttggccaggtgtgggcagttagaaaatagctgggctgggcgcggtggctcacgcctgtaatcccagcacttgggaggccgaggcgggcggatcacttgaggtcaggggttcgagaccagcctgtccaacatggcaaaaccccgtttctactaaaaatacaaaaaattagccaggtgtggtggcctgtaatcccagctactcaggaggctgtggcaggagaatcgctggaacccaggaggcagaggttgcagtgagccaagatccaaaaaaaaaaaacaacaaaacaaaacaaaacaaaaaaactgatgaacgcattcgtgagcttcttttgcgattcatttcgcgcttacagagcacttactatgtgccagaccctgtgctgccacttgagactcagaggcgtcctctggaagttcacagtggaggaggggaagggcaggacagtcccctcaagcacgccctgcaggtgcccagaggctgcttgcgaggggtcagggagcttttgtttcctcccacccacctccctttctggtcccccactctctccttcctaaggccagtgaggatctgttcaggactcctcccccaacccccgcccccacagccctgcccagccaggccccaggcacagcgcacctgtccacggagacagcagccagcgtaaagctgctggcgtacatggtgaggtagatgagcaggtgcacggccttgcagacgagggccccaaagagccaggcatccagcgtgtagatggtggcctggaagggcacgcagcacaggatgaagcagaggtcagccaccgccaggttgaggatgaacaggtccgtggtgctgccaggctcctgccaggcactcgggccaggctgcaggagcactgccagcaccagcccattgcccactgtgcccagcaggaagattagggcaaagaccacaggcactgccacggcccccacactccctgggctgtccagtgaaatgttctgggcatcagccatctccccatcagacgggcacctgggaagagaagctggaatcctcaggcaagagcccccagttctggttgcttgaccccgggatctaactcccccgacctgggtctggccaggtgttctgggctggaagctcgtgggagatggaggaggggagagcagagccaaagtcatcgctgagtgtcactgtgtgagcaagctcgtggtgttcaaggggtgagagttcctcagtttcctaaggaacacccctggagtcctgcctggaggactacctaggtatttgagggacactttcaacccacgaggctggggaaggcacaagcgaagtaggatgaagatatggcgatggggggaggggccaaacccagaaactggtatgttttccttctcaatggggatctgaagctcaggggagaccctgggacatgggtttagggctttctctggctacaagctgtagccttagcaaaacacgggtaacatccctgagtcattggagggtccagtatagtgagatcatcacaatggcaaaactgggaagaccgtgtaggtcactgcttcctctctgcacatagggaaattgaggcccagagaggggacatgggaggataatatcacactcgaaatggcagctctggggctgttgccaccctggtatcctgcctcttaagctagagtgctcatctgagagcttgtaacaggtggtgcctctgacaacttgtgtgtgtgcacaccgcacccatgctcacccccatcccactctacagcccatgtctcctactgcctgtggatctccttgcaggcttgagaccactggggtggtgggacaaagtaggggaaaggggggtcaggcagggagtagggaagaaaggcaatgtctgcccccatcccagcacccagcatgcagtaggtccccaaagcccaggatgggcaacacccacctccgccttgggcagtgggcttgatcctgggtggaatggccgggctgggtgggcctcctgattcagcggctgccccttggtgcctccctgcaggtactggtctgccttctacttctccccctttgcctttaaggcccctcctctcctctgccccctctgctgagccggagttgggcactccctctggagtagccactggccacttcctcctcagtccctgatttcccccaggtggcaggctcttctgcctggctcttctctgcctctctgcgttgctgctgccttttcctctctctgcagccagtaacccattgatctcgctctctgtgatttgctttgtagttaacccctctgtgcccagggcccagccagtctctggcactcccacctcctgtggcccagcctgatgtgactccatcccctat

SEQ ID NO: 41012 - DNA, 1035 bp, Artificial sequence
  DNA replication origin
ggccgccgtgggtcccgcgggcgcggcggcggccgaggcgcggcggagggcgacgggccgcgcggggcgcgccatgctggcggtggccgcgctctacgcgctctgctggggtccgcaccacgcgctcatcctgtgcttctggtacggccgcttcgccttcagcccggccacctacgcctgccgcctggcctcacactgcctggcctacgccaactcctgcctcaacccgctcgtctacgcgctcgcctcgcgccacttccgcgcgcgcttccgccgcctgtggccgtgcggccgccgacgccgccaccgtgcccgccgcgccttgcgtcgcgtccgccccgcgtcctcgggcccacccggctgccccggagacgcccggcctagcgggaggctgctggctggtggcggccagggcccggagcccagggagggacccgtccacggcggagaggctgcccgaggaccggaataaaccctgccgcctggactccgcctgtgtccgtctgtctcactcccgttctccgaaggcgggacgccaccgggccagggatggggcaatgccacgagctctctgaggggcgttgagtggagcgacttgtccccgctccacagcggagcaccagcccagtggacacccctgggtgtgaatatgaacagcacagcccgcccccagcagggcagcccccagagcctgcccagagccagcctggcagtccctctgcccattcttccaactgggtgacacctaggccctgcttcctccaccacctcttaactatctccttcttggttccaagctcagtcctaggtaatttaacatcaacagctaataaatggctaatatttaagtgggaccaggcgcttggctcatgcctgtaatctcagcgttttgggaggtcgaggcgggaggatcgcttgaggcagcagttcaaggctgcagtgagccatgatcacgctactgcattccagcctagacagcaaagcaagaccttgtctctaaaaacatttattaagcaggtaccatatgcctcatgc

SEQ ID NO: 41013 - DNA, 1078 bp, Artificial sequence
  DNA replication origin
gataacaggcgtgaaccactgtgcccggctgtttagccccattttacagatgtagaaatcaaggatcatagagatttagtgatttgccacaccgctggtgtttggcagaggttggatacaaacccatggctgtgtaactttttctttttttttctattattattattattattatttttgagagagagagagagattgttatccaggctgcagtgcagtggcacaatcttggctcaagacaacctccgcctcccaggttcaagcgattctcctgcctcagcctcccgactagctgcaactataggcgtatgccaccacacccggctaatttttgtatttttttattatttttattttttggtagagatggggtttcaccgtgttggccaggctggtcttgaactcctgacctcaagcgatccgccggcattggcctcccaaagtgctgggattacaggcgtgagccaccgcgcccggcccagaggtaacatttgacatgtattttcttggacaaaggtggggaggggcatgccaggtagagcaacagcctgtgcaaggcaggggacgtgcagggcagtaagtggctcctgcagctgaggcagggagagattggggcaggggaggcctggagggcaggagcttcatccttcaggcagatggtgatgccactgaaggttttcaggagaggagggggcctatcagatgtgcagttcagaaagctcccagggctgctgtgtacaagctggaatggaggcctagacttggcagaggactccgatcaggtgggttctcctgggcccttcttggaagtgaggagactggtaaagagtctgctccgtgagctctgttgaggaaagccaacgaggcctggcctaggactgggaagatatttttgccgtggacttggcaggaagatggatggcctgctgccaggcttgggcttggttcccgaggctccgaggtttgcttcagggggctaatgaaacacttggaagagcagatggtcgtaataataataactcaggagagaattgtgtgtccagtagagcccaaggcaggcaagagggtcggagcggag

SEQ ID NO: 41014 - DNA, 1463 bp, Artificial sequence
  DNA replication origin
gatccacctgcctcggcctcccaaaatgctgggattacaggtatgagccatggtgcccaaccccgccccccttaggttttaatgagagtcctgggtggtctttgaaggcctaggtggatgctggtgtcaggatcctgaacccaagtccctgatttcataaaaagcatccggaatcctgctttcctgccactgttatcccacaggggacagggcaggagttggcagctcagggctggtgagaagtccagagggctagccaggcactctggccatgctcttcctaggtggcctgagagtccatatactgagccaagatggcggccttccagttgcaggagtgttaggccagcccagattggcaagctgggttctccaggccctgggccagtattctggactgggactcagtggactttgaagaggtagaattccctaagtcggcctctctccttgataatttacccagaatggcccagatgacaatctgggtacaaaatatttcagtccatttcatcatgtttaccaagtaccaggagtcaatagaatttatgagtgataactaaagggtaaggcactttacatcttaatcctctcagccaccttgtaaagcaggtattatctccatttttaagtcgtggaaactgaggtccagggaggcacaagatcacatgactaagggagtggggaaagccaggattggagattgggttaatagggctccaaaatgcctgatctttccactcccctgagtgctcaggggtgatgaagatgactaagaccctgttccttcccttgggagggagcgaaatacccactccagctaactattgcatgggtcagggtgacatcaccacctctgcagcagatggaggctgattcatctgtgggagagtcaggaggggcctctgcggaagggtcggctggctggaagggttggctggctggaagggtcggttggctggcgggggttttgaagacggcaaagatagagaatgagccttggggaggttccagggccagatacaaactgcctgtatgcctcccaggcaggggcctccttggcctaggtccttcccataggaactcaaaccaccaccacactaaccatggctgaggggacccggcaggccgcagtggggagggacgagatccctgagcttacacaggggctgaggggagctcagtgaatcacctaggggacacctggaccaaaggtggcggaggggcgcatgggtctccctgccaagctatgggggaggggatggtggacatgacaacttccagctcagcggtgctttagggtggggagccgggatgagggaagctggtggctatccgggggggggtgctctgaggtctgcaggggaactgcctccccaaagtttcaagctaggggtggaaggggggatttgcggtcattaggagcgggaaggaggccggatgggagcacgaggtgtcccgcc

SEQ ID NO: 41015 - DNA, 1261 bp, Artificial sequence
  DNA replication origin
gcgcccgagctcggagccgcagccgcagccggaaaccgggcccgcgcggcggccgccgtcccggccaagccggggccccgaagccagagccggagccgggcgggccgcggggtcatggctgggccgcggggcgcgctgctggcctggtgccgccgccagtgcgagggctaccgcggcgtggagatccgcgacctgagcagctccttccgggacggcctggccttctgcgccatcctgcaccggcaccggcccgacctgctgtgagtgcggggccccgggcgagcgggcggcgcggggcgggctggggccgcgaccgccgccccccctcagtaacacgaagcccgggcggtgacaggcgccgcccccggacacggagacgccgacccccccgacggccccggacgccgggcgggtccctgagaccccggcccagggcgcccctcccccgcccggccgccctgaccccgcccgtgggatcccgaactctcccccgaggctggtccctccgcggggacactggccccgcccacaaagcgctgatttccgccgaggatcgctgaacccctaagcccttgacctctttgaaggggtgttgagccctctttgggggccctgggcctctcctaccctaaactcttctccacgggctcgccgggcctcccctctcccccgaggcttcccactcggggtggccccttgctccgggtgtgcaggtgaacccccacttctctgacccccaaataggagcttgtctccggacagtagcacagttcccggcacagaggagacctcggctaacaggtgttggatgaatggatgtacagaccctgtgctttccccacgccccccaacttaggacgcagccctgcctcccgggtgtgtgctcgatggccctgcagccctcctcagtggggcacgcaggtggggcgcgcaagaggagtcacaggccggcaatgttgggaagactcctaggatccgattgatagacaccaaccgggtgctgcaggttgtgaaatggccccttcctgcccagagctgcccaatgaggttctcatgggaaaatgcattcagactccccggaacagttgacttggagcctctgtctttgctctctctgccttgagccctggaacctctcctcctttcgtcccttcattcctaaaacactgggtgagtttatctggtgccattccttgcacttcaggtctcacctgtgaatcagggaggagagttctggtccctacccctttcgcatgcagcc

SEQ ID NO: 41016 - DNA, 1026 bp, Artificial sequence
  DNA replication origin
tttccccacgccccccaacttaggacgcagccctgcctcccgggtgtgtgctcgatggccctgcagccctcctcagtggggcacgcaggtggggcgcgcaagaggagtcacaggccggcaatgttgggaagactcctaggatccgattgatagacaccaaccgggtgctgcaggttgtgaaatggccccttcctgcccagagctgcccaatgaggttctcatgggaaaatgcattcagactccccggaacagttgacttggagcctctgtctttgctctctctgccttgagccctggaacctctcctcctttcgtcccttcattcctaaaacactgggtgagtttatctggtgccattccttgcacttcaggtctcacctgtgaatcagggaggagagttctggtccctacccctttcgcatgcagccctcttgccagggctcccccagcctggcagatggaggctttctgtgcctgttccacctccagatttgcactgtccgagggcagcatgtgggaaggcttctaagggattgcctcaggattccatgatgcaggtgcacctggtttacctgtatgtaccctgcagtaccgtgtctgtgggtggtggcttgggccctggaggagagggttttggggctgtggatacagaagggaacaagatgaggtggtcatgtaggtgggcccctgcccgctgtggggcatgtgacacccatactaatggaagcacaaggttgatgcctggttgcccaggagcagggggtagaaggatggaggaaaagggcaccagggttagacctgggcattggaagggagggcccaaggggtcttctgttttgtttgaggggcaggagtgaggcaggaagcagggacaaacccagtgtgggaggggacttgggtgtgaagtgaagccatttggtgggcctgagcctggtggcatcaaagtaaataaaggccgcctggtttgtgtttagcttctccatgtcttaggcgcatggccttgggtcctcatgggctctctccagg

SEQ ID NO: 41017 - DNA, 847 bp, Artificial sequence
  DNA replication origin
ctctgacttaatgtaacacctggaacccaggagcaccaccaccccagcaccatgtccccaaggcctcaggggatcaccagccccaaataggagggaaaggatatcttatagaggctaggaagaaggcatgggtgtggcacaccaaagaggtgggccacagaggacagcgtgtgggcagagtcctgaggaggagtggggacagagccatgggggcaggggtaggcaggtgctcggtccttgctccagctgctgacttgcccagcagggctctgcctggggagggtgggagatcagcacacccccacgcttcctgctggggcactgctcctgaaaggggatccgagcccacgataagaggctcgaagcaggtccttaggaaacaatgggtggcttgatgagacctgctctgtgatactcctgagaagggagaagcccctgcagccagtccccactggaaaggaaattgggggtttccgtggcaaccagctccctgggcacaaagacttgtctgtctgcttggaaggcagctgaggtgtctcccctgcagcagcctttgctctggggaacagggagatggagggaaggatgtgggggatccaaaggggctaagggcccctggtgcttcttaaggagctgacagtcacagggccactggaataggtgcatgctccacgcagcatggcggtaacggggaagcaacaggtggtgacattgcagataagcagaggggaagggggttggaaagttgaatattttattatttacacatataaagtgagaatgaaaattgggcatggggcaagggcaggaagatgactccagctcagtcggtgatgatgagctcgtc

SEQ ID NO: 41018 - DNA, 862 bp, Artificial sequence
  DNA replication origin
ggttaccatccagcttcacgggaaccagcagttttggggaggttgcttgaagagcttccatgatgcaggtcctagatggagggattttggccaccctggggactgggctacttcttggtgccctgcctctcccctggtcctgactaggggctggagaccgcagatggaaggaagggagctgaggatgcccagtctggagcagtggaagatgcattgctccagatacaaagcagaagcaggggctgcaaaccacaggcaggtggaggggatgatggttaaaaatgcaagccttggagtcagagctgggttcagattctggcaccagcacttcttagcatcagcctcgcaaacttcagtttccccatctggaaaattgagataacgatcggacctaccccttcactggcctgaatgacataaaacccttggtggagcacttagtaaatggcagctggatataagctgttatgagctgggtatgaggaagaacttccaaccatcggagttgttcatcagtggagcaagatggcaaagagtctttggagttgtgtgcttgtgaggtggagtggtcctggcctctgggtgcagtttggacttctgctgaggaaagagctcttagggagtaggcgcttaaggagtagactgtctgacatccttggtctggacttggacatgggcacctgctgtgaaggcttggctagatcctggcgtgggctgctgtgtgtgtgctgggggaggtggcaagtggggggatgcagcaacacagggcctatccacacatcctgaaggacaggcctctgactgcaggcagcacggtgtcaccctcagcccacctcctcctcttcagatacctgtctcttga

SEQ ID NO: 41019 - DNA, 1292 bp, Artificial sequence
  DNA replication origin
caacacagggcctatccacacatcctgaaggacaggcctctgactgcaggcagcacggtgtcaccctcagcccacctcctcctcttcagatacctgtctcttgaattctttgcaaactcccgtctgctgagtgctgggtgagcagaggggctgcttgcaaggcagtgagttctagctgagccagttaagagtgagtggcccccctgcagtgtggggcatagccgccgggctggggagaagttcccatctgaggcttcagtccctgagctcagatggaccccactgggatgccagctgtcctaacactctccattgttcccactttcttagcagggagagagacagaaagagagagaggagagtgggaggggggagagagagagaaaggagagggggaggggggagagagagagagaaagagaggagagaagggaggggggagagagagaggaggggggaggggaagggggtggggaaagagggagggaggtgggagagagagacctttgatgatctatcctttgcattctactcctagctacttccagaaagcatttgaggaagcaccagtacagggataagagatgaagagacaggccaggtcaggctcaccaagcaggtaaccggaacctttaattttattatgtggaatgcttaatgcagagttaataggggctagagtggctaggagaggggactactgagataaataacaggagacagtaatgagttacatgtggatttggggggctgcagaacaggaaaataggggcagatatagctacatactttattcaaataccactgggaggcaaggggtaagaggcaagggcagaatgtacaggtcaggattctagtgtcttcagcctgccgacagcaacctgggtgctgggccctgtgtctcctggagccaagggttagggcctgagcagctgtcactctctgggaagcccagggagtggggctgactgagcaggggccatagagcctagtaagggaagagggagctggcaaggagcccagggagggaggctctgtgaattgtctctgattcctttcctggagcccctgcctcgtcacctcctgggatgcgtctcaaggtcatggaggttgtagtggaggaggactgggggctgtttctcagacaaagaatgaggttattggcacagaattggatcagggggcctctgtgccaactccttcctgccttcagaaagggagggggcattgaagggatgagaactccactaagtccctcgaaccccccactccccaatgaggctcctcaaagc

SEQ ID NO: 41020 - DNA, 825 bp, Artificial sequence
  DNA replication origin
cccttaggcactgtggcataggtggcatgggcatgtcagaccctcactatctgtgagagagaaaacaggagtcataggagtggtaaggcctccgatgccaccaaccctggtgcttcccctccccgaggagggtgagcaggcccttctcaggtcctgggatagagggtcattcctgggggaaggtgcagcccctcatctttcagtgtgggtgcaacagtcaacctccttctcctctgtccagcctgttctcctggggctttgctgctggagcctggatggggcgggtgggtcatcagggcagtgagccagacagaaagccccccgacctgtcagcctcttcagcctcctcagcctcctccactgccaccaccaggcctgaggtgggcaaggaacagggcacacaggctgggggcaggggctgggcggggggtggtggcgacagggccccctttagggccgggacagtgtcgtatatactggctgctcccagtgtgtggggctgtgggactggggccctgaggggctggggtcagagatggccgtgtagaggggccgctgcgagggccccatataggagaaggccgagtagaggccagaggcctggcccgagtggccataatagggtcctgagggctgatggtcagagtagtcaaactgggggcgggagatggaggggaaggctgagccatagtggggcaggctgagggaggtgtaggcgatctgtgaggtggatggctggtcggtgtagtgtgggggcccctggggccccgcggtctctgtcttcacctgggctttggcatccacaccaggtggtgagaccgtggg

SEQ ID NO: 41021 - DNA, 1027 bp, Artificial sequence
  DNA replication origin
ggaatccgatgttggaatcctctctctcttctggcccctgtcactttcttgctgatgctggctgccagctgggcagggggcaagggaaggataggtgaaagagtgagctctgtgtcccatgtccccagccatcccagaagcccctctgttggggtccactgctggcggagcagctctctcctctgtgggttctccccagtcacaccctcaaggcctgctccaccccctcccctggtcccagccgtcagagagggtgcccacatcccactccctgactctcaaggccctgctccggcatctttgtcctaagtgtgtacactgactctgacagagtctcggctggagggaccctctgagaaagctggggctagggctgggctcagggccggggtggggggagtagacagggaggctaagccgcagaggaatgctgctgccggctaggaggtgcctggcatgaccacccccgcccagcctggggagggagggctcggccttctgctgactgggggaagagggcactcactggggtgtgaggggtggggcagctgaagagacaagccctctggactgacagacaaggctgctcccacaaagactcatggattctcagtaccaaggtctgggattctagaatctggactttcccctcgaccccctctgtaaggtaccccatcctgccctcctcaccctggggcagccaaaccctaaatgccctccaccctccaaccctggcctaaggctggagtcggtggcaagggcgctggcttcagggcttcttctctccatgtgttggtttcagggactgttccagggtctgaggagaggctagcttcctctactctctgctattttctggacaaggatataggatcccccacaggaggcagtaccccccacccagacccatggtaaagaggagccacatctgccccctcagtcccaccacactggaattcacacaatcaggacccagagttaagagtccaaccctagatcctcctgtccaaccacccccgcaagcagc

SEQ ID NO: 41022 - DNA, 1081 bp, Artificial sequence
  DNA replication origin
aagggggagggcagcggaagagagccgggctcctctgacaaagccctaattttctggaacccagatgctcctcactcttgttctcatcttcttgcttccccccaacctcctgaccactcctcaaagtgtaggtgatccaccactgtcaccagggtcaggggaagtcctctggacagagagtatgggagtcctgggttctggccctggctctgctaccaacttctatgtgacctttgtgattcctttgcctttctgggcctgtctcttggtcagtctagcgagaatcaggtgactgctaccggctcacatctcctggagtccctggtctctttcagagctgctctggcactcccgggtgggagtgggggactgtcttgttccacacatccccaggaggcctggctgaaccccagacctgagtcgagggtgggataattgctccctgcgggggatgtttttcctagaggtgtgggctggtcccagggaacctgggactctgagggcccctgggcaggaaggaggccaaggtttccttctggccagagtgctcagctccagctctggggcagtggggaagaggttgctcaacgttggggtggggccctggcagggaagatggcgccgaactgggagagggaggaaagagatcagcttggtgactctggggcagggcaggagggggagccccttactgtgtgtcctctccctaggaggatgaagaagcccccaactcaaaggagggtggcgtcagaaagtcccagggaagagccctaggataggatgaggtcccgcagcagcagatttgtcccgcagttcttcatccctcactcttccaaagactctcatctgaattccgttttctttaaacctcccctgagttctccatctgactgcctcagtttccctgaatctccagccaaccctttggttctttccaagcgtttccctcgtatcctcctgaccacagcagctggtggcatagtgtgcgtatctgtgggcaggagttagtgaaggcctccttccctccctccaaagccccaggccccacggtctgccacccgcaaaattccaaccacgaggg

SEQ ID NO: 41023 - DNA, 1246 bp, Artificial sequence
  DNA replication origin
acctttccttcttccctcagcctgccccaacggggtttagaggagagccaggtggggggcaagggcggggtgtcgcctctctccacctcacagcagggtcccaggcctgggcgggccagggaggagcaggctgcgcactcacctcctcggacctctcctccagtctggggctcgtccttaggaagtggaaaaccgtgtcccaaggtgtgcggtccagctcggggctgggaggtgacgctggtgggctgggagggaggggcggggggccctgagcctcaggccacggcctcgttaggacggagcctgaatccttaccaccaaccaccctggccggacagcccgagactgactgagcgactgagcctgagccgctgcggagggctggggaaggaaggagggggagaggggggaggggagaggagggagggaagggcagaaggtggagcctccaggctttccttcatccccaacactcagggctcctccacccggagcccaggcccccccacccagctccctgccctactgcccaggcccatcttgctgaggcttatcttgggcttagtctgggaggtggaggggaggttaggccgaggaaggaagagatgtaggctggagggtcagaacctgttggatggaagaaaattgggcccaaccaggactcctaacgtctgcctcaggtggcaggatgggcacttggcaggggactagggagagacgtgaaggcggtgagggtcctgggggcccgtgagggtggctggccctagctgcttcgtctgcgaaatcctgttgagtgcctagtgtgtgccaggcactgatgcccagctcctcaccctgcctcctaccttttcccaggcagccctttctgccccatcctgcacagtaagagagacttctcagggatccctctgagaagtgcagagccccagcttgacccctggtcccttctctgcagacacccagcacacgcgcgttctggtctggttcaaggtggaaacacaagactaaagctgccaggaggccaaggtgggacaggttgggggccctctctcagtaggtcttagaggcattttgggttgctacctactgggacccagctccttccacactgggctcaccctgtcttgggagagggtaggggagtcctagtcctgattgtcacgaagtcctctactcccccaccccaacaaggggtggggacttgccctgcctcttccctcctctgcccacctctccctccctcccc

SEQ ID NO: 41024 - DNA, 748 bp, Artificial sequence
  DNA replication origin
ggcagctgtgggaccccacattccacctcctaactctgggctctttccttccacaaccacccctcctgccccaggcgggtctcaggccagtcacagacacagcagagagcggggaggtcctttcctcaaagaggaggaactgaggggtggaaggatgagtggggacccaccgggagagagagatgccaggcaggcaggcagcgggcgggcagcagcgggtgttggaggcgactgcagggcagccgggacacgacggcagatgctcgtccctcgtccctctgtccatccagggcggctcctctccgggcggttctgaggccgagcgggcgctgttaaaaagctttttatgtgtgtgtgtgttaatcacatgattgccgttcacctgtatttcgaacaaagacagctcactgtttcaaggccccgaacaagagtctgggcacagggaagagaagggaggcggggggaggagggttggcagcgccgggggtggcgtcgaggaaaactggggggagattgtccaaggccagcaagcgagagaaagagaaaacccttatcaaactcctaattcactgggctccgaggccccagacacactggcccgattgtctggctggttgtgtgtgtgagcatgtgtgtgtgtgtgtgtgtgtgtgtgtgtgtgtgttccagtgtctgctccccccacccccaacatgcctctgcctcgtgtgactacctcattgtgtcccatttcccaccccctacaccc

SEQ ID NO: 41025 - DNA, 1039 bp, Artificial sequence
  DNA replication origin
cagaggcgggaaggaaaggcttagacaatgagagagagggaagagcttgtgaggagaaactgaggccccgggaggggaagaacatacccctccactcccacttcccaccctctccctgcctcttccccaattccacaagccgtcttggctctctgggcgctggaaagctctcaccggaaggggacacaaacacctgctcttccatcaatctgggcaaccctggctctcgcgccaggagatggtacaaatcctgcggtccatgactctgtgagggtcgtgtcctagggaggctcggacgcatccttacctcctgcctgtcccccctcgacagacggtgagctgtgggctcacaggaggtgaggtccctgggacagccagagaaagggccccggggcagtctcagggaagctggaaatgggaagagggagatgcggagctgggcacaggcacgagggaggggcagggtgacccagggcatgcaggggacagagccgggtgtcctggggaaggtaggctggagccaggtggggaagactgcaggttgccacaagccttggcttctctaacttgtcagctctccccatctctgtcattttcccagggtcctccccacatttacagaggcagggcagatgagaggtggcacaggacagagacagagaaattcatggagggagggacagagagaacgcatcagggagagaaaaacagggagagacagagacagggctggagagagacagggagccagggcaggagggccaggacaagaaggacaccaagaggcaggagcgaccaactgtgggatgtggggtcaaaattaaaaagcttcccagagagaggaggctggggacagaaagaggagaaggagggagcaatggacagagaaagaaacaaggtggaggccgaagtggaaaagaagggagaaaggtcagggggaagaggccttcagaggaggggatggaggggagactccggctgggaagctcagggccctcccaggcccctctgtgtttgttcctggcaggtccacagcaca

SEQ ID NO: 41026 - DNA, 1599 bp, Artificial sequence
  DNA replication origin
cagtttccaaaaattccggtacatttggttttaggctttgtctcgggagacagccccatctggtgcttcccacgggtgggagcgggtgcagagacggctctttctggaggggctggttcccagcggcggccccctcaagcgcagtccactcagtcgtcagaggggagccgctcccgggaggcaagggccgcgggaaatggcggagggctgcctcttgtcccatgcagggacgaggcctggcgcggaggctggggacgggagggtcctgccactccctggggggcgcaaggtgggtcacgaacgtcctgtggagccccagccgccccctacgactgccccggccccgagaaccctgggaaagcccaggccgccctgagggccgctcgcaagatggcggccgccagtgcaggcgctgggagagggagggcgccgcggccgccacggtcagcgcgcagccccggggtgcgggcgccggcggggggaggagggagtttgggtgggtggggggccgggaagagccagcgagaggggcagggaggggaacaaaaggtccctttgtggcgctgcgggagaagagggagcgcattacccaatgcccagaagccatgttggtaacaagagaaccattctctgcctcacttggaaaacaacttggagcagagagagacagggagagatttaaccccatgggcgcgggcgcaaggggctcaaggccacggcggaaggtggggaggagcgagggcacactcaacgcctggacgaccaatctctcaacccgtcccatcctgtgcccgggtggctcctgggtccagagcccatcatggccgccaggtcaaaccccagccgccctgtgacccggccagagccatggcttccacctgcctgggcccggcctggtcctttcccccaagctgcttgctccaagctctggggcctggcccaccctaacctcaagaggacgccctctgaatcctcacatcctctggcttcaggtcccaaagctggtcctggttccagggccaccagggctccattggcctcctgatactgacagggagcttgtcccttccatctttgcacagtttgcctttcaggacgtttttcctaaaatttaatcacattttttctttccccaccccagctttctccccttcccccaccttctaccccccaacactggctctcaggctcccagagaggccatctgataataggcaagttgttctaaaagaagctactgttcatgagcacctactgtgcttagggtacttcccacacgctgacttgatgacccttgctacctccggccaacctgcatgaagtgagctgctgtctctctgctgaggctacttattcaaaaagcacctcacacagggccacacataggaggcactccatgaacaaaggataggaagagttgggaggccgaggtgggtggatcacgaggtcaggagatcaagactatcctggccaacgtggtgaaacctcatctctactaaaaatacaaaaattagccaggaatggtggcacgtgcctgtagtcccagctactcaggaggctgaggctggagaatcgcgtgaacccgggaggtggaggttg

SEQ ID NO: 41027 - DNA, 1493 bp, Artificial sequence
  DNA replication origin
ctgagctaggtgctaggaaaacagtaatgaaccagactggcatatggtcaggccatatggtgacaacctttctagaacacaaatctgactcccttgaaatcctacagtgaccaccccactgccctcaggatctagtccccagaccttcccaggccacccttggtcctcaggagctccctgctgacctctgtagccactttgctgactgctcttccccctgctgcctctcccaccacccctgccaggccctctgctccagcccatggcctggggtgcctctccccaccagttttgccattcacatctgctttcctacccttttctcaatttctttttttttttttttttttttttgagacagggtctcactggcccccaggctggggtgccatggtgtgatctcggctcactgcagctttgacctcacaggttcaagtgatcctctggcctcagccttcgaagtagctgggaccactgggaccacaggcatacaccaccatgattagctaattttttaatctttttgtagagacagagtctccctatgttgcccaagctggtctccaactccttggcctcaagtgatcctcccacctcaccctactaaagtgctgggactacaggtgtgagccaccacacctgactccatttctcattttcattgcctgcagaacttttactgtctcttgagactttattcacagtcacctcctccaggaagccttcctttcccaacttcaggttaggcgctcctgggtagcccaggccccctcttgcagcacaggggctcttcactgatttgcctgtcttccttgagggccgccagggtctcgctgaactcaatggccctcgccctgcccctgcccgccaccccgtccagttccgggtgctcgggtttcctctctgggtgtctgtgcgcggctggaatgccaaggttcttcgccagcagtgcctttgcttcctttgcgcctctgtggaggcagggctggtgcaggggtggaaggggtgcctcttgggagcagctgcgtacaacctgccagggctctggctcctgggcctgggtgaactgcccaggtctccatccttcccctcccccgggcaccggctctcacaaggcgggggtggctgccctgggaagagaggatctgccctggagtcaactggatgagcgcccagtcctggctgtggagcctctctgtgcctcagtttcctcatctgaaaatggcatcatcagccgtccccacccaccttgcagggctgtgaggggacgtgggcagggacagtggacagaaattgtgtccccggacggcagactcttcattctctcgctggcttcctgacattcctatctaggacaagttgtgtttcagtttccaaaaattccggtacatttggttttaggctttgtctcgggagacagccccatctggtgcttcccacgggtgggagcgggtgcagagacggctctttctggaggggctggttcccagcgg

SEQ ID NO: 41028 - DNA, 1341 bp, Artificial sequence
  DNA replication origin
agagctgacagcatgtctgctccaggtgtgggcccagaggcccagggaggtgcagccaaagccctgctgcgcctgcacaaagaagcatctgagagcctggggcgggcatggctctcgctgtgtgcactctgaccccttgggatttgttgcctttaaacaatgggttagactaggtgagtgagcataaaatgggtgtcagtgaacgttcgtgagttttacatttaattattctacagtcaaaggaattgagagaaaatgctctattaagcaagccaaggttcctttgctgcaggacttatcagagcctttgctaggctgatgtgcagtgtgaattttcaagggtcttcctaagctcctttaacgacagacccctttttccccagagcatctcttgggccttgagtttggtcaactcggccgcctaagcctcaggccctgtcatccctcagcacctgccgctgcccgctctgggactccctgaacacctgcgccagcctctcctgctgcgtgtgggtgatgggggtggagctggggacctggggtgggggtagtagccactctgacagcctcacctgtcccacacagtcgtactgcctgaaggtgaaggagatggatgacgaggaatacagctgcattgtgagtgttggagggggtggggggcttgtacttccccccacctggtctgccagggatagcaggtggctcaggccaacccgggagagaccggggggacttggctggactctcgttcctggagatttagggccatcttcccagtcccgctcgctgggcctcggggtgctgggcacccggccgggaaccactccctcagtctgggggactcttggagggaaatcggattttcttcactcctatgaggcgcttttaagtgtttgatttttctgctgtcgggatccatttcgtggccagtgttcattgaatgtggcagaggtttgggtttggttttttcctctcttcaaagctatcactgagtgcttctgagaaacactgaagtctcagaaatgaggtctcaggaatgaagaacagccgtggctttgaaagcacagtgcggtgcgaggccgtccctgagcaggcactcctgtcccacccccgccccaggccctaggcgagcccctttaccgggtgagcaccggcaactatgagtaccgcctgatcctgcgctgccgccaggaggcgcgcgcccgcttctcccagatgcgcaaggatgtgctggagaagatggagctgctggaccagaagcacggtgagcgccgccctcctccccgtccgctctccatttcagaggtgggaaaactgaggcccagaggggtactctcaggg

SEQ ID NO: 41029 - DNA, 917 bp, Artificial sequence
  DNA replication origin
tgcggtgcgaggccgtccctgagcaggcactcctgtcccacccccgccccaggccctaggcgagcccctttaccgggtgagcaccggcaactatgagtaccgcctgatcctgcgctgccgccaggaggcgcgcgcccgcttctcccagatgcgcaaggatgtgctggagaagatggagctgctggaccagaagcacggtgagcgccgccctcctccccgtccgctctccatttcagaggtgggaaaactgaggcccagaggggtactctcagggccaggccacggcccagatgtaaagcccctccaggagcccagccatctgcccagagcctggcctgggtggagctggcctgtgcgcgtgggctccgtgggctgccatccatgatccatttaccctgcagcctcctgcgttccctgaactgggagcggggaggccccgggctgggcggcccctgcctccgccccttgccaggtcatgaggggtcagggaagtgcccgagtgggaagcccaggggaggcgagaggtgggccgggtgggctgggagagtctcctccctgaggcaggcagccagagcccactgcagcctgtcccccgacctcccaccccagtccaggacatcgtgttccagctgcagcgcctcgtgtccaccatgtccaagtactacaacgactgctacgcagtgctgcgggatgccgacgtcttccccatcgaggtagacctggcgcacaccacattggcctatggcctcaaccaggaggagttcacagatggggaggaggaggaggaggaggaagacacggcagctggggagccgtccagggatacacgaggggctgctgggcccttggacaagggtggaagctggtgtgactcctgagtgccccgcggctgtggtgccgggggcagggtgcgtggg

SEQ ID NO: 41030 - DNA, 1115 bp, Artificial sequence
  DNA replication origin
ctgtcccccgacctcccaccccagtccaggacatcgtgttccagctgcagcgcctcgtgtccaccatgtccaagtactacaacgactgctacgcagtgctgcgggatgccgacgtcttccccatcgaggtagacctggcgcacaccacattggcctatggcctcaaccaggaggagttcacagatggggaggaggaggaggaggaggaagacacggcagctggggagccgtccagggatacacgaggggctgctgggcccttggacaagggtggaagctggtgtgactcctgagtgccccgcggctgtggtgccgggggcagggtgcgtgggaggacggagcctgggagcggggcggggccgccgcgcaagggggcgacgcataaaggcctgctggcttggggcgcctgcctccctgctcctctgtcctcgcacagcgaacctgggctcctgcccaggacaggcaccagggtcatggcctgggacctggacactggcccctccaccctccctcccctcccggctccccggccagagggagagcttggtctctggacctgccttaggaaggagagggagggcaggaaggaaaagaaaggacttggaggtggcaggagtccgagccctgctccttgtgggcgctcacactgcccccggagcctgctgggagtggggccagccgtggacagctgaggttggggtcaatgcctcctgggcacccttgcctcgccccagaccggcccgtccagtccccatcacacctcggcggcctttatttattctgttcccccagctcggccacttctctgaaggagggctgggttctgggcctgtatcgaataaacacaaacctggatggcgcagtggtcgcagtggcttcagaccctccttgtctgcccctcccctccaccgtctattgacagcgcccttgctatgcaccatttatgcctcactgaagtgttgcagggctagcactgtggtcccctcacagctggtgatttgaggctcagagaaagatcttgcccaaggccacgccctgtgtggggacacagtgggttttaactcagatctgtcctgaaggcctgactttgccacctgcctccaaagctttctgct

SEQ ID NO: 41031 - DNA, 1200 bp, Artificial sequence
  DNA replication origin
cggcctttatttattctgttcccccagctcggccacttctctgaaggagggctgggttctgggcctgtatcgaataaacacaaacctggatggcgcagtggtcgcagtggcttcagaccctccttgtctgcccctcccctccaccgtctattgacagcgcccttgctatgcaccatttatgcctcactgaagtgttgcagggctagcactgtggtcccctcacagctggtgatttgaggctcagagaaagatcttgcccaaggccacgccctgtgtggggacacagtgggttttaactcagatctgtcctgaaggcctgactttgccacctgcctccaaagctttctgctttgtggaaccttttgtatctcaccccccgcccccttcccccgcccccaatctgtgacctttctgtgcttccgacaggaaataaacctctgggggagagaagggcagacatggagccagggcgactgagcccccaagtaggggagggtggtgaggggtaagtgctgactccaggcgcgcctgtgctgcccgggtggtggggaaaggcgtgtggggagaggtgctcgggggctgtgggaagaggggcgtggggagaggccatggggagtgtctgcagagtggcagaaacagggtggccacttctcctgcttctcctggccagcctcggcctggtgtaatcagtcatagtggcccttgtcactctaacgtgttcctgtttggacgatgaatatggccatcctgagaatgcgagggggcaacagggtgtgcgaggtgggctgagtccaggatggaaaaagggtttctgcatcagctttgagcatgcattgctgggcagaaacccaaatgggaggcttggcaggggtgggacatggaggaggggctggctgtcaccaggagcccacctgggtccccgcagagccatcagacagaccacactgcctccctgaagggggcagccagagtggaggccaagagcacaggctggaactgacagcctgggttcgttcctgacctccctgggcctcaatttccctatctgaagtgtggcacctaccttattggcttgttaggagattaaatgaacatctggagagggcttagaacagggcttggcacagagcaagcactcttaaatcttaaataaagtcagacgggccgggagcggtggctcacgcctgtaatcccagcact

SEQ ID NO: 41032 - DNA, 1078 bp, Artificial sequence
  DNA replication origin
aaatgaacatctggagagggcttagaacagggcttggcacagagcaagcactcttaaatcttaaataaagtcagacgggccgggagcggtggctcacgcctgtaatcccagcactttgggaggccaaggcgggcggatcacgaggtcaggagatcgagaccatcctggctaacacggtgaaacctcgtctccactaaaaatacaaaaaattagccaggcgtggtggcgggggcctgtagtcccagctgctggggaggctgagacaggagaatggtgtgaacctgggaggcagagcttgcagtgagccgagattgtgccactgcactccagcctgggcaacagagcgagactccatttcaaaaaaataaataaaaaataataataataaagtcaaacgcagtcactgctctagtggtgcaggggaagccacaggccatataagtagaagccggccaggcatctgtggggctccccagaccttcctggggcctagatggaaaatgagggccagcagggaccagtggggaggggtcactatgggccgggctggaaggtgaggggagtttgcggagggaaggcggcttcctctgcaggggcctgttcaccacgctcatgattcggagggaggcaaagaaaggaggggtgtgatgtatgggaggaggataaatgcatagagggaatacatcgcgtcttgccagattcgtgcacctggatccaagtgcaggaggtcagatgtcaaagtgtgagggagatcgtgggacgctccgtggggagaaggcaggtgctgggatcagcagatgacctggctgccagcacagtgtccacagcaaaagcccctggccctggacacccaagtttatcctctagtgggagagatgccctctgggaaggtgaggggacatggccacctcgtggaaggcagcagggcccatggtgttactgagcgcctggtcccaccctccccaggaccccaggggacggagtcgtatgctcagcctccagtgagcaaggaagtcagcggggctgggattcaaaccgaccctgaccctgggaactgtgagtcttctcagaccgctcg

SEQ ID NO: 41033 - DNA, 1969 bp, Artificial sequence
  DNA replication origin
cggaggctgacggtgcggggctgcagctgcgcgaggcatcccccagggtccggccccgccggcgcctgctggacttggcagtgtgcaccgaccgcgccttcgccgtgtacgccgtcaccaagttcctgatggcgctcgggctcttcgtccccgccatcctgctggtgaactacgccaaggacgcgggcgtgcccgacaccgacgccgccttcctgctgtccatcgtgggcttcgtggacatcgtggcgcgcccggcgtgcggcgccctggcgggcctggcgcgtctgcggccgcacgtcccgtatctgttcagcctggccctgctggccaatgggctcacagacctgagcagcgcacgcgcgcgctcctacggcgccctcgtcgccttctgcgtcgccttcggcctctcctacggcatggtgggcgcgctgcagttcgaggtgctcatggcggctgtgggcgcgccccgcttccccagtgcgctgggcctggtgttgctcgtggaggccgcggctgtgctcatcggaccgccctctgccggtgcgccccgaaggaagagggggtggcgagcctagtgccccttagacccagggaagctccatccccctgtctcagatggaacttccagggatgaggggaaggggcagtcgggtgggtggactccccttcacggccagttagtccctcctccaagccggaccgcccgctctgggtgaggacagaaaagcccaggaaggtgcagggaagaaagcaacactggtagctggccagatctgccatcccaagcagttggcacaaggccatctggagcgcaggtgcttattctcattttgcagatgaggaaactgaggcacaaagccttagcgcaagttgcagccccagaatgagagcctcagtgtacctgctgctaaatgcccacgcctttagaatggtgcatctagaatggtgactggaatggggacagtatctttgggaaactggtgttggggccagaaacagagtgggggtgctcagcgggcagatggggagaagcactggtgtctttcactgtgcagatggcctgctggcacttgtcaccgtcacccttaggaagtcatcgtcatgagggtggtcagggaaggcttcctggaatatcccccaggtgaaggcacagcatggatgggcagggcttgttgggggggaacagcgtccttatgcaagcaaggcaggaaccaaaattggaaaggtgggagtgggggacatgagggttttcctgggttgtcaagttatcttgaaacagcaagggagcctgcctttgagtcccagaggctagagggctgtgagatggtgcagtaaccagggaggacaccttgcgggggccgcaggctgcactgagatggggtgagctgctcgtccttccttcagggctgggctaatcgagtgccctcactgagctctgtcatcccacctgacccagtgagaacggcaaagtccctgagccagtgtgtgggcaggccacaaaaccagcctgcccaggcctcaaggaaccgtcttccatttcttgtgtgaatctggatggatctgatgggcagaggaggtgcatggggtgaggagaatgacctagagagagggtggagcacacagacaaaccacactttagggggaaatacttgcaattaagagattttcctggtcgggtgtagtggctcatgcatgtaatcccagcgctttggggggctgaggccagaagtctgaaaccagccggggcaacatggcaaaaccctgtctctaccaaaacaaaacaaaacaaaattagctaggtgtggtggcgtgcacctctggttccagctactcaggaggctgaagtgggaggatggcttgagcccaggaggtggaggttgcagtgagccaagatggcaccactacattccagcctgggccaatggagtgagaccctgtctcaaaagaataagaaaattcctgaagccag

SEQ ID NO: 41034 - DNA, 1278 bp, Artificial sequence
  DNA replication origin
ccccttttggttcccagacctgagccaccctcacgtgggtagccctgtgcctcagtttccccatgcttcgtctccatccccctccttctctaggctgctggcccagcccctccctcttgtccccgccccctcccaacagaggcagcgatgggcgctggcggcccccggcggggcgagggccccccagacggcggctggggctgggtggtgctgggcgcctgctttgtggtcaccggcttcgcctacggcttccccaaagccgtgagcgtcttcttccgcgcgctcatgcgcgacttcgacgccggctacagcgacacggcctgggtgtcctccatcatgctagccatgctctacggcacgggtcagtgtccccgcccggccctccgcctccccgggacccctgggatccggaaccaggagacacccgagcccctgagcatccccctgaccctcggggtggcccccgaagtcccttcctgcctgtgggaaccctggcaccagaaagaggggaagagagggcgggagggagacagcggccagaggcggggccggcccagggggctgccctgcgagctcagagggccccttctaagaccacacccgcccattgtagaggcaggaaagctgagagccacagaagcactccccctccccgcagccctgacctgtaggtgggggcttgctggagttcccatcctgggaggcggggctgcggaggaatcccagtctgtgccagggcgggacttggaggctgtgaaggttaaaggggtgcggaagcccccgctccgcttggggtttgggttcgcaggatggggtgctctgggccttgccctcgcaggatgctgtctctttggcctgtcccctccaagctgtgtgaccttggccagacactgccctcctctctgtgtccctgagccggaggtgaccttattccttagaggactcaagccatcccgggacccgggtggtgaccctgccctgcccacaggccccgtgtccagcatcctcgtgacccgctttggctgtcgcccggtgatgctggcgggtgggctgctggcttccgcgggcatgatcctagcttcctttgccacgcgcctcctggagctctacctgaccgctggggtgctcacaggtgagggccccctggtctcctctccgctgggttgggggtcgggggttcttgctgcaagatctgtcctcggtttccctatgagggacagtcttcgaagtccctcggctgggttcccggatctgctgggttcccgggcctggcccctc

SEQ ID NO: 41035 - DNA, 1332 bp, Artificial sequence
  DNA replication origin
agctttcctgcctctacaatgggcgggtgtggtcttagaaggggccctctgagctcgcagggcagccccctgggccggccccgcctctggccgctgtctccctcccgccctctcttcccctctttctggtgccagggttcccacaggcaggaagggacttcgggggccaccccgagggtcagggggatgctcaggggctcgggtgtctcctggttccggatcccaggggtcccggggaggcggagggccgggcggggacactgacccgtgccgtagagcatggctagcatgatggaggacacccaggccgtgtcgctgtagccggcgtcgaagtcgcgcatgagcgcgcggaagaagacgctcacggctttggggaagccgtaggcgaagccggtgaccacaaagcaggcgcccagcaccacccagccccagccgccgtctggggggccctcgccccgccgggggccgccagcgcccatcgctgcctctgttgggagggggcggggacaagagggaggggctgggccagcagcctagagaaggagggggatggagacgaagcatggggaaactgaggcacagggctacccacgtgagggtggctcaggtctgggaaccaaaaggggaaacggaggtaggactctcaccccaagtctccttctcctgcaaagggcgctgaaggacgaggggaggacgacgggtcccacctgactctgcacctctgcaggctccctctgaaggacaactgctggcccctcagggcctcaggtggaaggcgtcgggaagtggagcaggtatgtgcctggaggtgggcgtccagcaccaaagtcgccccgtacgcgtgagggtctcgggacaacagaacaaacagcagaggggcagatgccggctgcaaagggccgctgtgcgtgattttcctctttagccttccgccatgttcctaatgtttctcagtgatcacaaatgactattgtcattagaacattaaggggacaaaagccactttcaacagatatcagccaggggagctgagttcccatgcatctcagctcagccatggattccctccctgacttgggccggtcgcctcccctctcccaacctccctttcctccgatgtaagatgggtgattgatcaccccgaggccagctgggaatcttgcgggagaggagtcaggtctctggcttctgccagacaggtaggaaccttagcagcactgagagagtggccttctgccctccaaacctcaaaccctctatatgaaaagaatggctccaaagcctgtctcattcctggggctccacccggggccctcacagcagttacaagcg

SEQ ID NO: 41036 - DNA, 2142 bp, Artificial sequence
  DNA replication origin
cgcctgggactgggggtgggggctggactagggcgcggccccgcccccccccccccccgccccaccctcccctgcccatctcccccgcagcccccgaggcccctgggagagttcagctccccccgcagccggcacggctccggctcctacggcaccgagcccgacgcgaggcccgcgtcccagctagagccagaccgtcgctccctgccccgcacgccgtcggcctgtgagtgcccccgccccggggcggcaggagggccgggagaggcgcgggggtggggctgcagcaggagggatcgagggcagacgccaggaagaacttcctgcccacgtgccgccgcgctctcccgcccacagcctcgctctacagcggcagcgcccaaagctcgcgctccaactcctttggcgagcgcccgggcggcggcgggggcgccaggagagtccgcgccctggtctcccactcggagggcgccaaccacacgctgctgcgcttctccgctggggacgtggtggaggtgttggtgcccgaggcccagaacggctggctctacggcaagctggagggctcgtccgcgtgagtgggagccttggaggggccgggggtgggttgagaagaaggccctgggggccgggaacccggggacctgccggactgaggtttccctggcctcccccgggggcctcggacaatgctcctctcctcccgacccccgcaccctgcctcagtttcctcattcattcagtgggagtaggaagagccgccttaccaagttcaggatgacggtccttgagagcgggcagaggatgggggatgggcaggttcttccaaaagtgtggaaatggcagaaatcctattgcttgagcacctactgtgtgcctgcctctgggaggaggctgcttcccctctgcagagtcagccctggaactctgatgcagggggctgggctgggagtaggggcttaaatgtgctcacctctttgcggtcaggctccgtggaaatcctgaaagcacttaaactgggctgttttgacacttgacgtggaggaggatttggggagtttcatacagtgaggttgccagaaagtgcggaggacagcagggctggcagctagcagagggaatggacaggcaccactgtcctgcaggggaaaacggggcagatggggctggctggagccaggcagtgccccctcggggcttcatgggcagggtagtgtacggtgcccactcctgctgcaggagagaagcagcgcaggatgaatgcgtgcatgggcagagcgggtggtggctgcccacaccagcccacggatggatgagtggtcctgtgcttaatggatggtggacaggcgaatgggtggaccaggggatgtgcgtctgggtaggtggaggtctgtgtgtgcaagtggatggccttaaatggcggggggggggtcactgactgggtggttagggacatgggaggatgcgcagatgtggtggacagacactgatgggtgattggagaggtgtgagtggtgagggggtgctggatggattcgtggctacacgggggatggagtatagacaggtgagtgggggataggtgatgtatggagggactcatagttaggcgcgaaggtccatagctgggcgggtgaccacagggacaggaacggaagggggtcagtggggagagagatgactgagaacgccaacgatagggacacctgctgctggagtggctgcttcacagacccacagcagaggacggtgtgctgcagatgccttggggacctgaggatagaaccttctagatggaggctgtcacaccctcctgggatgttctgggaccatcgttccatccttgactcacatagcctgttagggaaaaggatagcgtgtgttattatcagtaggcacttgcaggtgaaaacagaagtaaacatacggaattgattgtagtctgtcaattcgaggtgaagtagcttccagtgaccctgaggggaggatgtcttcttttggtcattgtccccaggcctggcttcttttggtcattgtcctctgcctctaccccacaggagcggttggttccccgaggcgtacgtgaaggctctggaggaggggcccgtgaatcccatgacccccgtgacccccatgacctcc

SEQ ID NO: 41037 - DNA, 939 bp, Artificial sequence
  DNA replication origin
gacgcgggcctcgcgtcgggctcggtgccgtaggagccggagccgtgccggctgcggggggagctgaactctcccaggggcctcgggggctgcgggggagatgggcaggggagggtggggcgggggggggggggggcggggccgcgccctagtccagcccccacccccagtcccaggcgtcggcgtaggggttctgggggcggagaccgggccaccacgggggcgcggagaacgcgccggggcggaagggcaggccgggggatgcagcgtagagcgggagcctggggggcaggaggctccaggctgggggcctgaggccccgggcccccgcggggggcggcgggggcgcgaacggcggcgggggcgcccagggcctcaccatgtccaggcaggtgggcgtcaggcggcccgaggggtagggcggccccagcgcggggcccagcaggccgggggagtgggcgcgcgacgggctgcggctggcctcagactgctccttccacagcagcacgcggttctggagcatcccccgggcctggccgggcggggacacgggggtcagccaggtccgggcggctccctgaatcctggggacccaaaatgacaccctcgacctgagagctcaggccctaccagctcgggacgaccggattttctagctggaaggagccagaagccagctcaccgtccaacccgcaccctctacttttggcaaaggcacctccattttccacgaagagcttcctctgaccccccgcttcccgcgtcaatgtgtgtgctttgagcggggctgtcctcaccgcccagcttcaggggtaggggtggcacccaggcctggccactcaatcaccccatcctccttcctgcagcgataggctcaggaatggcgcttagatagaaactacgaccaaagaacccagtcccattacttacttacccagt

SEQ ID NO: 41038 - DNA, 1421 bp, Artificial sequence
  DNA replication origin
tgtgtggcagcctgccccgcccacccaccaccctcttccgctgaaagccaacagagggcctgcccgagactggattttgggaccaaagtccgggaacttcccatatggttctctgggagccaggccatgtgtgtcccagcctgggagcagcccggcagggagtggtggcggggagcctgggccccagaacaagagtctggctctgggccctgggctgaaaggcctgtgtcagggactcgggacatcctggaagggcaagggtgcaaaaggagggcccaagaatggggtctgctgtggagggggagcctcacccagaatctgtgaggtggggctctgcagggcacgctccccaatcttctggatggcactgaagtagacctcggccgcctcggacagagctgtggaccagaagggacaggtctggtccagccctgcctctgccccacccttctggaggctcttttcatctggaggggactgtgtctgtcctgggtggggtgtgggcatctgtgtgtgcccctgaggagggtgtgaccagttgagctgtgaaactcaggtgcaggggcataaggtgagggctgggggcagggaggtggcgtggaaagcatctaagaagcagggggatgggaggccctgaggttcagggttgatcagcactggtgggtagtggggtgctattggcaggtatgagcggccacagcggacgggtacaagggtttgcacggggaccgagtgaatgtcaaggccagctgcagggtgtgtgggtggtggccagttgaagtgaggaagccagctgctgtgtgagcctgggtgcagaggtgggactgagtataggggtgggttcagctggtggcatccaggtgacgcctagaaatgtatgcactgtcaggggctgccctggggctgtgtgggcctgcagggcctggtactgcatcatgggagtgtctggaggcacctgaaggagggggcaatgaggggtgctgggtgtggactggggtgcgtgggcacaggagagtgggggtgcataaggcctctctggctgcagaggtgtgagggtgagggtggtgggtaggagggtgtagggttgaggatgaacaggtgtgggatgcagagaatctgggaggggcctgggtgggtgggaacagcagaggcccagggctggggctcggtggcccgggcaggcactcaccgtggaaggcacgcaggtagttgttgcccaggtacaccaggttctccagggcggggttaaactgctccatgatgctctggaccccagggtcaggggaggaaaaaggtgtagagatgggggagcgagaaggaaccacggatggagtcaagtcaccaggcgtcagggacagggcacccccagcccagtgagaagccccagactttggggggcccatctacaaacctaggctcac

SEQ ID NO: 41039 - DNA, 873 bp, Artificial sequence
  DNA replication origin
acttttcctttgtacccggacactctgttttccaggatccctgggcagggacacctcctctttcctctaggcctcccctaaaccggcccttagggtatgcagaggcagctgccaggcccacatacccccggcaggcccaaggagggccacaatcttcaacttcatcttggaggaccagggagagccccatttgtcacccagagaggccggggactccgcgtggacaggcagcgcgtgtgcagggccgaggtctgcccagggctgggcaactccagcgtttgtgctgctcctgctccggcaagtggaggagctgggcgggccagagcggctgtgggagccaagctcagagggcgtggccccactgtgagccgcaggcctgaggacagtgagaagtaaagcggcgttcccctccaggggctgctgctgctgggtctggcagagagagtcctgggggagggcatcgggcagcgcccgcccagtaaggtgggcaatgcctggtataggcaggtgggagggcggggccccccagggttggggtccttgaggagggggtgacccaggagggggctcatccacatgggcacttgtatcagcccacagctccaaggggtgaataattgaagggcaggtcacacgagcctgcccggcacaggatgccttccctgccggatctggttacgccccagatcacattctgacatcccgagttggtgaataattaagctgccactcctctgaggcaggcctccatctccaggtccctctccgaggcttcctcgctgccagctgagtcgtgggcacctgagggactacctaccactgctcccggctgtgccatcgccaccagctcccagcctcctgctcagacccggg

SEQ ID NO: 41040 - DNA, 1107 bp, Artificial sequence
  DNA replication origin
atggggtgggcgggatccttcttgcagctggtgtatgtgtggtcctgttggtacacagatgctgtcctgagcagatggcatgtgatgcccgcaccagccgttctggggtcacgtgcaagaggctggctggaaatcatgccaggcatgctcttgccaccagagacctcttgccctgttctcatgtgccccagagcccagtcttgggcctccccttgacgctccccttcgtgccccctacctgtggaaggtctcttctgactgcccctgtcctgttcccaacagggtcaggccaacaaggtgaagaaactctccatcgttgtctccctggggacagggaggtccccacaagtgcctgtgacctgtgtggatgtcttccgtcccagcaacccctgggagctggccaagactgtttttggggccaaggaactgggcaagatggtggtggactgtgtgagtgtgggcccctcccccaggccacttccctcagggtctgtagcccaggtcgatggcttcccctcatcctgtggggcctttggtgttggaggagacagcagggctctgtccatcgcctttagccagctggagggagagagagtccacagttcagagtctcagtgcggggcagggaccctcagtgaccaccagcaggggggttttcaaacgctttttagctgcggatccctttctgcaaacatagcgcagtgtagaagcccagaatggacaaaggctccagagcgggctgggcgctcaccctgtaatcccagcactttgggaggccaaggcaggcggaccacttgagcacagcagtttgagaccagcctgagcaatataatgagactttgtctctaccaaaaaattaaaaactagctggacatggtggtgtgtgcctgtggtcccagctactcaggaggctgaggtgggaggattgcttaagcccaagaggcagaggctgcagtgagctgtgatcatgccactgcactccagcctgagcaacagaaggagaccttgtctcaaaaagaaagaaagaaagagagagagagagagagaggagggagggagggaaacttcagggagaggggacatggaggcctgtcgactcagccgcta

SEQ ID NO: 41041 - DNA, 927 bp, Artificial sequence
  DNA replication origin
ggagggtgcggagcccacacggcagctgtgcatgatgatgctaattacatggcttctgacttgctgagtgggacatcagggcttgtgccctccacaggagggaagtgggctcctcaggaggtgaccctgagctgtgaggcagcagccaagtgtgttcccatcccaagggcaaaagccaggcctggtcaggaagggcaggatttccctactctggggggacctcagcccagctcaggggttcacaggacagactgcgggctgaggagaagctggttctcaggaacagggaaccagggagcttcacaaggaagctggcttaaacctgagtcctgaaggatggtgaaggatggagaagggtggagagggatggagaggaatggatagggataatgagggatggagagggatggtgggggatggtgggggatggagagggatggagagggatggtgggggatggtgggggatggtgggggatggagagggatggtgagggatggtgagggatggtgagggatggtgggggatggagagggatggtgagggatggtgagggatggtgagggatggtgggggatggagagggatggagagggatggtgggggatggttagggatggtgagggatggtgaaggatggcgaaggacatgaggatttggagaggctgagcaggggtatttcaggcaaagatgcagggtgtgtgccaagcctctcacgatgggggaatctaatgtggagttcttgagggtcagagtgtgcaagctcttaatccctttgtcccttctcttgtgcttctcgtcctcatttatgttttgtcagccattaattatgaaatacctgctatgtgcatgaccttactctttttcttttcttttcttctttttgactcaaagtctcgctttgttgccaggctggagtgcagtggc

SEQ ID NO: 41042 - DNA, 1421 bp, Artificial sequence
  DNA replication origin
ggggatgacttgaggtttgcccacaaagggaagaaaaaacaagggtgggtgttagggtgagggtggagtgaaaggtggggttcaggggtggctgctagagatgacagccacttggagacatttcagtcccatctccagtgtggtggcaggtgcctgtagccccaactacttagaaggctgaggcaggagaatcacttgaacccaggaggcagaggttacagtgagctgagatcttgccactgcactccagcctgggcaacggggcgagactgtctcagtaaaaaaaaaaaaaaaaaatccagacgaccccagtacctactgttattattgtttatgaatctcgttgatgtgcctaagagctgtcatctcccaaaattctatgaagtatctgtatcacccccactttatagatgaggaaaccgaggctaggagggctgaagccatttgcttcagagggaggggatggggactggggtgtgggcatggggattctggaaggaggagaggtaggtttagggcaagacaaaggacagcctctgaagggactgggagggagagggaagggcaggtgcagagggtcgaggcagtgcctatcacatggcctctgcttcctctggaagtggcaggagagcaggttcgatggagatgaggatgaaggcctgcggatgaaggagaaaggcgagtactccagggattcctggcagctctgaggatctggctgtgactggagaagatgaccttgtcgtgaccgcagctgttgttgcagtggtggttgtggtcgcgatggtggcttctctccagaagccagagcagctggcatgcaggagtgaagtgcacggagcagcagtgccccagcgatggttttacaggcttggcacaaaaggactcagaccagggctggcacatctccaggtatattgaagctgctgggggtggggaggggggggaggttttagagggaaaatgatggagggctggggaaaaatggagcatgtgcagtactgtttcaggttcctaaaatatcagtttgcaaacataaaaatgtattctctaaaataggcaaagcacacgaacaaaagaagaaaaaacccaactggttaacaagcaaatgggaatgtgttcaagctcattcctattcagagaaatgcaaatttaaatacaataacgtcatttgcctaggaaattagcagagcttagacaatgaaaactcccagtgttggtgaagtggagacgaaaggttcatattcacatgtgggtgggaagggcccttagcaaatggcttcagccctcctagcctcggtttcctcatctataaagtggggatgatacagatacttcatagaattttgtgagatgacagctcttaggcacataaatgtgattcataagcaataatacgcctgtagtcccagctacttggg

SEQ ID NO: 41043 - DNA, 1221 bp, Artificial sequence
  DNA replication origin
aggcctgccttcataaaacatacattctggttggggaagacagacaataaccagcactcacatacataaatgatgaaacaccctacagaagtattaagataatataagaacaaatttcaaggctgggtgcggtggcttgcgcctgtaatcccattactttgggaggccagcgtgggtggattgcctgagtccaggagtttgagaccagtttgggcaacatggcaaaaccctgtctctacaaaaaaaaaaaaaaaaaaaaaaaaaaaaaaatacaaaaaatgaacctagcatggtggtgtgtgcttatggtcccagctacttgggaggctaaggtgggagaatggctggagtccaggagaaggaggttgcagtgagccgagattgtgccactgcactccagcctgggtgacagagtgagaccctgtctcgaaaaaaaaaaaaaaattcagaggtgaagactgctttaaccagggtggtcaggaaatgtctctctgaggcagtgacatccgggctgacgtgaaagatgagaaagagtcaggcaagtgaacagaagaccagacagccagtgccaagggcctgtcgcaggaatgagcttggtatgtttgggggacagaaagaagggcactgtggccgaagagcagtggatgaggagagagtggccaaagaaggtgtgtaaacaacctgagctttgttttgagaagaacattggctggtatagaaagaaagactttggaggcaaagtagggagcctcggaggctgctgccattgtccgggtaagctgatggtgccgagaccaggtgccatgactggaggtggtgagaaatggtcctatgcaggagacctggagacaccgctagcttgagtcctgaggtggggaggaagggagagggagggatggagccaggctccaaggttttggcttgagcagctgagatggggtggcaagggagcagaggtagggctgacgatcaggagcgggtttttgggccgagtcctctgcagtgcccatctgacacccactggatgcgcagagtgggcagctggctatgagtctggaactcagagaagctgttcgctccggaaatacaaacctggggctcatagccatataaatgtcatttaaagccacgggactggatgagatcattaaggcagaaggtctaggtcgaaagaagagggccaggaccactacctgtaaaatgagccaatgacacctacac

SEQ ID NO: 41044 - DNA, 2604 bp, Artificial sequence
  DNA replication origin
cagagcgacctgcggctcagagcggaggggagactgaccggagcgcggatcgggacagcggccgggacagcggcgagacgcgcgtgtgtgagcgcgccggaccaagcgggcccagaagcgggtgaggaacgcgggaccaggaggacggtgcgcgggaccccaaggcggcagggtttctgcgtcccgggatgcgcctggggtgggcgcccgggcccgatccgtcggggctcccggagctccatcgcccggacggctcggggcggggagaagggagcggccgtcccggggacgccgaggacggggccgaggccagctcgggggagtgggggtggagacggggccccttcccggggcgcgggcgggtaggcggcggcgccgggaggaaggggcagcgcaggccggcgatctccgcgtccgcccggcgggggcgggggcgctgtgctcctacgtgactcggtgggaacaggccctggcccggcgcccgcgggcggtgcgtgcgcggtttgtttacgtccgagggcgggcgtgtgttccctggcgggcggcctgggtatcctgcccggtgcgtgcgtgcgctgtgtacctcgggggcgtgtgtgcgtgtgttgtgcttgtgtgtgcgtgtccgcgcgcgcgctccctggggcctgtacaccagcagtgtgtacctcggagagggcgtgccctgggccggccaccggagtaaacgcggaacaaggacccgagcgaaggaagcggacccgtgcgtcttcgcacggggtctgggaattctggcccgggccgccccagtcctactacccggggctgtccgtccccggctctccccggagtttcccagggcctccgccacgtgaccccagtgtttgtctcccgcccagagcccgcgcccgcagccacagggtggggcaaggtatcaaagaccccacccagctgagctaggagtgagggatgtgagccacccccgcttggcaccccggtggatctggtaacaaagtgagttggagcccaggttcttgtccccagattttggggcttcctggggagggaagaaccaagggactctcgttcgtccccagggttgcccatcccctcagtcccatgagaacaggaagggccagaaaaccttgactgcaagggtgcggcgcagggagaggaccacaggcttttagctagtccgggttctggaggctgtacctgctaggtcgtggaggatggggcggagccggtttccgctctcctggtagtttcagttcacaagtgggactggtgagactagactgacctacagctggacgccggaagctagctgaggctctgagccagccgacagaccccgagtgccctcaccctgggccaggcagggtcagtaggcattggggatagaactctgactgcacggagggttaatgagtgaggggtggggcctgacctagccgccacccacccactcacccaatagccctgcagaaagcacctgtttgtcgtagccgcctgcaggatgggctgggggctagagattccttggtcttaatccaccttccccctccacccacccacccacggtctatggaattgtgggaggggagcaattgaacttgctagggtgaggaaccaatgatcttttgactttggatctttgaaccctgggtgagctctgctacagcagcccggaccctcagtattcccatctaccactgggaactaggtaacagccaggatggcaggatggtgggtagaagggggaagctctggaagtctgtgcagacagcgtattttccaggtgaattgtggaagagaaagcagggctgacagccccatgccaggagctgggggtacccaagagtaggtggggtttgagtcaggagggttggggccaggagcacaggaaccagacaggcccaccctcaaagctgggcaggaaacattacaaagtagggcctggggtcaggggatgaggggaagtggctggttgactcagtcccagatggaaagttagcactgagaagtttaacttcccattgaatcacccctgggccctgcattgccattgggcccttgtcctggaccagatgccagggatgagatgaacagaccagatccagagactgccctctgggagcttatagctcagcagcggacacaaacttgaaaaaagatccacagaagtaaatgcaaaacacagcttagatgggtgatgtgagggagaagtcactgtggtttgaaagtacataacagcgctctgacttagccagggcaatcaaggaaggcttccctggggaggtgactagtgtgctgagtctgatagagtggtggttgtctgtgaagcccttgaaggcaggagctgtgattcacttcagggtctccagggcccagcacagagcctggaacatagtaggtgcttcttggatgtttgctgattgaatgaatgagccctggatccctgccctctaagagctccacaacacatggagaaaaaggcctgggaaccccagagaaacaggaagccagggcaggggctgggggaatcttgaagcagtctcccaaaagcgagcaaatccttcaggactcaggcaacttcctccctcacacacacaggcatgcact

SEQ ID NO: 41045 - DNA, 1544 bp, Artificial sequence
  DNA replication origin
gtccagcactttgggaggctgaggcgggtggatcacctgaggtcagtagttcaaaaccagcctggccaacatggcgaaaccctgtctctaaaaataaaaataaactaaaaatacaaaaaattagctgggcgtggtgacaggcacctgtaatcccagctacttgggaggctgaggcaggagaatcccttgaacacgggaggcggaggttgcagtgagccaagatcgcgcccctgcactccagcctgggtgacagagtgagactctgtctcaaaaaaaaaaaaaaaaaaaaaaaaagaaagaaagaaaaagagaaagaaaagttctgaaaaatcaaatcaaaggcacatgtccaagccccatgtggaagaatggtcaggagaggcacatctattcatttggtgcacacttactgagccatctactatataccaggcactgatttaggcatattgatgccgtggtgagacagggaaggcctctgccttcattggcttccgttttggtggaggaggagtgggaaggagaaacaaatcatagatgaggaaccaagcatgagaaatgcagaagaggtgactgttacaagggttaataggcggggttatgtgatgtgacacagaggcgtttagccagaatggtcaaagaggacctcctgaggaggtgacattgggcaaagacctaaatgatgaggagtcaccatggggctagaacagtaaagagcacagcctgtgcacagctcccgcggctggaaggagccattcaaggaggcctgtggaccaatgtggagagaggaaggtggcaggtatgaatcagttctaagatagcagaggccttgaatggcaaggtagtgagtttggattttattctaaatgggaaaccaaaaacaaaacagtgactttgacctcctttctaccctaggtctgcagcccagagggcaccttctgcaaacatgtctgtggatcccctatccagcaaagctctaaaggtgaggaggcagcctctgtcaacccagtgaagccctccctccctgcccatgcagagcctcctcatcccaacttccccttctttcctggaatcccctgggtggctcagcaggcaccaggccttcatgatgccaaagggaagggccacagccatgggctgggaccaggaggcctgggctctggtcacaggctgcatgtccctggggtaggtcacttccctctccaggcctccttccccatcgggtcaatgtcccctggggcattcaaaggtgctttccgacctgggtttctctggctgagtccagggcttggcgctaggttagaattcaggctgagccccggggtggcctccttttgtgtcccgatcctagtctggcccggtttccccttcccggattcctgctccccttcggggttttggatcaagtccacccaccacctcggcggctaaggcggtgaaagaggaacaccgcgggtggagcgggggggcccgtccccagtcccctggacctcagtttcctcatgcccgcagatcaagcgagagctgagcgagaacacgccgca

SEQ ID NO: 41046 - DNA, 1687 bp, Artificial sequence
  DNA replication origin
tggacctcagtttcctcatgcccgcagatcaagcgagagctgagcgagaacacgccgcacctgtcggacgaggcgctgatggggctgtcggtgcgcgagctgaaccggcatctgcgcgggctctccgccgaggaggtgacacggctcaagcagcggcgccgcacactcaaaaaccgtggctacgccgccagctgccgcgtgaagcgcgtgtgccagaaggaggagctgcagaagcagaagtcggagctggagcgcgaggtggacaagctggcgcgcgagaacgccgccatgcgcctggagctcgacgcgctgcgcggcaagtgcgaggcgctgcagggcttcgcgcgctccgtggccgccgcccgcgggcccgccacgctcgtggcgccggccagcgtcatcaccatcgtcaagtccaccccgggctcggggtctggccccgcccacggcccggaccccgcccacggcccggcctcctgctcctagtgcccgcccccgccatgcctcagccacgcccctccggcctcagctccctccccaaagtgcctgagcgccgcctctgtgcccaggtcccatttctctgcagcactggccccttggtgcacacacattcccttcgtgggccctgtcttcctcttgcagccccccaaactgggaccgaatgaccctgggaaggggaacttgggtaggttggggatggggcagaggtctggatctgggatcgcccttggctgaaagtttagcctttttagattgagagatacagagccggcttagagaacagctgttgggggagaagagggcacccctcatcttggaaactgctcttattgtgccaatatgccctccaaaccctcccaggattcaaagctaggtttggctgtctgtgacttacgggaccgtcctgctgagaaattgcactgaagagatgcccccacctctggttgggcctgggggtgcctggccttccgaaactaaaagagtgggtgggaagactagtgaaacccagttcacggatggggaaacaggcctgaggtcacatttcacttagtggttgtgttgggaccaaaacctgggtgtcctcactgctgccctgagtccagccatggttttcagggggacagtggacagggactcagaaatgtggtgggagggcctccctggcttgggagaccgctctctgcaagggagggggagagaagcagagggagagagaaggtgacacggatggaagagtgggaaggagctggcctggctcagccctaggctgtccctgcagccagggtgtccgggggctggccagtcagagaaagggggccatggactgctgtggcaaatagggagacaaggagacagaccctgcagtcctactacagtctggagtggggtcctaagaagaagggtcccacctcaacccctgtcagtgtccactgtggggtgggggctgacccctgcctttgattgtcattctcctgggaagcccagtctcagtccctcccccaacactgtccacactgcccctccccactgtttatttattgcacggatctaagttattctccccagccagagcccgagctcctgctccctgggaaaagtggcgtatggccctgagctgggctttatattttatatctgcaaataaatcacattttatcttatatttagggaaagccggagagcaaca

SEQ ID NO: 41047 - DNA, 876 bp, Artificial sequence
  DNA replication origin
ggaaagggggagaaatggcgaagaacgcacacaggccctcggaggaggcctcagcagtaaagtggttttactggctccagggtataaagatgttcaggcccaccaggaagctcccgaatttctgttgtgtgtccacggttcccagtgctgcctgtatagtcccaaacagagccgctgtccccagggggcctgcattctaggtggggtggggggaacagttaataaatacatgagtgaatcgagttagtcgggtggtgtcgatgtaatgagtgctctggaggaaaagaaaggaaagcagggagtcaggcatgcccagcctgggagaggctgacatgttttcatggtggtcaaggtagagacctaaaggaagggtgggagggaggtatttgactgagcagagacagccagtgcaaaggccctgtggcagaagcaggcttaatatgttcaaggaacagcaaagaggccagcgtggctgcagctgaggatggaagtgggaactgtaggagctgagatcatagaggacaggaggtcccatcgagtccttgggtacggactatggtttttactctaggggagctgggagctattggagagttttgagcagtggcggcctggtctggctaatccttggaagactcacaaacatgctgagtggggactggtcattagaggcaggggcagaagcagagaaactggtcaggggcctgttgcatcaatccaggggagaggctggctgggacagggtgatggttggggtcaatacagacatggtcaggaggtgggtggagagacctggaagattctttccaatgctgccacttgccctgggaggagactcacattgcaatttcttctctctaggctagcttgtcactt

SEQ ID NO: 41048 - DNA, 2347 bp, Artificial sequence
  DNA replication origin
ttgtgagtggcaagagaacccgggtcgcgccccaacccgcggggcggcgggctggggttcggggcggcgggctggggttcggggcgcggcccctttaaggcccaggcagtgatctcagccgcgtccgccgccccgccctccccggcggcgagcccagagcgcatgcgcgccgcggctgcactccactgggcccgggacgcgccggcggcggcggagactccggggctgcggcgccgcccgccccgcccgcagagtccggctgccgcgcatcgtccgcagacgccgccaccgccatgggctcctgaggtatcccgcctggccggcctcgcccgggagccccaagggggagctgcgactcccgagcgcggggggctgcttgtttcggagaggcccgcgcgagggacgcccggcttcggccgccggctcccgggcggggagggcactacggaggccggtgcggccgcggagggagggggcatccgtctccccacccgtgcctcctctccgccccgcgaggtcgcccgtgggtgtgcccgctccctttccacgccaacgtggcgggggcagctcctggagtgtaatcggacctgtccggggggcggccccgggagagggaggcggatggaccaaggcgctttgcaagagggattgtgtgctcccgggtgggtgtgctggcgactggcacggccgagtgagtgggggaggcgtccgtgccctgtgcgggtggcagtgacctgggagggtggtcggcggggggctttcggggctgcgtcgtgagtggagggtgtacacgcccgccacacaggtccgcaggtttggaaggggatcgactgggacctggggctcgaaagatgtttgcccccaaagggaccgtggagactggttttgggtgtctgtatccttcccgtgaattgtacatttcctcctgggcacacccttggtacctcgcttggatccacttacctccagtgctgggtggctccaggccaaggcaaggcagttatgctgggggttgggcatggattcccaatacatatcccctctggaggtgttgtataaggccagacgttttactcctccctcctttccagggcattttggggcaaagcaggtatttgcatgcctgatacctgtggtgaggtgaaggccatgtattatttatctgactgctggtgcttttgtaaggaaagaagcagcaatctgtgccctggaggccctgcgctgcagagtcagccaggcaaacaagctcacctgcacctgcagaggcagcgcaggtctcagaggtgtgacttcgttgacaggttatgcctacagtgtccctttccatctacctatttagcttccttggtagaacccctaggctctgcacctctgaaccttgcctagggtgctgtgcgtatcagagttgggacctgggacgctggggtgggagagccccagcagccaggtatgtgtgcccacctggacagaaacatttgatgcccaagccatcaaggagctctcaagcatgggggaatcagatttggaaacaggtgatcacgatgatgtgaaaaataccaaacaaaggagtagaaggagtacagaggcaggttcagttcccggggagggggatcgtggccgcaggaaagactccctcataaggagacggttgagctgaagcctgaaggatgactgacgttcatctgaggcttttctgctttccacatatattttcctgtgtaatttgcacagcagctgtgtgagtaaggaacagttgtccctatttgcagatgcggtaaactgaggcccagagggaattcatgacgttcttctccacgatacgtggcaagcctggatggaatcatcctttaaccaggacctctctcttgctgccagatcttgtcttgcaacttactgagcatctactatgtgccaggcactatgctggggcatagcggtctgatgatcaatgggacctggtgcctgccttctaggggctcccagtgctgggaagatggacactgatttagtgaccccaatctggatacgaggctccaatagctaatgtgggtggagaaggcgctgtgaattcccccaaagcatttgtgcagtcgttgggattctggatgtcttatttgttgcacccacggtggtggtgggttattcaaagagccccttctgaatttctccaaccaagtagaaagaagagcttcgaggcagaagggtgaatgagccacttgtcctagttctttcctattggccgagttctgtgagcaggggcttctgtccggaggctgtttgctccctctctgtcttagaggttttgctcctggtctctggctggcctgcccagtccctcaccctgaga

SEQ ID NO: 41049 - DNA, 1215 bp, Artificial sequence
  DNA replication origin
cgcaccggcctccgtagtgccctccccgcccgggagccggcggccgaagccgggcgtccctcgcgcgggcctctccgaaacaagcagccccccgcgctcgggagtcgcagctcccccttggggctcccgggcgaggccggccaggcgggatacctcaggagcccatggcggtggcggcgtctgcggacgatgcgcggcagccggactctgcgggcggggcgggcggcgccgcagccccggagtctccgccgccgccggcgcgtcccgggcccagtggagtgcagccgcggcgcgcatgcgctctgggctcgccgccggggagggcggggcggcggacgcggctgagatcactgcctgggccttaaaggggccgcgccccgaaccccagcccgccgccccgaaccccagcccgccgccccgcgggttggggcgcgacccgggttctcttgccactcacaaaaccagctacgaccggcccccaaccgcgagagctttctgggctgcgatctctgcccctgaccctcgctggtgcttcacttcttttaaccctaatttcctccatttgagcctgttttgaagatgaaacgaaatacaatggctatttgttgagtgaaggatgcgtgtggaattgtggaatgaacgtggaccgagtgttgtgtgcaattaggccagatgaaatggcaaagcactgaaagaggcctttttttcccactccgcttagcagcgattctttcttgccccgtctggctctaggctgccgaactagcaaaagtcttcagatagggttcaagccgcctagtccatttctgtttgccggtccagacatcacctaggttaactgaacaagataaaatgcaattaagttctggcattgatgtgctcaagatccccaaatgtatttatgtctccagactcctcgcctgaactgtctacccaacacctcttccttggagctccagcaggcatctcaaagtcagcgtgtctgagctgagccaaccccacttccacacacaaaaacctgctccctctcagctttgcctccatcagctgttgacaattccatccttccagtccccaggccagaactcggagtcagctgtgaatgaatgccccccttctgcccgctacccaataaggcaggcaggagatcctgttggctctacctgcaaaatagatctagactcagatgtctgccactcctcctccagtgctacc

SEQ ID NO: 41050 - DNA, 2306 bp, Artificial sequence
  DNA replication origin
ggggtctctaactcagttctgaggcccagagggactggcaggggggcagctcacctgtgaggctgggatccgggagacctcttgccgcccagtgaggtctgaggaggagacgttggcgggcgcacccctgtgcagcctcatactcaccttcctctcccggtcgacccgcgagatcgctctgggagaagtattgcctggagggagagtgggaagccaccctcagagtaggcacaaacagagccccccacccaccctgaacccagcccactgcctgagtccctgctcaccagccggctggatgcgggaggctggcgtggaagccacgggctcggcggcactgcggagccggttggcagtggcccccgtgggtgggccagggggcagggctcgggtcgcggacccccgtagctgccccatcctctcctcgcgttcgtgttctcgccgctcccggtccacatcctcgggattccgggctgcaccctgcagggatgcaagaaaagacaccagtcagccccagaggccagggtgctctgggcccagcagccctgcagggcacagaaggggagggaggccaggtggatatctcagaaaccttctgctccagcctccctgacaagcgcgggaagccaagacccacaatcacacagcacagagacacgaagccacacaaccaccagaggaaggagaaagcaggagtctgggggcagagggaggtcagtctgccctgctctcctgggatggagccagagaaaggacaactaatgcgcccaggatgatcaagagcacctcttggccctcctgacctggggctgggcctgccctggcccccctctgtgtaccaagagcccttaactactcaaggttgctaaaccgagcaggaaagctgtttagaggcctctagcagactggctaggggtgtccagagggggaaaagaacaggcccagagtcacaaaactagtggaaggctgggctaggactcagaccagctctcccggtacctagccaggggctcttctcatcagggagctgtccttccccctgccgggacctggcaatggcttctggcaggtgcagtggaggccacagccaggaggcccagggaacccacagacaccgcctgccttgggacagaagctcaaggggagctggagaagaaaatggggccacgttccccacggaggaagaagaggcccagcaggcaaagctggagcagaaggggtaccctaagcccccaggtgccctgctgtccagccactgccgcccctggtgcaggaggaagtgagaaggggccagagaagagcatatgtgggggcagcgcccgactgcgttacctagttcatcctggggccgtccacagggaagggcagggggctggcaggaagggggccgcatctgtggaggagagagctctgggctgagttgggggcctgctcatgggcacagggtgtggttcctgcaacccatgtctctcccaggagactggccaagaggtgggggtgggccctgtctttaagcaactccaggaagtagtggctaggaccagaatgatccctgaatcttagtgaggcaccaaggcccagagaggccttgtgacctgcccggggttgcacagctcagggcagagctagggtctgaacccaggcctctgccacctagtcccactctgctctctgcaccccaagaggtcactgttcagagtcttgccttagaacactctagaagatgcatcttcccatcctcccacccagaagcctctcaggcaggcctgggaccaccggggctctaactcctgacctccggtcctcaccctgggctcccactcggttgcaggctggccaacagtgactcagccagagccacagcaaagcctggggaggaacacgagctgtggcacctccgtgccgaaccttctgcgggcagagtcacatcaaccctgtgaggcaggtcaatctcatttccatgcttgggatacagaggctgagtgactcactccaaggtgtggagccctgcagccagcagccaagcagagggctggagcccctgccctttgtgagcccagcaggctcaggccattgccagccccgaggcaagaagtgggcgactctccatggtcccatccaacccataggacgcaagaaacacacagcagggagctctcttggcctttattgcccatagaaaacataaaaggtcagcaaagtcacacgagcatccacccgtcatcatatggacctctgtccttggctgtgttgaattccttcccggccagctgactggacctcggaacacagtggctgtatgtgct

SEQ ID NO: 41051 - DNA, 903 bp, Artificial sequence
  DNA replication origin
gcagcaccgtcttgaggctgaatttgcgggaacagaagttgaacaggtcctcgaggctaggccccagcagctccatgaccatcacgttgtagtcgccctcagctccgcaccacttgatggacgggatccccactgggggtcaagcagagggcctctgtcaggggtcagaggcaggcagccagccacgcccggcccaccctgtgctcatggctgcccaccgccacccacccggcgcccgccgccgcccaccctgcgctcaccgccaccctgcatcatcttgtagaacttgctctcgatgtgcagctgggggtgctttgtcttcacacactccagcttgatggcgacttcctcaccagaggcgatgttggcacctgcccggggcagggaggcaagggaccagggtcaccctcaaaggccaggcagtcccaggcgccccactaagcatttctgagatctggcgtgtgccgggcccggggccatctgcccttgaggagctcttgggggaggctgggaagggggcaaaggagccccggcaaagggttcctgaggggaaagaaggtcagcgctgtgagggacagaggtgacacacaagggctacccagggccacaggttggggcgacaagaaggcccgatgtgagtggggcaagggtcaggtatgcaaaaggctcacagaccacctaagggagggggctgagtcctagagcaaattcaggcagtgaggtctgtcgggttgagatggtggcacgtgcagaagaggcccaatggggctgggctgccgaacacaccagaacaagccaggaccaccctggcctacaggatgaggatgggacagccgcagcaacccctcagtcaatgctgatgccttcagaggcagccctgcacattctaatccagtgtctcat

SEQ ID NO: 41052 - DNA, 986 bp, Artificial sequence
  DNA replication origin
ccactgtgcctggcctcgggtagaatgttttcaaggtgcactcgtgtcgtagcgtgtatcggtactttattcctctttattgctgaataatattccgccgcatggaggcactgcattccattcatccttgcatctgtgacagatgtttgttgtttccaccctctggctgctgtgaggagtgcacccctgggaccagggtcattgtgtgaagcaggcatcctttcctcttcactgccgcctgggattccctggtgactgcgccactgttcctgttcttctgctgctgagcacttgggctgtttgctcctgtgtccatccttgtcctgtccccctggtgcacacgtgtttctgaaggatgtacactcaggagtggggttgcttgggcgagcgtttgtttatgttcagcttcacccaagaggtgcacaggggctgtgccaactcacacccacacctttatttcttatatacaaacttttcctctacttgagatttctcctggttgtggtgtgagccatggtgtcttttctcaggtggccagccggttgttcagggacattattaatgaacagtctcatcttttcctctgatgtgaggtcctgcctttctcctgtcttgaactcctcctgaggctgtgtccctgggggttgttctggcctgtttgtgtcctgttgcgacactgtcctactcctcctgctgggctcgctgctggccccaggaaggagacaccctgtcgcccagcctagccccagcccttcatctcatccacccatacagccagggaaactgaggcaaggtacactttgggcttggtctttcttgtgacttcttgagttgggcagtgggcccaggcagagagcggggccttggtgtgtgtgagggtattttcttagagccccttgagaagccaggagtggactgggggagacggggaggtgcaggcaggacctctgacctatgctggaggccagcagagccggggttgatct

SEQ ID NO: 41053 - DNA, 1407 bp, Artificial sequence
  DNA replication origin
ccagcaaaaacaaagaggctgagggagcccgattccccccaggtttgcacccttccgcgggcccgcggccccccgatatttaccccgccgggaaggcgccgatgccgggccactgctcggggggctgccgcgggcgggggcggcccgccggggcggatgccggaggattcgcggagccgcccggcgcgccagcctctcccggcccagccgccgccgccgccgccgccgccgcgctccgctcggccccggccgggctctggctctgggctctcgccgccgccgccgccgccgccgccgcctccctcctcccggcctcctgcccgcccgcccgcccccgccgccggctcgcgcgctctcgcaccgcgcgcgcccgccggctcccattgagccccgggcccgcccgctgatgtcatccccggcccgccgccgccgccccggaggatttaaagggcccgcgccctccgcgctgggggccgcagctgcgagacgcagttccccagcctcagtgcaggcgcgcgggcttacgcgtgggggtgggggagcacacagatactgacaccctaatgcagtccagggcacaggtggaaaagacggggtgcgggggggacagagggaagaggagggcgcacaaaaagcggaggtgaggggatgggaggggagggtctagacccaaagtctcctctccccgcctgccaggatctctctcctctccaggcagagcactgggcccctgcgaaaacaggcggctattcacgacactgcaaaagatgttagactgctggaggctcagtccgcctccaggttccgagtgccgcagagaacacaggccaggttgattcagggcaagagatttgaggagacagctagggatgtcgacacaaggcccagaaaggtagcctgggctcatacattctcctcccgtggaaaaacgaagggcaaagacctcttcttcttttccctgaagctcaaactgtgatgggcacagagaggacccctcagatcccaacctcattctcccctgttgaaggaggggtgccacaagtaccaaagcaccgacacttgagtctgggctccgagtggtgcacgtttagccaagccacctcccagctctgagcttgggtttccttaaacagcaaatgggaggaaggaccctgtcctccccaggtcacagaattaataaaagcttctaccggcatgcagagccgcgatgaaaggttgcagaacaaagtcattaaagtgatgatatttacactgagccatgcaaagcttccaattatgacacacctatattcacacagttgtgactgtggacacgcaaaatgcctgaggccctgcgtccaatcccggaagcacagttcctgggaggagtcacttctataatagccgtatcttccctcctcgaggctg

SEQ ID NO: 41054 - DNA, 1503 bp, Artificial sequence
  DNA replication origin
tcttgaactcctgacctcaggtgatcacccgccttggcctctgaagtgctgggattacaggggcgtgcccggccccaccgttgggttttaaagttaggagttaaatctgagaggaatcactgtgaaccaagtcggagagagaagtcaggctgtggggctgctggaacacgtaaggttttgtttttcactttggaccagtctcccctcctcagctgggttttgtgtcatggtttgccttcccttatagcttcactgcaaagctctttggaagggcccacacacaggtcttccagggataggaaggacaaggacttgggcccacaactcaggcagtggacaacagcatgtccttccaatggcaaggcagggaggctccctagcaggcctggggatgagccgggctcctcagcctggctggcccagggaactgagcaggatcttaactggggcagggggtggggtgggggtgctggggtgggaggtgtggttacaagtcctgaatgcagaggggagaacgtgaacgtgctgcagtcagacctggcgatctggctgggttaggaaggggcagggggtctgttccagccaggcccagtttaagggagaggttgatctgtgcccttaggcaagcactgggaggagcctgattccttctctgaaagaatacagtgtaatctgttgttgtttgagaggattaaatgagataacaaataacctcctctcccagggctggttgccttgaaagtgctgaagaagaggagggctttgggaagcagggcccaggttggaaggttaggggtggtaaggactggaggacacaggggcagacttcaccccctgctcaattgtgcccaggcctctctgcctgggctcatgtgaggaaagaaacaaaatgggtggcggtggggtggcgctcaggccggctgagaacttgggcccagagttaccggatctcctaatgcccccagagaaacagggaatctggatctgaaatatgaaatcttccagttttaaaactttggggagtggccaggcatggtggctcacgcctataatcccagcagtttgggaggccgaggcaggcggatcacttgaggtcaggagttccagcccagcctggccaaccccgtctctactaaaaatactgtgtggtcctgggcaaaaattagccaggtgtggtggtgcacatctgtaattccagctattcaggagggaggctgaggctggagaatcacttgaacccaggaggcagaggttgcagtgagccgatattgagccactgcactccagcctgagccacacagcgagactctatctcaaaaccaacaaaaacaaaaagcaaaaaaaaaaaaaaaaactttggggattaattaacaaaacaacaacagaaagcaccgcgcaggccaagtaaagcccaccacctggctggtgaccccctgctctggcaaaggtgtcactgaaggcaggccctcctgggaggaggcttctcactctcctgctcttgga

SEQ ID NO: 41055 - DNA, 1016 bp, Artificial sequence
  DNA replication origin
gctcctcatccctcggaggtcatcccttactccaggtgatctgaacctgaagtccgaggccccaagagttctaagtaacccaggggtggaggtggggtgggggatcccagctctttccgatctgggagatcagaaagatgctcatctgggagagtgggacctcccctttcagtccgcccacccccgaggaccgcacttggagggccgcacttggaggaccgcgcctccaaggcgggcgcggctgacgcccggggcccaggccatgtggggcgtgcgtgccgggagaagtgtcccagcgcctcaccccgcaagcatgagaaccacgaaacccccggggccgggaaaccggggcggggcggggcggggcggggccgggaagcggcgcggggctgggccggtgacgtcgcggccccgcccccggccggctccctcctcccggagcgctccccagcggagtcctcacctgcaggcacaggtgtgcgcacttcgcatctcgaaggccggccagcaagcttcaggtgagcgccagcagcagctgggggtaggtgctgggaggaggagggcccggggtgggggtcctcactcgacggagaggagaaccgggtcaaaggagaggaggaggaggtgggcgtgggtctgtggagatactgcctgctccccccaaatcctcccttgtctctgggttatagtcacgttgtcctgaaaacgtagactttggagggaattgaaggagaggaagttgaagaggaagcagcaggtttccaaatatttcaaccgcaaatgtattgttatcattcttcttattatttatttgtttgttttgtttttttgagacggaggctcactctgttgctggcacgatctcggctcactgcaacctctgcctcccgggttcaagaaattctcctgcctcggcctccctagtagctgggattacaggcatgcaccaccacgcccggctaatttttgtgtgtttttagtagagacagggtttcggctggtctccaaactctgac

SEQ ID NO: 41056 - DNA, 1254 bp, Artificial sequence
  DNA replication origin
cccagtcggcccttggggcgcgggcggaggggggacgttggcgtagggtcccccgcgataccccgggaagggccgggggaagttggaaatggccaaaacaatgcgtcgggacaggcttcccccgtaaacaatggccgggacggtccacacgggccaggcggagggcgcgtctaagggaccgcgggaggggctgggcctctccgcggaccccgaggtgcgccgggtgactccctcgggtgcccaaaaatctgtccccgggagtcctggggcgcctgcttatccctgagcagggatgcacggggctgcgtttcctggatgtgtgcgataaggtggcttttttttccctcctctaattttaaagatttttcttaagtcttaatgttctataaacacttaaagaatatctttacaactcaattgtagtggaacacccaaaggcagctggaagcagaactgggaactctaaagggcaggaaggattgaaatgctagcccaaaagtgctgctgctttttttttttttcttttctttttttaaagggaagtttctgccaggaggtgccaagtggtgaaaccgctcagtttcaggcacagccctcttgtctctcgatttggccccgactgcgagccggacgggatggtggaggggcggagggcgctgctgggggcctgggaggctggatttagggctgcctgggcggtaccgcccgaggggcaagacccgacagcggggcgcgcgccgcaacgtaagtcccggggatttgagaagacgttcagggcctgggttggaatccacattttgggattctgggtagggccaccgaagacgggaaggcgcattcttgggcggatggggtgagcaggcggggagttttccgccaggtttagttacaggagctagaaaaggccacttctgggaccctggcatctgggccaccctgagagccccagaaacttttttttctttttctttcccccccaccccccagaaaaggatagtcatttcaggtttaaggctttggtgtattgttccacttcgaaattccttgagcctcagtttatcttcctgaatcagcctatggtgcttgcagcggagaaagtaaatggcggttgcagtggtccactggccagtttgggggtcctgtataattggccactgtgtgtgtcaggcctctgagcccaggccaggccattgctcacacaaagcttgtttggtggtctcttcacacggacgtgtatgaaatttggtgccgtga

SEQ ID NO: 41057 - DNA, 882 bp, Artificial sequence
  DNA replication origin
ggctcgctacaacctccacctcccagccgcctgccttggcctcccaaagtgccgagattgcagcctctgcccggccgccaccccgtctgggaagtgaggagcgtctctgcctggccgcccattgtgtgggatgtgaggagctcctctgccccgctgccccgtctgggatgtgaggagcgcctctgcccggccgcgaccccgtctgggaactgaggagtgtctctgcccgactgccaccccatctgggaggtgaggagcgtctctgcccggcagccgccccgtccgggagggaggtggggggtcagcccccgtccggccagccgccccgtccgggagggaggtggggggcgcctccgcccggccactgccccgtttgggaggtgaggggcgcctctgcccggccgccccgtctgggaagtgaggagcccctctgcccggccgccaccgcgtctgggaggtgtacccaacagctcattgagaacgggccatgatgacgatggcggttttgtcgaatagaaaagggggaaatgtggggaaaagaaagagagatcagattgttactgtgtctgtgtagaaagaagtagacatgggagactccattttgttctgtactaagaaaaattcttctgccttgggatgctgttgatctataaccttacccccaaccccgtgctctctgaaacatgtgctgtgtccactcagggttaaatggattaagggcggtgcacgatgtgctttgttaaacagatgcttgaaggcagcatgctcgttaagagtcatcaccactccctaatctcaagtacccagggacacaaacactgcggaaggccaaagggtcctctgtctaggaaaaccagagacccttgttcacatgtttatctg

SEQ ID NO: 41058 - DNA, 1312 bp, Artificial sequence
  DNA replication origin
catgctgccttcaagcatctgtttaacaaagcacatcgtgcaccgcccttaatccatttaaccctgagtggacacagcacatgtttcagagagcacggggttgggggtaaggttatagatcaacagcatcccaaggcagaagaatttttcttagtacagaacaaaatggagtctcccatgtctacttctttctacacagacacagtaacaatctgatctctctttcttttccccacatttcccccttttctattcgacaaaaccgccatcgtcatcatggcccgttctcaatgagctgttgggtacacctcccagacgcggtggcggccgggcagaggggctcctcacttcccagacggggcggccgggcagaggcgcccctcacctcccaaacggggcagtggccgggcggaggcgccccccacctccctcccggacggggcggctggccggacgggggctgaccccccacctccctcccggacggggcggctgccgggcagagacgctcctcacctcccagatggggtggcagtcgggcagagacactcctcagttcccagacggggtcgcggccgggcagaggcgctcctcacatcccagacggggcagcggggcagaggagctcctcacatcccacacaatgggcggccaggcagagacgctcctcacttcccagacggggtggcggccgggcagaggctgcaatctcggcactttgggaggccaaggcaggcggctgggaggtggaggttgtagcgagccgagatcacgccactgcactccagcctgggcaacattgagcactgagtgagcgagactccgtctgcaatcccggcacctcgggaggccgaggcaggcagatcactcgcggtcaggagctggagaccagcccggccaacgcggtgaaaccccgtctccaccaaaaaatgcaaaaaccagtcaggtgtggcagcgcgtgcctgcaatcccaggcactctgcaggctgaggcaggagaatcaggcagggaggttgcagtgagccgagatggcggcagtacagtccagcctcggctttcacaactttggtggcatcagagggagaccggggagaaggggagggggagggagagggaccagttattattttttaaaatgtcttctcggccaagcacggtggctcaagtctgtaatcccagcactttgggaggccgagacaggtggattgcttgagccttgggagtttgagaccagcctgggcaacatagcaagactctgtctctacaaaaaaatacaaaaattaactgtgtgtggtggtgtgtgcctgcagtc

SEQ ID NO: 41059 - DNA, 965 bp, Artificial sequence
  DNA replication origin
ggcacaagaatcacttgaatccaagaggcagaggttgcagtgagctgagattactccattgcactccagcctgggcgacagaatgagacaccatctcaaaataaataaattaaattaaaaagggggctgccatcatcgggcagggtgtttctggcttccagaggagctagggggctttcagccctttgccacattttacagataaaaaacaaaggcaggccgggcatggtggttcaggtttgtaatcccagcactttgggaggcagatcacaaggtcaggagatcgagaccatcctgtctaacatggtgaaacgttgtctctactaaaaatacaaaaaattagccgggcgtggtggcgggtgcctatagtcccagctactcgggaggttgaggcaggagaatggtgtgaacctgggaggcagagcctgcagtgagctgagatcgcgccactgcactccagcctgggagacagagcgagactccatctcaaaaaataaaaaagagagtggagccaagcctttctttctggaggaggcaaggggttgcgagggaccctccaatgatcagactctagatttggtgagtcaatgtggggacggggtgcagatggacgggagggtgggaggcagactgtgggcacagaactggggttgcgggcaggtggaaagctggaggtgctttggctgcattccagagcacaagaccatagtcagcagctcctccattaaaggggaagccaagtggggcgcagtggtgcacacctgtagtcccagctactcaggaggctgaggtggaaggatggcttgagccaggagttcgagtctgattgccccgtgaatagccactgcccaccaacctggacaacatagtgagaccctgtctctctagaaaaatacaaaatagaaggtgaagacaagactcaagcaaatctcccaaggcctccgggctccaggctcccagcccct

SEQ ID NO: 41060 - DNA, 1046 bp, Artificial sequence
  DNA replication origin
aaggacaggcctgttgccaatgccagttccgcttggcagctgtgtgccccaagcctcctatcttcttctctgcagatggggaccccgatgtctgccctgtgggctggagcaggcggcgactctgtcctggctgtgagatctcctccaccgcccctgactcctaccctgtcaggcccacccccagtctcttatcaccgctggaggggaatctgagcaatcccctacggtaagggtcacagtgaatggtgcactttccaggtgatggagccccttactctctgatttcccatttgacaccccccatctgccctgtgaggggggttctgtgattcccccattgtacagatgaggaggctctgaggggtgacacgtcttgcccaaggctttctggccttaaggttgaagactcttcagcctctgtaccctggcagaggttggcggggaggcgagtgaggctgaaggggggtgcatggcatgggtggggccgtactgggggctgggccaggtgagcaggtgaggacgacacactaatgacctgggaccttttcctgtaggcagtggggagctctgggcaggctgggagcagaggagtgggtgacggaggtggcattcaggagctgcacgtggcagctgagtggcctggagcaggggctgggcagggatgggaagccagcaggcccgggtgggcagagtggcagcctggacggggccagccttctcgcagcctctgccagtctccaggtgtctggggctgctgtgggacattgaatggggcagcaggaataggggggccacttttggggttccaaaaccagtcagggaggacctgggaagctgccagaggcacctcagtgggcaggagagcgcgagacaatggaatgactgggaaatggcaggtgagaggagggaggatatgggcaattgagcatggggacggcaaaggtggggccgtggagaggatgggccaggctattcacagcccagtcactgcagggaaggactgggtgcggagggggccgcaaatggccttgccacctcctggcagc

SEQ ID NO: 41061 - DNA, 1124 bp, Artificial sequence
  DNA replication origin
ctggaccagcgggacctcaacgtgggctatgacatcggcctggaccgcatcttcctggtgtcgcccatcatcattgtccacgagatcgacgaggacagcccgctttatggcatgggcaaggaggagctggagtcggaggactttgagatcgtggtcatcctggagggcatggtggaggccacggccatgaccacccaggcccgcagctcctacctggccagcgagatcctgtggggccaccgctttgagcctgtggtcttcgaggagaagagccactacaaggtggactactcacgttttcacaagacctacgaggtggccggcacgccctgctgctcggcccgggagctgcaggagagtaagatcaccgtgctgcccgccccaccgccccctcccagtgccttctgctacgagaacgagctggcccttatgagccaggaggaagaggagatggaggaggaggcagctgcggcggccgcggtggccgcaggcctgggcctggaggcgggttccaaggaggaggcgggcatcatccggatgctggagttcggcagccacctggacctggagcgcatgcaggcttccctcccgctggacaacatctcctaccgcagggagtctgccatctgacctccaggcccggccctcaccactgcccacaagagcctctgccgggggtgggatgccaggacaccccctcccacactcaggacagagccaaccctggctccgtggaccttctggaggaaggtgggggtttcaaagactgggggaccccttcctcctgactccagcacccaggcctgggaagagctcggccccgatcagcctgagttccgccagcgcctacttctggtggctctaggtccccggatccaccacccttcccccactgactcttcaaggacgtgccctctttgctctcagaaccttggggaaggtggctggactgctgggcgggggacatctcggggtttcagggtgggcagggggttagtttggggaggggggggtgcgtttcttttgcatgactgtggcctgttgctcatgactttcttttgtaaatatctataaatggagacagatggagacaccaaattcactttctgccgtttttacctgct

SEQ ID NO: 41062 - DNA, 1066 bp, Artificial sequence
  DNA replication origin
ccacagcgatgactgccagcgggcactcctctgtcacgcaccggaacccatagccgatggtcgtctgcgtctccaccgagaacaggaaggcacccaggaagccgttcacgtgcatgatgcagggcttgggggccaccggggctgctccgccaccacccgccgccgggccccccgccgcaggcacccctgggctggcctccaggtcaccgtggaagaaggcgatacaccagaagaggaggccgaaaaagagccaggagacaaggaaggccgcggagaagatcatgagcatgtagcgccagcgcgtgtccacgcaggtggtgaagatgtccgccatgtagcgctgcgacttgttgctcaggttggcgaagtacacgttgcattggccgttcttcttgacgaagcggttgcggcgcttccgccggggcacgtgggcctggccgttgcggctgtgtccgtgcatgtcctgaagccggcgtggtcacctgggaagacgcagggcctgcggaggagaagccggacaggtgagatgctggggagcgaggggctccctcggggccactcagactcagccccaagactctcagaagcaggtgagcctggaccaggacctaagacttcctctgccccggcaggcggagggtggcagcagaggtggctctgatgacagggtctgagccagtgccacccagtccggcccagcttagagactggggtccatagaccaggaagctaaagccacaaggatccaggtcctagtccctgcccctcaacactgcccctccggccctcctatgctcactgttctggaagcttcctgatgcccatcttggttcctccctgtccctctgtcctgcttgccctgagcatagggagccacggaggcgctaagcccgcttccctccctggattccatctctgcacttttgggcttctcgggggctggacatcctcctgtgcactagccactggccacgtgtggctctttacatttaattaaaacgaaataaaatattaactgcagctccttccttgcatgagccacatttcaagtgatcaggagccacat

SEQ ID NO: 41063 - DNA, 1426 bp, Artificial sequence
  DNA replication origin
acctccgctgggaagttctccctgactaccgtgtcaaaaatagcttctccttggtcacaatgtgtcacatgacccagttagaccctttccgggaattttgacgggctgggttatcttgtttgtcagtcgttagatatttatgaagcagctactctatgccaggctctgggagtcggggtgaagtagggaggcaaggttcctgcctgtaatgatgttgcagatgagactggtttgactgctaagggctgccaggaagatctgagagctggatgggagggagggcctcggggcctcttggaacaggcagcctttgaatcaagacctgaatggtaggaaggcacaagcggtggagtcttggagaagagaatttcaaccagaaagaacagccagtgcaaaggcccagagacaggaataaacttggtgcgttaaagggacgggaaggaaggtctcttcccgtggttggagagtggagggggtgcagtcagagagggcaggacctctctgaggcggggcgttcatcccgagtgccctggggagacgagagctctgagcagggagtgatgtggagatggactgcgggaggtgggtggaggctgtgggaggaggtggtgggcagagactgtgggctgcaatagtgatgtggctctttggggtggatgactaggtgaggggacgtgtccggggccccgaggttcacccgctttgggcaagctcccaagcccactgtgggatgatgatgacagcacctgccttgcaggtgtggaccagtcagtgcatggccctcagtgaacactaagtgcatgttagttattaacccattgttattgcggttgggcttagggagggctggaggatgatgcctaggtgtcaggcctgagcgacctcctgggaggagtcacagactgagatggggaaggcaggagaggggaggacgggggcatggcttgggcttggcagtgccgggttcgcgatgcctcttcactgtccagcagacacagggagcaggagccaagtgggcttgtagctgcctgggagggaggcgcaggctaggtggtattttaagccacaggactggatgagatcacaggactggggagaagagaagggaggtgggatggcggagctgggcactgcacggtgtgggtcatggagaggccagaggcaggagagcaaggggcgacctggagagggaccctcaggcctggaggactcaaggaggaaaacgagggccagtccagagcctccatcagagctgctgagagggaagggggcacagaggagctctggagggggctgaggggagactaggaggtgaggaagagtggagagtaagtcatgcccttcaagaagggctgcaggccgggcacggtggctcatgccaacactgtgagaggctgagacaggaggatcacttgagcccaggagt

SEQ ID NO: 41064 - DNA, 774 bp, Artificial sequence
  DNA replication origin
tgacctccaaggcgggccctgggctcaatgagcagtgggctgttcacaggctggggaaagcactggggagatgggagtaaagactcactttaccttaagagagatgaacagctagtgggtggaggtgggcgtggggcagtgggaatatggcggaaatagctgacgaaggaggagtgtccaggattagagggggaatctggggtacaattcctcatggccctttgggttatccttgaaaagaaagctcttctctcagaaaatcctctggagtggctgtgaccaggcagagctggttgagtttctgctgggtgaccttgggtgggtggcttgacctctctgaacctcagtttcttcaactggagaataggtatgatgatactgacttcatcagggtgttgagcagtttccagactgtgtcaggtctgtgaaagccgcgtgcgccagcctggagcatagtaggttcgtagacatttgcgaaagagagaatgaagtagctctgggagatgctgtgagaagatgtcttagcttaggataagaaggaaggggaggaggaacagtgtaggcttacagggcgggctggttcttaatgtggatctgggggaggcgggggcgagtgctaaggggggtgtgaggaggagggggcccctctgcggggaccactgagtcacgaggacatgtaagcgacatgacaaccggcaacatggtaaccaggaaactagcggcggtgggaaacagagctggagcagtgtggggtgggggtggcgggtaggcctg

SEQ ID NO: 41065 - DNA, 775 bp, Artificial sequence
  DNA replication origin
ttggagccgtgtgtgtgtgtgttctcccccacatccagtcccatgacctccatggcttcaggccttttgggggcagttagcaggactttaggggcccaagagcctcactgtggccctggcttggcctgtgctgaggggagcaaaaggtggaccagggcagctggggtaagagatgggtgcagcatggtgggaacagagactgttggccactgaactgacccatatcccaactggagttggaagggctgagcctagaacattccactccattctcactgggaggagggactctttctggggtgttccacactgggcagtgggtctcatatgtcctccattcagcctcccagaaattagctcaggtggctgggagagcagccccctgggctggtcactctcctcccaaccgtcatcttccacatctgtggcatggggacgtcactccctgccccagtgacctccaaggcgggccctgggctcaatgagcagtgggctgttcacaggctggggaaagcactggggagatgggagtaaagactcactttaccttaagagagatgaacagctagtgggtggaggtgggcgtggggcagtgggaatatggcggaaatagctgacgaaggaggagtgtccaggattagagggggaatctggggtacaattcctcatggccctttgggttatccttgaaaagaaagctcttctctcagaaaatcctctggagtggctgtgaccaggcagagctggttgagtttctgctgggtgaccttgggtg

SEQ ID NO: 41066 - DNA, 1555 bp, Artificial sequence
  DNA replication origin
gcccggccgggcccgacgatgctgacgccgaggcggcgccgagggcgcggcgcggggcagcgctgaaagttgggcggcccgcggggagcggcgcgggacggccgggacgcgcggagaccccaagacccacgcgcagaccgagcggcagccggggaggggagcgcgggccggccggccgagttcgcgggcagggggcgccgggactcccctttccgcgcccgggacgccgcccgccggatcgcgccttgggatgtagcgcccgctcgccgcctcccggactctcgtcggaccctccgcccagcggtaagccgcgctcgcccaccccgggcgctgtccgtcagtttgtcccgccgcgtgcgtgtctgtgtgtcccgggcccgccgctccggccccgcccgctccgcacctgatccggagccgggtcccggctgcccggcgccgcgcgcgcggtcccgtgactccccgggagcgggcgggctccacgggcgggctctgtccgtctgtccgtctgggagcgtcgcggtctgggttgtggcctggaaagggggagagaggtgggtggaaggggtcttgacctcctgccccagccatgacctttccctgcctccacccaccccagttgtcatgccggggagcttcaaggcaggtgacttgtggcaaggtgggggatgccgcctttccgcctccccagctgcatcctcgttgcaaatggccctgtgatctgaagaacgaaatctcacttctcatgttttgagcacctacttggcgccacacgaccccagggcgcaggggcagggattggtagaggaggcactgcacgttcacagtgatagacacaggctggggagggaggcagaggctgctttttcctccgtgtgtagggagcaccccaaggcaagagaggtctcaatgagcctcccgcagggagaacttcccctgcaacctgccaaatgtccccccaccagtgtcagcctccctgccccctacccacatttctgcccccagtgtccctgcttcaggatggacaggatgcagggagttgggaggtggcaagctgggtggggtggagcggcgggctagaggcagggcagcctggccagctgacagagcagggcctcaagagcagtagaatgttcagcagcaggtttgggggaagtggggaactcagggagggaggcccagagaagggttggagccgtgtgtgtgtgtgttctcccccacatccagtcccatgacctccatggcttcaggccttttgggggcagttagcaggactttaggggcccaagagcctcactgtggccctggcttggcctgtgctgaggggagcaaaaggtggaccagggcagctggggtaagagatgggtgcagcatggtgggaacagagactgttggccactgaactgacccatatcccaactggagttggaagggctgagcctagaacattccactccattctcactgggaggagggactctttctggggtgttccacactgggcagtgggtctcatatgtcctccattcagcctcccagaaattagctcaggtgg

SEQ ID NO: 41067 - DNA, 1356 bp, Artificial sequence
  DNA replication origin
aggtcatttgtctcaccctcatcctcccactttccatccacagaaaaggtgaaaaagaccaggcacacatctcttgcccacagggcactcaggctgcttgagtctcccctgcatccacgcactgagcattcatgtgatggaacatcagtcctggctgtctgcctgtgaggacacagcagggtaaccagggagaggcgtggaacaggacgtgcgttctggaggtctgcacagtcggagagagccgtgagaaaggatggccacatttattgagcgcctaccatgatctgtgtatttcttgtgcatccacctcacttaatctaccccttgggaatggaggacgttagggtcctcaatttacagacagattaaataaaaacttgttcaaggtcaagtagctcctaggtgcttttgagcctaggttagcctgactcctcatcccactaagcaagaaccatacttgtgccccgcccaggggctggtatgtggtgggtgcctagtgctggttgaatgaatgagtgggtgataaatgacttctgctggggtcatcaggaggccttctcaaggaagtggcactgaggctgggcttggggaacagcaggaattctctgggcaaaaaaggtggaaggatatcttagtgaggaggaacagtgcgtgcaggcagagaggtgtggaggcctgtggcgtgttctggaatctgtggaatcagggtgtacctgtggatttatgggatgtgggatgccggataaggtggggcctgactataccacactgaggagttgggactgaatccttttgagtagggagagcccacgaggaagggaaacacttgtggtggtttgtgtgttgctgttcttatgctgacatcctcgaggctcaggagagccagaggggatttcagatttcatcagttctccacctggctttggggtgcctcggtctctccctctctgtaatggggctagtcggtgatggccagactcccagggaagttttgctggctgtctaactgcaggtgttctctcgtcctaccaccctggaaggaggagcactttccctcctgtctcctcggagggctagagtgacgtggcaggatggtcaggatgtagctggctagacaggtgctgtgggtgctgggggttccctgacaccccagagtgtggggcccaggcctgacagcttggggtaatggagagcgacagagaataagagactagggtttggcctggctttgtcatctctgggtgaccttggccgagtttctgaccctctctggtacccagtctcgccatctgtaaaatggggcagtggtgactgagtgatcgcgagggtccctccaatagggccccctcagactcc

SEQ ID NO: 41068 - DNA, 1461 bp, Artificial sequence
  DNA replication origin
gcacctccctgccaggcgcccctcacccttgcagcacttggacctccagatcttccccagcagcaagatcatggccaggaggtggctcaggtcgccgaggattcggaacacgttcatggtccagccagtcagtcgtgcgcccgcgcccagcaaacttctaggaaactttctggcgggcagggcggctgccacgtctccggccccggtctctaggtgccccagagccctgcctgcgcctcacagctccgcgatcgcacccgcgcgccgccgcccacgcactcttggccgggcggtgacgtggccagggcggccgccggcgcagggtggggagccaggaagcggcgcggcccggagatcccgcctcccgcccatcccagcgcccggctcccggactgggcggcccggcgacgcgggggggcttctggcctgcgcccggctgccgtgtgcgccgggtgcccgccacgacccatgtcgcccatgccccaagtgccctctgccttccctccgcagaaactggaggcctgccaccaagccccaatctctgcctcagtttcctcatctgtacacaggccccataacactggtgccagcgcttggcaggagccagcacgtggaagtaccctgtggggcgattcctgctattgtcctcatcttcccggagctggagctccctccctgggagagtggggtggggcggggcgagccggaagcggagtccccacctccgtctgttaatttggttgtccacccggtcgggacccgatcttgctgcaggtggacaatggtaatggcacaccactcagcagcagaatcagactgacctcggctgcagcctgggtcggtgggccttcctctctcttggtctcaattttctcacctgtaaaatcgggttgttgtgggtaggcaggaggtcaagctggtcagggagatccagggccctcgttcgtgccttccctcttcttggtgttactaggatgttaaacagggacacacaggacaggagagacccaggagggctgagcaccaggaagggtggggagtgaagggtccctggtgggagggagtcctcccagggctgtgtggtctgagcaggtccaccaccccctctggatataagtctctgcgtctgaaagagtggaccaggtgagctgagggcccttagcctcccctccttgacctgaataagccctcctcccattcagcgccctcatctctctctaaataacggacctcctcccactcccacctcctgccacagataaccagagaggcttttccatgacaaatgtatttaaacagagatggggtctcactgtgttgcccaggctagtctcgaactcttgtgctcaggccatctgcctgcctcagccttccaaatgctgggattacaggcataagccactatggccagcctcttttctgtgataaaaatctgtcacttcagtggtcaagacccttcta

SEQ ID NO: 41069 - DNA, 1954 bp, Artificial sequence
  DNA replication origin
gcccagtccgggagccgggcgctgggatgggcgggaggcgggatctccgggccgcgccgcttcctggctccccaccctgcgccggcggccgccctggccacgtcaccgcccggccaagagtgcgtgggcggcggcgcgcgggtgcgatcgcggagctgtgaggcgcaggcagggctctggggcacctagagaccggggccggagacgtggcagccgccctgcccgccagaaagtttcctagaagtttgctgggcgcgggcgcacgactgactggctggaccatgaacgtgttccgaatcctcggcgacctgagccacctcctggccatgatcttgctgctggggaagatctggaggtccaagtgctgcaagggtgaggggcgcctggcagggaggtgcgggaccccctctctggccagcctcatgcccctgcgtgcagggcagggcgctccaggtgtctgctcagggtggggactccggcgtgggggtccttgaaactttgcggagctccacttccaaaaacaatgtaaagttgtataaaatcagaggaggaggacccctcgagatgatgggaggcgggtgggtttgttcctgcacagacgccccctcaggttggcagtgtcactgctggttggaagagggggttataagggaggtgacaacccctccctcccaccagttacacccattgttccttccaccatcgactgtggggagaagcagatatgcactcaggaacggcccacgattctcaaggtcttctcttccctgccccttcccagaccccaccccgccccccaaagtgagccctcgtccctcccctgcctgcatgtgtggcaccggtggctgtgatgtggcaggagggcaccagccgggctcaggcgggtatggagctgcctctaaacggaagccggggaaggctggaggggtcccctgtttgcattctggctgccctgctgggggtttggagaagcttggaggctggactcgcggtcgccaacagatccagagccacgaaaggctgccagagcctcctccagccatctttgtccaccggcatcctcgtggtgccctccctgtgcctggcactgggtgtgcagaggcaggagtgagctcaggctcctcgtggggctgaggaggctgagaaggctgagagtgggccccgaaggccctgtggaaggagcagctccgtgctggtcccggaggacgagcaggtgtcaatccaggaagtgtgtgctgtggagggctccggggatgaagaggcatggaggtcaccaagcaccgggcatcccccgggaagggtgggcagccagatttggggtggtctggagggagatgagtccaggagggaggctggtccagatgtgaaagggccttttctgccaggccagggagttgggtctggggagcccttcatggtttgggagccgggaaggggcctggaagggggcctgaacaggttgctttgcaagctttgagagaaaaggcacagagcagggggaggcctggcagggtgggggttggtgcagacatgagcaacagtacggtgtggagggagtggttctaggcctggaggccatttgggtttggggtctctggagagacaggtacagagacagttcaggttcttcctcaggggaggtggccaggaatgctgagtgggggacccggagcagcaggccctggtgaggggagaatcagctccaacctcttcctgcacttttgcagaaggccctgcacggagtgagcaaccatgaccaagaggggacactggtacctggccgctgtctgccagacactgctgggcacctagaatacagcccggacagcagaggcccagccctggtggagctgactttcttttatttattttttatttttattttttaacagagtttcgctttgtccctgaagctgaagtactgtggtgtgatctcggctcactgcaacctcca

SEQ ID NO: 41070 - DNA, 1333 bp, Artificial sequence
  DNA replication origin
cccgctcccagatctctatccttttgggaccatgcgcggaggaggctttggggaccgggaccgggatcgtgaccgtggagggtaagggtgggggaggagaggagaggcctggcgtgggggtgggggagttgcttcttggggaggcccggcggactgcgagcctgggagccttgctctcgacccgggaggcgaggggaggcgactcgaggcgagacagcggtttcgtgcgcggacctcggccccggggtcactcgggacccgaggagggcggccgcttggcgacgctgggcctctccgtgcggacggccgtcgtggcgcggcccggccccatcccagccccgcgggggatcgggaggggcggcctggccgcatcagcccaggcccgggctttggcgcctcgcctggtttcccggctctcgagccgggccgcttcgggcgggctgttcgatgtctccaggcctcggcgttcatctgaaaaacgcggatcttcctgagagaacacttcagcccaggaaagccttacacgaaatggcacccttgacgttctctccccagagttcactgtttaaggcacgggagacgaaaagaccaacttctcatttttagaaatagattttaattctcttcagttatattttaagtcggaggaaatgcattgggatgtaaagcagtggagttgcttgccatctaaatgaccgtgtttgggggaaggatgggtttttgggtcgttactttagttttaatcttaatatttcagccttttttctctaattggactgcagcgtcaactattctgcctcgctagaaagttcttggtattgtggaccgggcgtggtgcctcaggcctgtaatcccagcgatttgggaggccgaggcgggcggatcaccggaggtcaggagttcgagaccagcctgatcaacatggagaaatcccgtttctactaaaaataacaaaattagcctggcttggtggcgcatgcctgtaatcccagctactcgggaggccaaggcaggagaatcgcttgaacccggggggaggaggttgcagtgagccgagatcgcgccattgcactccagcccgtggcaagagcgaaactccgtctcccccgacccccccgcttccccaaagagttacgtgacgccacttgatatgtgtgtgtgtgaccttggtcaagatcctaccttttgtgagcctgtttcctctgaggaacgtgataattgcctttactttgctgtgttgtcaggaattaagagataatggatgtaatagtctcactgtagtaggcgctctgttaacgatattttctccaaacgtttttgtcttttgtggttc

SEQ ID NO: 41071 - DNA, 981 bp, Artificial sequence
  DNA replication origin
gcgagaaagggaagcgcgccttctcaaaacgagcgtcccctcagagtcttcgcacgctgttcgtttttgccacttacccccctcgtacccacagtctccccgagattttcaaggtgaagcccctctgccccgcccgacctcctcagctgacaggattctaactcgggcctagaacacggagcctggagacccgcgcgccgttgaccacagggtttggcgccaaacgaggagggcggggcgaggaccaaggggccggggcggggcgcagggtgagggtggaagggcggggagggagcaggcctacagagggcgacgaggggcggggagcaatgggggcggggcgaagaccgaagggcggggaacgagcgggctcacaggtggggggaccagagggcgtggcctggagggggctcagggcgagggggcggggcgagggctgaggcgcggaaaacgaagaggagccccagcgggtggcgagctgggatgacggagggagggagggaggggcgctgtggaaggagcgcgctgaggagcggggccttgaagggagaccgttgagctggggcgtccctcgagctgagcacctcgctaaagtccgggagaagaccctgaggcggggttctgaggaggtagccttgagtcgggggaggggcgatgagcagaggtggctgactttggcgataggtcttggtcgcgagggttgcagatggagccttggcttagaaggtcgaatccgggcccgtttccccccgcccccgctgcccatggcttctcttttcacctccaggttttcatgctggcttcagagtttggccgtgctccctcagcgttcctaatttcccactttctgactctcaccatttgccactcttgtctgtgattgagacacccgaggcccattcaggatggagagtaattttttctctgtcttaacttgaagttttaaatagaccacagacgccaagtatattttggttcagc

SEQ ID NO: 41072 - DNA, 958 bp, Artificial sequence
  DNA replication origin
tttgttctcccctgaactctattacctggaattaaaacaacgcatttgaaaaaaagaaaaacaagcaagtttctgagctcaccctatacccgctgaacagaatgactgcggtggcgccccagaacctctcacaggcctctcagctgctgctaatgcccgccgaagccccgacgcccggataaggccagggctgccggacccgctgcgggcactggaggacccggggctagagggcgccgctctcgcccggctcgcgcctcggctcccggaaaagcagctctgtccgccgttcggctgcgctcacctcctttccgcttccggtgtcccctacagtcatggctgccgccgtcgctgctgccggtgcaggggaaccccagtccccggacgaattgctcccgaaaggcgacgcggagaagcctgaggaggagctggaggaggacgacgatgaggaggtactagggcctcgcggggtgcagagcgggaagcgggcccgctcgtgggtgtgggatccgcgtggtacgggatcggagcgaagcggctgctttgggaggcggggttaggggccctgctgggccctgggtgccctagctccagtggggctcggcggctcccagtgccgcagcggggccaggaatggatgtcgctttttcggctaagacccgcgtctactccaccacagctagatgagaccctgtcggagagactatggggcctgacggagatgtttccggagagggtccggtccgcggccggagccacttttgatctttccctctttgtggctcagaaaatgtacaggtaaggaacgagggcaaaggcactgggtacgtgcatgggatggtcgtggtgctgtgaaagaacacggggtttggaagcagcagacccgtgttgggtgaccttgggcttgtaccctatcctttcttagtttcctcttctgtaaaatggggattcttacctg

SEQ ID NO: 41073 - DNA, 973 bp, Artificial sequence
  DNA replication origin
ggaggggcactgagcggggacagggaacgcgcggagcgcagctggcatcgggcgcccccgttccacgtggcagagccgaggggttacgatctcggcgggagacgggagggcgggaggctgggttggcgacgcgggggagccaaggtgggtgcggggaccatggggacggcccctcgcgccgcgaacccccgcacgtcccggagactagcaggtgggcgggctcggccccttcttcccgttccgcgctccccgcggacagggcggccgctggccccgccgtcgcccgggagactgctcggccagccgcccgctcccctcagcgcccgccgccgccgcccgggcctaccttgctggtgaggtccagctctggctcgccgttgagcgcctcgccgtcctcgctgcagtccgagtcaaagccgccgtggagtcgggcggcggccgccgcggccctggccgcccccggggagctgggctcgggggcgaacatagaggccgggaccggcgagtccatcgcggagcgactgcgctccgtcgccatctttaataacttaggctaattcgtagccggcttccctccctcccaggctcatttgactaatctatgcacagagccccgccccgctccttatcggaataatttatgcaaaactccagccgcgtactgggtgacacgtacctctagctaagaaacagtcgactaggcctctcagccaccaatccctgcagagctttcaagtacctaatgaataattaatgaggcccaaatcccaacaacaaatgtctgagacgtcacgcgccctgctcccagcttgggagggggcagtaccgagtccccgctacccgcctgaagccttcccgccaacggaagcagagaagtgtctgactgacacagcagccatccaatgaggagagaaatacaaacaacgttactcgtcaacgccccttcactctccttgtttccagaggcggtact

SEQ ID NO: 41074 - DNA, 1661 bp, Artificial sequence
  DNA replication origin
gcattgtccgcccgcccgccttgtcccgcgtcgccgctcttcgcgtgcccgcgcgccccgggcccggccgctgtgtcgccctgagcggagcgccgcccgcgggatccccacgcggaaagggggcgcgccccggcggcggcctggcctcggacgcccccggccgggctagaagccgccgcggcagcaggtgagtgcgggcgagctcaggagagggttggggggccgcggcccggcctgaccccgggtcaccgtcgggccactcgggcggggccgcgccgccaggcctgcttcctcctctccgggacgtgctgggccggatccagcctccacccgggtccgcggcccgcgccctgactcacctcctggcccccgccccgcctgccgcgccactggtcagccgggagggcggtgtctgcgggcgggacttcccgggcagcctcccgggaggaggagggcaaaggccgactgccccaacccggccccgggcagcgcctacgggttttgtgccagacaggccgtttccagggacaggcagttcccagcctctgcctgtcagaactcagggcctcagaggaaggcccgttttgttcagttctaaaacaaaacaaaacaaagcaatggggggcgcggtgtgacttagagagccaggaggcgcgcctttggtgacaatttctgcaggtttggcctgtgggaatgagggcagagggagttagcaccgggcgtttggcaggtcccacaagggcgtgtggcctggctgtgcccagggagtggaaatgtcacgaggaagatgccccagatctggtttaagtctgaagatggatggagatgtttgtgatggggaagggcggaattgagaaaggaagtcgcccagctgagaagtggggaaggatgctttccgatgagcgtttcctaactgattgttagggaggaggtggggcgggggtggtgtctattatgattcgcagtagtagatttcagctcccagaggctcacttcttgttttggagaatggggcctcgacctttttcatcttgtgaaacccagactcaatggtaaactgttttgtgatgccaggatgccgcaggaaagactgagaggcatctctgggagttctgggagggcggaggcgggtgctgacagttttcagcactccccgctcaacctccatcagaatatttagttcttcccagcggcagcttgggtatggtataaacatgttgccttgtttctgccctgggcaaaggtgtcacctccttcagcaggacagaggctaagaggagtccctgtgtgggcagctggagccttcaggtagggaccgtacgggcggggcagggaggggggaggggagattaccttataaggacaggaatagagacaaggacccaggccaacttcctgcttttcctactaccaatcggtcccttttccaacaccagctaaaagtagaggggatgccagatgggcgtctgacctgggaagatgccaacaaggccaggacatgaggctgcttgtttttcagaggaggactttctagctggactaaccagaccttcgggtttctgcagcctgggttgggaagtggacttctatactcaccacacaacccagagaactggtcatttaagtatcaaccaggaatattagaagtgatcaaaagtcac

SEQ ID NO: 41075 - DNA, 1597 bp, Artificial sequence
  DNA replication origin
gggggggggggtctcactaatttggccaggctggtctcaaactcctgagctcaagcaatccacctgcctcagcctctcaaagtgctgggattacaggcgtgtgccacagtgcccagcccctatctttctcttaaagggttacttgtgttacacttagggcccaccctgataatctaggataatctcatttcaaaatctttagtcacatctgcaaagtctttgcatgtagataacagtcacagattccaagcattagtaccgaattcctgtagcgaccattattctgcctgctcccagcccccagaggatgcagagtttaagaggggcctgccttcagtcagcctgtgggcatgagcctcacatatccactcagcacatcctgggaggggacctggactcccccccgaccccagcaaggccagacccccctgtctgccaggacccccggagagggggaagcaggctgtgcaatggaggaggtaggatgtggcaactccatagaagtggttaggacagaattctggagttgcgcatcccagagatgaggagtcagagaggcccttcccctacctggatgctgcccctacgtctgatttgaattctcctttcattgctccatccagcagacactcagaccagagccaggctcggtaccaggctctggagagcttgtccatgtcctcaaagagcttgcagtctaaacctaggagtgataatggccagcaccgtggtctccaggagggtggaagagcaggagactcttctctttccagagcaggcaatggaggcccaggaaaggggactgttcttgtctggagttgggctgaagccgctttagcatgagggttttgcctttcctcaatcctccgaccccacagccttcctgttcctgcctcggtgattttgtcattcttgtctcgtttcctcttggtactttaaaagtaaaataacgactgttcatctgcccttagaagggctggcacagaaagagattcatcccaagctgtgcacctgctctatctgtacagttggcggatggggagccaaggaacaggacccccggagtcaggcagcattttactcaaacgctgagcactcgttccaagtctgagtaaggtagaagaatgagtggccagccctgccttcccacagctcaagtgcagcaagcaccgtccttaaaacagaagagctggccgggcgcggtggctcatacctgtaatcctagtactttgggaagccgaggcgggagaatcactggagctcaggagttcgtgaccagcctaggcaaacatagtgagatctcgtctctatttaaataaaatagaaaatctgtttaaaacaaacaaaaaatagaagagctgtcgtgaaacttgggtgctctgggtaaagcttgggaagaggcagggcctcccagcatgtctggaatccccaaattagcaacctgtttccttgtctgaaaaatgggtgtagaaatggccggctaagaggacaacggcactggtgccgggtgttgagcaagccctcgacagcctcaccgagagtgcaccaagggccacccgcgcgctgccgctcccagggctcccaccctcccctcgga

SEQ ID NO: 41076 - DNA, 1577 bp, Artificial sequence
  DNA replication origin
agggacactcagcacccagctgtcagcactgcagcctgtacgcagtgagtcactgagggtggtccccagggaagccggagggctggtgggccttggttatggctgagggcatttgaacctgggaccccagttcattcagtcctcctttgtgcccactgcccctcccccagtgcctctgtttccctggggacggtgcttcccgacagccagagggatccaggtgtagggagtctgggtgggtggccttgatggcacatagctgcatgtgggcagctgcccagctcggcttgactcggctctgcagtcaagcacgtcgggcggcacctcccagggccctgtccatgcacctgtgcgtcatatgcaggacggcctgcggctgccagcccggggcctcaggggcttgagacgcaggaagtggctctgcggtagggcatagtggccaggagctgtgggctggagagggcaccttgttgatgctgaagggagggacggtggggcaggatcaactgagccatggaccagggctgtcccctcccctccatgtccaggagaggctcacctccaggtgggtgtgagaaggtgagagtgtgtgtgagtgtgagtgtatgtatgagagtgtgtgaatgtgtgtgtgtatgagtgtgagtgtgtgtggggagtgtgtgtgaatgtgtgtgcgagtgtgtgaatatgtatgtgtgtgtggggtagtgtgtgggagtgaaagtgaatgtatgtgtgcatgtatgtgtgcgagtgtgtgtgaatgtgtgagaattgtgtgaatgtgtgagaattatgtgtgtgaatgtgtgcatgtttgtgtgactgtgtgcaagtgtgtgtgtatgagtgtgagtgtgtgtggggagtgtgtgtggggagtgtgtgtgaatgtgtgtgtgcgagtgtgtgactgtgaatgtgtgagtgtgcgtgtgtgaatgtgtgagaattatgtgtgtgaatgtgtgtgcatgtttgtgtgaatgtgtgaatgtgtatgtgtgtgaatatgtgtgtaaatgtgtgtgcatgtttgtgtgaatgtgtgtgcaagtgtgtgtctgtgtgtgaactgatgcctgctctggcgacctctcctctgttccctggactggcttcccgagcttgggccacacgggctctgagggtcccctgggtcatggtcttccctctcttctttgagtctggggtgctcggagctcccctgttttcgcctccttttctgtgcccaggttcttttctcggtgaccccatcctcctctgtttgattctcaacggcttggctcttagggccaaggtggctgcggtgatttgtaattcaggcaatttcttaatcttctccttctggcctctccccaggccagcccccacccctcctcagctccctcagcgccaggttcctgcccccaccccatgcccacccaagtcctgcccaggacatgctttttggatcctgtgcccccctctccctcccacaggctcaaaccgttccccctgggacccccttggcacagccccgcctcctcctccaagacagacgggccttctgcccccatggggcctcttgctac

SEQ ID NO: 41077 - DNA, 1281 bp, Artificial sequence
  DNA replication origin
ccccacctccctcccggacggggcggctagccgggcggggggctgacccccccacctccctcccggacggggcggctggccgggcagaggggctcctcacttcccagtaggggcggccgggcagaggcgcccctcacctcccagacggggcggctggccgggcggagggctgacccccccacctccctcccggacagggcggctggccgggcggggggctgacccccccacctccctcccggacggggcggctggccgggcagaggggctcctcacttcccagtaggggcagccgggcagaggcgcccctcacctcccagacggggcggctggccgggcggagggctgaccccccgacctccctcccggatggggcggctggccgggcggggggctgaccccccccacctccctcccgggcggggtggctgccgggcggagacgctcctcacttcccagatggggtggctgccgggcggagaggctcctcacttctcagacggggcagctgccgggcggaggggctcctcacttctcagacggggtggttgccaggcagagggtctcctcacttctcagacggggcggccgggcagagacgctcctcacctcccagacggggtctcggccgggcagaggcgctcctcacatcccagatggggcggcggggcagaggcgctccccacatctcagacgatgggcagccgggcagagacgctcctcacttcctagatgtgatggcggctgggaagaggcgctcctcacttcctagatgggatggtggccgggcggagacgctcctcactttccagactgggcagccaggcagaggggctcctcacatcccagacgatgggcggccaggcagagacactcctcacttcccagacggggtggcggccgggcagaggctgcaatctcggcactttgggaggccaaggcaggcggctgggaggtgtaggttgtagtgagccgagatcacgccactgcactccagcctgggcaccattgagcactgagtgaacgagactccgtctgcaatcccggcacctcgggaggccgaggttggcggatcactcgcggttaggggctggagaccggcccggccaacacagcgaaaccccgtctccaccaaaaccagtcaggcgtggcggcgcgtgcctgcaatcgcaggcactgggcagactgaggcaggagaatcaggcagggaggttgcagtgagccgagatggcagcagtacagtccagcttccgctccgcatgagagggagaccgtggggag

SEQ ID NO: 41078 - DNA, 914 bp, Artificial sequence
  DNA replication origin
ggggggtcagccccccgcccggctagccgccccgtccgggagggaggtggggggggtcagcccccctgcccggccagccgccccgtccgggaggtgaggggcgcctctgcccagccgcccctactgggaagtgaggagcccctctgcccggccagccgccccgtccgggagggaggtgggggtgtcagccccccgcccggccagccgccccgtccgggagggaggtgggggggggtcagccctccccgcccggccagccaccccgtccgggaggtgaggggcgcctctgcctggccgcccctactgggaagtgaggagcccctctgcccggccagccgccccgtccgggagggaggtggcggtgtcagccccccgcccggccagccgccccgtccgggaggtgaggggcgcctctgcccggccgcccctactgggaagtgaggagcccctctgcccggccaccaccccgtctgggaggtgtgcccaacagctcattgagaacgggccaggatgacaatggcggctttgtggaatagaaaggcgggaaaggtggggaaaagattgagaaatcggatggttgccgtgtctgtgtagaaagtagacatgggagacttttcattttgttctgcactaagaaaaattcctctgccttgggatcctgttgatctgtgaccttacccccaaccctgtgctctctgaaacatgtgctgtgtccactcagggttaaatggattaagggcgatgcaagatgtgctttgttaaacagatgcttgaaggcagcatgctcattaagagtcatcaccaatccctaatctcaagtaatcagggacacaaacactgcggaaggccgcagggtcctctgcctaggaaaaccagagacctttgttcacttgtttatctgctgaccttccctc

SEQ ID NO: 41079 - DNA, 1249 bp, Artificial sequence
  DNA replication origin
ggtaattacacagcagctctcaaacaatggctgcatatggataaggactgaaagagggttgcaaaaagggagaaaatgacgcaattgaatgcagcattttccccaaaaccttttgatttatttcaatgaacaacaataacaacacaaataaaaatggaaaagaagacactttcccctaagcccttaaatgtggctcccacttgaggctttggggagaggacaggccaatcagaccttcccttcccttttgtaggaggggtggtgatgcagggatgtgcctggtggggaccagcagggaagtgtgatgattatggaagcccaggtggggataggaaggggacagagtgtgaacagggatggctcctgagaggaggtgtacttggagcagactctaagatgtggagcaggaatgtgctgggggtgatccaggcagaggcaggaatgaactgagagaggggtcaggagcgggggccagatccaaagtggtagcctaggagcaggccgaggagttaggagagccccatggtgggcttaaggaagacccttggggctgcctggaggaggatggagggaagggtgtgcctggagtcatgagaccagagaggaggctgctgcaagcgtgtacagagatgaggccaatcagaactggggggagagggaggggccaaggatggtttctcagggcacatggaggtacctggttcaagctgaaacacagtgtggttagggggctgatgggacaaccagagagagatgctcaggaggccgatgtgttgatgggtctggagcttgggaaggaaacctgggctggacactgagtttggtttggggcccctccgtggaatgggtgtgggaagcctcagggcatggctgagtgtacccagggaaagtgagggccaagacgggcacatgccttaaaggaggaggaccctgcaaggagacagaggcagcagacagagggaggaggagggctgctgtgagaggcggctggaagcccagggcatggagacctgcaagaggggatgatcagcagggtcaggtgtcagagagggttcccccaagataaggactgagaagtcctcatttatcatcttggggacattagcaagagcaccttcagtgtatcctgggagggaaaggagaccctgaaaatctgggcactttgaggatactgaatgagaagagaggggagagattggacagtggctaacgggtgcatgggactccgctgagccaagtggtctcaccc

SEQ ID NO: 41080 - DNA, 1496 bp, Artificial sequence
  DNA replication origin
ataaaaatagccatcactcaaattgactgaacatacctgtgtgccaggcactattcttggcctttcatataaagtacttaatcctcctaatatcccagtgaggtaggtgctattactatccccattttacaggcgagaaaactaagacttcccttcattgcatactttcacctttttcctgattattttcctgctcttggttctctcatcctagaaatcccccagagctggagtcggggaagaggtgggtatgggcccggcttttctcctgcctctgccacctctcttaggacgtttctgagctgagttttctcatccgtaaggtgaggggttggctgcaatggctgactggctgcactctgacaccctgtggggagggtgctgacaccagtacagacgtcctggagggctgtcagaccacgacatcctcagccttgtgagtgggcatcaccagtgctgcttgcccaggatttaacttaaaaagccccgggagtaaggggtccctgcatttactccccgcctctctcctccctccaacttgcctgctgcactccacctgggtggaggtagcagagggggcagcgcgggctttggcctctttctctctcttccttccacagatctgattttgttgcttaacccccttccttgtggtctggaagtcaggccatggctggggtagtgaatgtgtcccggatgtttgtcctgcccagtctgtctgccttgcacttctgggagccccaaattcattcttacagggaggaaggtggccatgggactccaggggggaaatgactggcccagggtcacatgagagccaagagtgggttcccccatgctggaccccttgtgtctgaccccaagcctgagtcaggaaagcctggaaaagtgagtggaggaggaggagctcggggggccctgttctccattcagcccccacccaagagctgtgggcttccaggtgtgtgaggctgggcgcctggcacctgagctcctgcggtttgggtcatagtctgagccagagtgggagattcagggtagggaggtggtgaggggcacccaggtttgtcttatagggcactctgttcccggctctgtgtaatgaggggaggaccccaagtcctttggacagcgcatccatctcctggccataaagtgtgagcgtggagctgggctgatttgggggtgtccggaagaaggaaatgaaagggacatttaatgaggtcctagtacgtgccaagcattttcacacacctacatttgattcaatttccactacaagtggacactgttatacctattttacagacacagaaactgaggctcagagaggtgcctggagacggaaaagggtggggagcgaatctttctggcgcgccctctgtgcctcagtcaccgtgccagacgcctgcccgcgttccctatcgaaatccccccgcctcgccagcgaggaaggcgcgatcgtccccggaacacagacgggagaccggaggctc

SEQ ID NO: 41081 - DNA, 949 bp, Artificial sequence
  DNA replication origin
ggcggcgggggcgcccgaggcccccggcaggcgcggcggcggggtcggggcgcggagcccgggcgcgctgggccgagcggggcaggcgcgggagccggagccggagccggagccggagccggagctggagctgtcgccgcggccgctgctgccgccgctctgagcccgggcggcgggaggaggagaagacggcaggcggcggggagggggagcgggcgcggcggccccgccccactcgcttccccgggccggccctggccccggcccagccccgcacccgttcagtgccgggcgcccggctgggggcgccgccggggatgcggcgaggagcgagggcagcgcctgggaccttatctcgccgcggtcacagcgcaggggccggcgacccgagggccgcgcggcggggctcctgggtgacccccatcccagccctcccgtgctcgggccccctccccaagccggttatgttcacatccacccgggagggagctttcttccgggtggggctgtgcactgggcgcgccacaagctcggtcgcaattgagccttgccgtggacaggctcacaatagaaatgaggaaactgagacacctgaggtcaggcctctgtccaaggtcaccgggtggctgcgttggagccgcctgcgagcttaggcacgtttcaccggaccagactgtggatggggctggagtgggagcggttagaggtggagaagaggccagtgttgggggttggggggaggctcggattttgacctaacttctgtttatactgtggccacctgcccgtcacccccacctccaaccttctgaaggagcagagttcactccccgccaccctcattacagaatcttcctgtgatctcagaggatgatggaaattctctcctctgaatccttgggggcttagagcctcacaggtccagagaaaccccccacccccactgcag

SEQ ID NO: 41082 - DNA, 1060 bp, Artificial sequence
  DNA replication origin
agtctcccaagtagctgggactacaggtgcacgccaccacgcccagctaatttttgtatttttagtagagatggagtttcaatatgttggccaggctggtcttgaactcctgacctcaggtgatccacctgcctcggcctcccaaagtgctgggattacaggcgtgagccatggcgcccagcctctcccttcttccttggcccatctctatccccagcattcagcatgaagcctgcccagggaagcttctcggtgaatgtttgctgaactagttcctaatgccactgctggaggcagaggaaggaggagaggacagagaagtcccaaaactcgtctctcctgggtcctgggagagaccccccttaatcctaacacaggattcctcaagggatgggcagagaagtattctcaggggaacttccctaaaactggaatagttcctatattttccctctgaattgtcatgactcctagtttttttttttttaaatttcttcactttcattccattcttaggccaagggaattctgccatatataacaaatataggaattcattttagaaaatatgttttgagacctacattgtgccaggcatagtgccaagcattggagagagctgggaacaagacaagctcacgcagtttatattccagtggggaggcaggcagtaaacaaatgaataactaagtaaacaagttaatttccaataatgatgagaatgacaaagaaaaatcttcaagtgatgttatagaaagttacaggaagtaggaagggggaattgggaggtgggcagtatttataaggtggtcagaaaaggcctgcattggagctcagacctaaatgacctgggaaaccagccatgcagaagtctggggaaagatggtgtgttctaggcagagggaaccgctagtgcaaaggccctggggcagaaaggagcgtaatatatttcaggaacagaaggaacagagtggggctagaggcagagtgagatgtaggggagggaggaagctggacaggaaggtgggggccgtgtagagatttacaggctccgggaagg

SEQ ID NO: 41083 - DNA, 1570 bp, Artificial sequence
  DNA replication origin
gacaagggcgctggcggcgggggcgccgggcagggggccggggcgctggcccgccccaaagtcccctcgcggaaccgcgttataggcaagagcaagaagttcagcgagagcgtcctgcgtacacagatccgccacatgaagttcggcgcctttgcgctgtacaagcctccgcccgcccccctggtagccccgtcccccggcaaggctgaggcctcagccccgggccctgggctacttctggccgcccccgccgccccctacgacgcccgcagctctggctcctccggctgcccctcgcctacaccacagtcctctgaccccgacgacacgccccccaagctcctccccgagaccgtgagcccatccgcccccagctggcgcgagccggaggtgctcgacctgtccctccctcccgagtcggcagccaccagcaagcgggcaccgcctgaggtcacagctgctgccggcccggcacctcccacggcccctgagcccgccggtgcctcctccgagcccgaggctggggactggcgccccgagatgtcaccctgctccaatgtggtcgtcaccgatgtcaccagcaacctcctgacggtcacaatcaaggaattctgcaaccctgaggatttcgagaaggtggctgctggggtagcaggcgccgctgggggcggtggcagcattggggcgagcaagtgagggggctccaccaaggaggggggcttgggggggccctcctgcccgaagtcatactcttgctcccaccccacccttgcccccagccctctctccctgtgctttgcttgtctcaaatggctcggtgttgacccagggatggggctgggtagttggggtcccagaaagccgggggtaggggccaccctggaatggggcaggggaagggcacaccccctgcccatgcatggtagcccactgggtggtttctggaaagccctagaaactagggttcctctgccccttccacatcccacctgtctctctagcttgcttcctgctctcctgtgcggcgtctgatttctcggtgctaacctggcagctgtggggcccttaggagccccccaccgagggtggacacagtccctttccttcctgcagatgcctaggcaggaggagggcttcctgcctgtttggcaaagtcccaggcagaggccaaggatgaggcctgactcggctcctccctccacatcagccagggcatcagaagttgggccagggcggggtcttccctgctcgattttggacgaggcctaagtagaccccctatgccctgccccagccctggctctttcctaaccccctcaacggtgggaggaactggcagagggtgcgcctggccacagcctccccgcatctaaaggccccttcagttcttgaccaaaggtgctacgagaacctgccgtggaaacttccagttgtgcgtctgccccactcgctgtgtttgtccgtgggttcatacatgcattgggtgctaggccccaggctgccgggtggcaccctttacagttcctttgaacaggggcattgaaggcctggactgcctctcgcctcagta

SEQ ID NO: 41084 - DNA, 1526 bp, Artificial sequence
  DNA replication origin
ccttgtggcaccccacacacaccccagcctctgtccccagcccttgctttcagtcctgtgactcctcgccatcttctcacaccactgggatcttgcccagaggactctctgcctctaccatctgtctgtcttagcaggccaccgcagcctctggaactgtctggggtgcagtcagggctcagtaaggaccaggactttttcctacttaggtgtcagggccgggctttgatgtttcattctccaagcctggggtctgtgcttctctgggctctgtggttctttcgctgcacgaaatcacttcatattcccactgcccaccgtcctccctgtgatagggcagctctccaggggagagtctgtgcgtgtgcagctgtaaccccaagcaactggtgcctggtgcctcagtaccttccttagtaaagaaaggactggccatgcagacagcttacatcgccttaggagtcccttagcctctctccatttagtggcatctgacaacgggtgggttggaccggaacctggggtctcttgagagccctgtggctttaaagagatttcatgcctggaaggacagctggaaggacaggcctgggagcctggggcagtattcctggctgcccacgacctctgcaccatcatcctgccccagaccatcttggcacagagaataggcagtggtcgggcccacttctaggcctgtccccaccaaactcacgtctgaccgggttgggttccagcccaggctttgggatgcattggtaccagttcactctgagccaggcactgggcagacaagtaaatgagacccatccagggaagtatggtggctgaggtgctggccagctgaggagacaggctggagccggaggtcagcctgctcaaaggcgagagagtacggggcattggggacatggtggctcagcaggacttggtgcgggggagcagggaggacccacctcctcctttctgtcaccacgaatgagtccgtggaggagtccccacttgggctggatctgccacagagcaggggtttagcaggggcttctgagcaaacggctgccctcccgacactgtgtcccaattgtcgacactcctccgtgtcagcaagggcagccatggagtggcccagggccctctgtggagctaacagaggtggtgggtgatagaaaaaacacagttttggaattgggcctggacaagggtgtcctgactctgaccttggagtcagaggcaaattgcttcatctctgaacctctgtttccttttctaagtcgaggtcatgaagaccagtgattatcttaaatgatctcgggatcgctggctgagaggctctacttagggctggctggcgtagggacatccaggggaggtcagcgggcagtcctgaggtcccacccacccctccctctgcccgcaggcgcgggcccaggccgaggccctccgcatcagtgatgtgcatttctctgtcaagccgagcgccagtgcctcctcgcccaagctgcactccagcgcagccgtgcaccggc

SEQ ID NO: 41085 - DNA, 1724 bp, Artificial sequence
  DNA replication origin
tcctggcaaccgcgcgccagccgcgaggatcacgtgacggcccgcagctggaacgcgagcgcgcgccccgccgcgctcccgcccgccggggcctgggcgctgcggcgcgtgcgcgagcggtgccgcaccggccgcgggcgcagggagtattatgggctgtgggtgccgctgagcaagatggagctgtctgcagtgggcgagcgggtcttcgcggccgaatccatcatcaaacggcggatccgaaaggtgagccgccgcccggggcgggccgccgctgtccgcagccggggccggggccgggggccctcggggcgaagcggtcccgctagcccggctccctcgcccagccccgcgccgccgcctcctcgcgtccccgcatcctccccacccccacccccgtttttctcccctctgtttttcagggacgcatcgagtacctggtgaaatggaaggggtgggcgatcaagtgagtgtcgcggggtccgggggcgtcgcgggaggggaggcagcgggcaccggggcctggggtgggggtgcgcgctcttgctctcgccgcgtgcctgtccctctctggtcttcatcctgattttgtgcgtttgtgactcggcaggtacagcacttgggagcccgaggagaacatcctggactcgcggctcattgcagccttcgaacaaaagtgagttgttggggaagctggcaggggctgcgaggccgaggctcggctggggcgccgcgcggggaagcgggagagccggggagggcagcgcggagtggggcccgggaaggggctctttttaacctctggtgtttttcggccgcagggagagggagcgtgagctgtatgggcccaagaagaggggacccaaacccaaaactttcctcctgaaggtaacctggcccagccccagcagcatccccctctcgggcccccagccccggcacagcacggggcctggaagggagggacagatacgcggccgcccaagcgggccggccttttcagaggggccccagctgggcagggggtggttgtgagcccccccagaagcccctgatggcaggcctcagccagcatcagcttcaacaagagggttttgggactggggataatcctccctgttgaaaccaggggctggggatgcctttagggctccaggaaagggggtggctgaggcaggtgggggatgcccatgggaagggggcatttgtttgagctgttatgactgtgctgggagttggaacccagggggagagtgagtggggtcccacctcctggcagggcacaaggagaggatttgggggaccacctgcctccctgcccccagcttcccccgttcagtctttcaggatttgttcttcatggctcccctcctttcttggggatccaacttgaatttgacctcaaatcattttactttgaatttatcacccaggctgggccactaactttagggctctgagcctcagtttccccccactcccggccatttctgggggatggggatgtgggagtgagagcatagcatattagtctctgctagggagggaagaacttccagaggaagccatcttggaggatttgggtttttattttattttgacaaggaaaaacagagtctgggaaaggaagggcaagatggccctaggtggcaggcacggctgcaggtgggactcagtgggccccctgtcttcctgtagtgctacggatgcctcagggccccctc

SEQ ID NO: 41086 - DNA, 1089 bp, Artificial sequence
  DNA replication origin
ccgagggcccccggccccggccccggctgcggacagcggcggcccgccccgggcggcggctcacctttcggatccgccgtttgatgatggattcggccgcgaagacccgctcgcccactgcagacagctccatcttgctcagcggcacccacagcccataatactccctgcgcccgcggccggtgcggcaccgctcgcgcacgcgccgcagcgcccaggccccggcgggcgggagcgcggcggggcgcgcgctcgcgttccagctgcgggccgtcacgtgatcctcgcggctggcgcgcggttgccaggacctccccctcccccggggcggttgctagggaaagtcggcgctcgcggggcgggggcgcgcgctggctcttaaaggggccgcgcgggcggagggagcaattgccggccgacccgatgggtgcccggcttgtgggcacgctgcggccttacgcttatcaccccccctcacatcttgccggcgcccgatcgctgacaccctctccttgcctcttaatccccacgcgagtctcgccaggccccgggcggagaagggctgtggagcccgagtctcgccgccaccgcgcatctcccgcagcagcctgcaaacagttaaatatgatgcagcagaaatgcagttgctgttgccttgccaggccttgcgggaatttctttaaaacatcgccccccacccattatttatgtattcgtgggagggtggttttgtaaccagttcagaagagttaaaacaaaaacgccaccgcaggaagggggtgtgcggcgaatggggccgaggaaggccggagtgaccgtgggcatctgtctgcggccggggtctcgggcggcacctgtcctcgcccaggagaccggggaggattcggcggggccggtgtggcagtgggggagggagagggaccgcgggcaggaacgggctccccgcactccgccttgggcccacagcgggtcatcatctggtcattcggcagaaaccgccttcgcggtcatatctgtgttttccgattcccagcacccctcccggccccccgacctggccgcgtccctctccccgcccgcagctgcgcg

SEQ ID NO: 41087 - DNA, 1048 bp, Artificial sequence
  DNA replication origin
aaatacaaaaatgagccgggcgtggtggcaggtgcctgtaatcccagctactcaggaggctgagtcaggagaatcgcttgaacccaggaggcagacgttgcagtgagccgtgatcacaccactgcactccactgtgggcgacagagtgagactctgtctcaaaaataaataaataaatagaaactagagtgttgggtctaagggcgacagtggtaattaaaacacaaagatcaacgcactgttcaaagattcccagtgcgcggcgctgctagagtcgctgagtcctcacaaccccggctcgtggcgcgagcctggtgccacccgggcggtggtgggagtgtcgcggcccggggtgggtgggattcaggctgccgggggcgggggggggggttgccgcagagggggctggggagggcggcacccccccattgcccgtcctgggccctgcgtcccctggcgggctgcggccagagcagatggcagcaccggcgctggaggtggcagatccccggggaatgagcagcgggatagatcactggctgcagggcagggggcgctgtgagtcgccctggccgagctgtcggagaggagattacttagcagctggtagtgaaaggagacgcctgggcagattggagcagaacggagactcaaagccgggactggggtgcctgttctcacagtcactgacccccacctgttcgaagactggcaagattctgtgaatatgggggaggaagagccaatgattcccagcagaagacgcaagattctccagtgtcataaactggatagtatatgcagagtatgtggaaaatgctagctgggttgttccccaagcaatgcaaacaccatcgtcccttccctccaaaccatgccttgtttgtaccaaggactgcacagaacttggagtgtcaccgagtgacagaaaaaggacccaacacggcgcaaccgctcagcccgagaggcgggtgtattgtcgtcaaccaacatctgaatgacgcttgcaaactgaatttgccgtgcagggtttccaacagcaggcatg

SEQ ID NO: 41088 - DNA, 890 bp, Artificial sequence
  DNA replication origin
agagaggaggcggctcaggaagaaagtgtgttcagccgggtcatctgctgccggtggaggggcaagatgagaactgaaaactatctctttctcctggcaacctgaaggtcgctggtggtgtggccaagagcagttttcttggagcgttggggaggggacaggagccagattgcagggggatgaaagtgaacaggaggcaggaaactgggacagaacatgtagaaagattttatatctataaatcatatataatttttttctatgaagggatgccaagaatggaggaaaatgtggctccacagggtggagatagcagtccacgtggcttgctgatgggaaggagcctccagtaggggcgatggtgtggaaagctacagagggaaacccactgaaggagaggccgagccctgagcaggaacagaaggctgggctttgacagggcacagactatggcaggccgcggagtcaggaattgtgtctgtttttgtttgagtctgtatccagctcctagaatagcacctgtcacatagtagctgctcagtaaaaacaatgttgcatgaatgaatatagacaccaaaggaggcagggttttagaggtggagtgaaggtgagtgtgatcttttctgctttttggtgctcagtgacggctgaggtagggtcatgggctgaggactgggaggggattggctgggaacgggtgactgcgggagcagctgtgcaggagaggagctgtgctcactgtgccacgggaatgccaggaggattcatttctcatccactggacaacaccagctgaatcgaggcccatctttccacccctgaattgcagctccaccttggtcatataccagcttcccaaatatccttgattctgtttgtgtgtggcattt

SEQ ID NO: 41089 - DNA, 1296 bp, Artificial sequence
  DNA replication origin
ctccctccccttttgaaaatccctaataaaaacttgctggtttttgcggcttgtgaggcatcacggatcctaccaacatgtgatgtctcccccggaagcccagctttaaaatttctctcttttgtactctgtccctttatttctcaagccagccgacacttaagaaaatagaaaagaacctacatgattatcggaccaggtcccctgatagggagggaaggagggaagggtgaaggaaggaagggagggagggagggagatagggagggaaggaaggaaggagggagggagggagggaaggtgggagggagagagggagggaaggaaggaagagtcaatgaagggagggagggaaggaaggaagggtcaatgaagggagggagggaaggaaggaagaaaggaaggaagggaaggagggagggagagagggagggaaggaagggtcaatgaagggagggaaggaagggagggagggagggagggaaggggggaggcaaggaaggacaactggttcattcatatactagttccttcattccttcaacagtaacccaagagcacccactcagggccacggctcaggcaggaacctgggatgcaaggatggatggcacatggtcctccctccaggagatcacagtgtagggaaatcaacgaggacccatagtgagcccctccatcccacgtaccccctcctctatccacttgtgggcactgcagcctggacttctgcatcagcagctgtgtggaggtctgttaccctgagatctgcagccaggacagggggctgtgcccaggaacaaggtaggtcaaagggaggtgggagagcccaggcgggtgggcgcagcatgggagggtgtgttgcaggaggctgtggtggctgctctgctccagtgaccagagggaatggctctagctacctggtgggctggtgttgggcacacgaggcattgtcgggggggctatgatcgtgtgtaggtccctcccagagggccccaggccctgggtttccatctttgtggcttccatgcaactgcgttgtgcaatgtgtttggtctgagcctgatgggaggaagaaagctggtcttgtggggggctcccctttccctaccaatctgggattcctgtgtccatccccagctaacacctggttgtgaaggacactggtgtccagcaggacagggtgtcaccatctgatcactctacatggtaggataggcaagtctcccctcgccctttggccagctgtaggttttcatagttaaagttgaagtccaggtcaggcgcggtggctca

SEQ ID NO: 41090 - DNA, 1509 bp, Artificial sequence
  DNA replication origin
gcccaggctggagtgcagtggcacgatctcagctcactacagccttcacctccctgaactcatgcaatctcccattcaccctcccgaatggctgggaccacgggcacatgccaccatgcctggctgatttttgtattttttgtagagatggggatttgccatgttgcccaggctggtctttgaactcctgggctcaagtgatccacccgccttggcctcctgaagtgctgggattacaggcatgagtcctcatgctcagcacatgttgagttaatttttttttttttttttttttttttttttgggacagagtcttgctttgttgcccaggctggagtgcagtggcatgatctcggctcactgcaacctcccacctcctgggttcaagcaattctcccgcctcagcctcctgagtagctgggattataggtgcagaaacagggtttcaccatgttggccaggctagtctcgaactcctgacctcttgatacacctgcctcggcctcccagtgctgggactacaggcgtgagccactgtgcctggccgagttaatttttgtatatggtgagaggtacacatggacataaagatgtaaataatagacgctggagactccaaaagaagagagggtgggaggggggccagggttgaaaaactacctattgggtgctatgttccagtagattgggtgactcagacctcagcatcacacaatatatccatgtaacgaccctgcgcacgtacccctggaatctaaaagaacaagaaggagcccctggtgcgagaggagaacacaaaaaagaaacaggtagtggggcggggcacggtggctcacacctgtaatcccagcactttgggaggccaaggaaggcaggtcacttgaggccaagagttctaagaccagcctgggcaacatggtgaaaccccatctctactaaaaatgcaaaaattagctgggcatggtggcgagtgcctgtactcccagctactcgggaggctgaggcaggagaatcacttgaacccgggaggcagaggttgcactgagccgagatcacaccactgccctcctgcctgggtgacagagtgagaccctgtctcaaaaaagaaaagaaaagaaaagaaaaaaaggtaggggtaagggcagtgggcagaggtgtgactgggtatggggctgcggcaggcggtgaggaggtcgggggcagcaggcaggacagtgcctcacctttatcctctcaagccgtcgctttatggctcgactgtttttatctagctcctctaacatcttataggggttgaaggaaagcggtttctcgtggtccacaaagttttcccagcagtcagcaaactctgagagggaagagggaaaccagccaggccccaggggcagcagctgcagtgccaggagctcttgcttcctttcccctctcttctcttcctctccctggacattgctctgtctggggaattctccctcccgggtggtgtcagatcttgggccttgactgagc

SEQ ID NO: 41091 - DNA, 1022 bp, Artificial sequence
  DNA replication origin
gcttcttccccgctttcccatgggatttattttcaggacagctgggcaatttggggagccgggaaggctgcacctgccccaccccaggccagccgggcggcctccctcccctgctccaccttcttggggtgctgctcttcctctccctctccctctcatggcacccggcccttggggcctgcttcctctgtgcctcctccctctcaggacagtggaagaggcgtccgccttcccctgaccccagcgaccgccgtcccctcctctcccctagtgcctgcattccttcctctttccttctgcagcttttctctcttgccccctcccctccagcttcacaggaactttcccgcgcctgctttccttcgtgctgtatggcttttctttccaggaggcatccggactgaacagtgaagcggccagggatgggggggtgcggagggggtcggggaggggggcgggggagggcagtgaagctgggaggtggacggtgaagcgtgggggactgtgaagcggggcgctgacaggggatctccacgcaatgagctctcccggggcaccggccagaagccacgccttccaggaatggaccacggaccggcctcagatggctagctgtggccacctgcccaggcgagctacagggaagaagacggtggcttccaagtgtgcccccagccttttcagggcctgtaaggtccacggttctcatcatcatgtttaagatgttgtcttcccgctctcatgttctcacaacgaactgcggaattttccagaggctgcatgccatgcaatactgcaacaggtttttacgcaggagatatgataatccacctaactattaagccaaacaaaaaagaggcaacggggcgtgggggggacacggcggggagtaaagcaacgccaactctcctcactgaatctttctgttttggaaaatatatttttcataaaatgtgttacttatgttaataggtaatggcttcaggcccagtgcggtggctcacatctgtaatcccagcact

SEQ ID NO: 41092 - DNA, 1111 bp, Artificial sequence
  DNA replication origin
ccaacctccgtgtctcagtttctccatctgtaaaatgggggtaagaactaagcacctacctcgccagcgccttttgaggatgggtgcggtcctggcggtcccggccgcacacctgctgttactgtagtggtcattattcttgagatgaggaaactgaagttcagagaagggttgggacctgccaggatccacacagcagggacatcagcaagcaatgggcagggcggtgtggaggagcacgctgtggagagaggagcacgaaattccccttcctaccagttagagtgaggagattcagccttttccggggggaggaagggttagagtgtctgccagcctctcgtggcttctgctgtagtttcgctttcggcattctgcaggggctccccagcccttcccagagccccgggcgggcctgagcgggccactttgcggtggctctgcgcgccagggtgtttcctggtccattagtgattatggccaaggctaggtatagctgtaaggagggtggaggaggggcaggctcgtcctgctggcagtgggacagcctgggagggatgtcagggaaggctacaaatacctgactcttaagggtcggctaggagttgactggagggatggggcacccaaagggagggagggccggctggcagggggcacatgggaaggggcagcccaggctcagggcttcactgcgagcccatagaggcccgacaccaagtgggtgtgccagagtgttagaggaagcaaggaggcgagcattctgtcgttgggcagcattttgggactgaactagcgttaggtagttcccgggatactgtaaggtagaggcctcagctctagggattgggaggcggcagggcaggggctctcccaggctctttctgccttttaacccctcgctaacgcccattgccttccgtcttacctagcagagcctctggccaggaccatagggcatcgctttgcttttgtctgtatgttttatacacagtcacacgtcggttaatgacaaggatacattttgagaaatgcattgttaggtgatttcattgtacgaacatcagagtgaccttaggcacacctagatggtacaacccactgcacgcct

SEQ ID NO: 41093 - DNA, 1005 bp, Artificial sequence
  DNA replication origin
gcgtgtccccagagccctggctcctttccactctccctcccctggtgtgggaagggtgtcctgggacttgcgggagcccgctttcctccaggcacccgagggtctccgatggtcgtggggtctaatcccttcgatccgcggcgcccacgctagtggcgcgctcctgggttgccagcgcccggctcttcggaagcgcgttccccttggcgcctctgggctcctgcactgcggagggcgcggcgcggtgcggcgcggcgtcctccttaccggctgggtccaaacaattaagatgctggtgccgcccctgccccccacttggggctgcactcggcagccaagtgcgaccctgttatctcagacccagctgcccgggccggcaaccaccccttctgcatccagccgagcctttcggggcgctcactgtgcgccgcgccctgcggtcggacactgaggactggagagggggcgacgccccctcccgcgggctgcacagtcgggggtcccagacgcggtggcctgggaggagcctgaaggcggagtgtggccgagagccaacacgggccggccactgactggctcagtgacgctgggctggctgcccaacctccgtgtctcagtttctccatctgtaaaatgggggtaagaactaagcacctacctcgccagcgccttttgaggatgggtgcggtcctggcggtcccggccgcacacctgctgttactgtagtggtcattattcttgagatgaggaaactgaagttcagagaagggttgggacctgccaggatccacacagcagggacatcagcaagcaatgggcagggcggtgtggaggagcacgctgtggagagaggagcacgaaattccccttcctaccagttagagtgaggagattcagccttttccggggggaggaagggttagagtgtctgccagcctctcgtggcttctgctgtagtttcgctttcggcattctgcaggggctccccagcccttcccagagccc

SEQ ID NO: 41094 - DNA, 1545 bp, Artificial sequence
  DNA replication origin
ggaggaaagcgggctcccgcaagtcccaggacacccttcccacaccaggggagggagagtggaaaggagccagggctctggggacacgctcgttgcctgggctgcgcggaccgcggcgtggacaccgggggactgcgggggtctgcactgggctcgcggcgccggcggggcgggaaccgatcaccccgtgggagggggcggagcgccaggccccgcccccgccggccgcgcgcacgcacgcacggggaggggcgcgcgccgggattaccggcaaaccgagggggcgggggcgggggcggggacagggacggcgcgcgccggctccgagataaacacggccacgtgacctccccgccccgccccacggccgggtaaacaagccccggccgcccagccaaagccccgccgcgcagggctcgccctgctgcggtgagggcacgcagtgggaaggggcgcagcgggtgcaggacccccgccggcctttcccggggggtcgggggaagcggggtttggaggcgctgctgagctgtgacgcaggcggccttggggcaggtggaaccacccggaaccccgcagagccaggccaacccccaagccccagtccccactccgatttaaagctgctgcacagaagacacagcacgggctctggtccagactgcggggtgcggcctcgttcaggagacgccaccgctctggggcctcatcctaaagtgggcccaccagtaaccccagtcgtatagggctgtagtgaagattagatgtgttaagccacggaaagcatttcgatcagtgtggtacacagtgaaggcaaataagcctgagttaaatcaatgaaaagcccagggagcgtaaaagtctgcggctcctaactccagtctccccagcctgggtggagacagctcccactctgcccctggcagggtgttaatgaatcttgtcttgtctcaggcaatcttcagcagggccctgtgaggttagggcctcatttttataggtggggaaagtgaggcacagagaggttgagggctttgccctgggtcacacagctgtaaaccttcagaggtggaaagcctcagcacttctcactgaactggccaaaaggccagcaggcaagagtcctagtcatctctagtggagttgcctgtgtatcaggcagcccgtagttcacatctgcccagctctatgaccctgggcaaggcctcatttgctgtaggcttctgtctctccatctgtaaaatgggttgctatgagtggttcaaagagtcaatgcctgattcataataggggcttattgacagcctggccatggctgtgaccactgacatcattcctaaaactccatagggccactccttccaaaacgatggagaaccattcacaagtggggaagagaggaagtcattctggaagggggaacagcagggccctggacaggctgaaatgttatctggaggcctcaggcacagctggcacctgtacctgataatgtcacattccctgtcccgggccccgagcccctccctgtgccatttgctgtgcttt

SEQ ID NO: 41095 - DNA, 1520 bp, Artificial sequence
  DNA replication origin
cagtgagccatgttcatgcccctgcactgcagcctgggtgacagagtgagatcttggtgccaagaaaaaaaaaagtttacagtccaaccccattgtgagtgaagcccctgcacgccagaactttaagaccaaaatatgatacctcctcacagaggctttccctggtgaccctctcccatgctgtctccactggcaccttgcagttctatttctgcagagcacacagctccatctgaaggcatctgtctgtatctcctcattcactgtgtgccgcctctgcagaatgccagctccctgagggaaggggtggatccctggggcttagactggtgcctggtacctgaccaaccctcaataaatattttgagtgactggccgaaggaatgatgatctcgccctcttgtgctaccctgcgggctccatcgtagagggagttagtgctgtgcctgcttcaggctacacagcacgaaaagcactgagctttgtggaataaatcaattctcttttaagtggagaaaaccctaggaaaaaggagaaggaggaggaacagctgcctcaatcagaagagtaaaaccccaagcacagctggaggaagaaaagatgctcctgaccaccttgaccttcacccttggcccgagatgccaggactgagttttctctatggagaaagaagatgggctgccaatcagcccagttgagctcctgctctacctccctatctaacttgctcggtgaccttgagcaggtcacttcctctgcctgggcctcagtttttgtctctgttaaatgggaggaggtgaccccctaaggcccctcccagtcggcctggagcctcccaaagggctgcagggaggaggagacaaaggaaggacagtagtgcgtaccaggaaaggaacttctccccaaggatttccccagccttaggcgagccccctcgccaaacaagtgcacgggaggtgtagacgccaggcccggacaaagtctagccccaaagtgtggggttctgaaaccagcagaacagacacctccttaaattgcagggtgtatgttttgaagaaggcagatggggtaggagactaggggatgccccagcgcagggggcgggcttcagagccctggcctgggctaggagttgaggtgggggtgggggcggggaatagggatgtgctcgggtggcgtagagggggcaggatcggaaaaggccaaagtccagcaggaaaaacttcagaggccggaggagacttttccaaagctccacttacaacttgaaaggatttggtgccaagcgtccagagtcccgagttcaaaacccagctctgaccataacgcgctaggcaagtcctttcaacttgggcctcagtctccccatatttacaataaaaggggagcgaggtgggatggcgctgaggatccctacgtccgatcctaatctccagctcaggcaggctcggccgccactagcatcctggagcgacaacttttgttctactcgccctacacggtggcagggaaactgaggc

SEQ ID NO: 41096 - DNA, 1006 bp, Artificial sequence
  DNA replication origin
tcggtcaccggctggggcggggcggaggctcgcgcgccccgtcttgctgtgacgccggggcgggacgtgatccttaatacccaggcgggcgcctcatagcctcccggtgactgccaggggccgaagtggcagggcccagtggagccgacgacaaagtcaaggctcagagcggggaggccatttgctcacctcccgcagcggaggagactgggcccgaggcgcagcccctcgagttgcaggagagccgggacccaaaaggcttcccaccgtgtccggacgtcgcagggccgaggtctccctaatccggccttctccgcggcgcagtttggccagtgtctccacgtccgtccacccacccctccatccgcccttccatttgtccatccacccgaccctcggtggtcggtgcccagacgcacgggtcagacgcgggcgctgcctcgagggctcccgggccgggccctcgttcgcggcaggagcggccgcggtggagctgaggtcccccggggacggattttgccgccgcgctgccccagccttccccaaacccgcgtgtactgggcgctaggtgcttagtgggggctcaaccatttgtggcacgagacgaactcttgattccccaccccccttcctttttcgctaacgcgcctccattcctcactgggagcccggcgtcgtccctgctccttcctgtactgaccccaacttctgtcgctccggcatcccctcggggactcgggtctgcctgccctcaccgcacccacctcccaggttcgccccgtcttttctctggaccacagcagagacctcgcggagctgccctccctccgatctcagccacacagtgccagagtgtgcttctaaaatgcagatctgacggggtcaccctgtgcttaaaaattttcctccctatttccctcacaataaaatccaacacctctttctggcacatagaaaaagagaataatagattcacacctgacttttcatcaagagcaacaaagcc

SEQ ID NO: 41097 - DNA, 1334 bp, Artificial sequence
  DNA replication origin
gatggatggatggatggatggatggatggacaggtggatggacagatggatggacggatggatggatggatggacaggtagatggatggatggatggatggatggatggatggatagatggatggatggatggacaggtggatggatggatggatggatggatgggcaggtggacaggtggatggatggatggatggacaggtggacaggtagacggacagagggatggacagatggatggatggatggacaggtagatggatggatggatggatggatgcacggatggatggacggatggatggatggacaggtggacaggtagacggatggatggatggacaggtaggcaggtagacggatggttggacggacggataggtagatgggtgggtggatgggcgggtggatgggtggatggatggacaggtggatggatggatggatggatggatggatggatggatggataaatacgcagatgggtgggtgggcgggtaggtgaatggacaggtgggtagatgaagaagtatagacatggagagagacaatggctagatagacttagaaggtgaattaaacatgatcccaaccctccaggatttcccaatcaaggaagagggtgtgctaagtgtggagcttgccaagaagttgaaatattttatctgtagtgacacactcagagtcttgcattttccagccacaccatagtgtgtgtgatgaagaccagccaggcaggctgtgacttggagccaacatacttgattgctccaataacagatttgtatgttgcttcatttgacaggctggtcgagtgcctactaggtacgaggcactgttctaggctctgaggacagagtagtgaacaaggtaactccaggtggagtttccatggggagtggagaagggagatgaggagagatatacacgtggagtgagccagatgaggccagatgctacagagatcaacagagcagagtgagaaaggggggcttggggcaggggcaggtgggacaggatgggtgtcacttgcatggatgcctgaaggcagcataggggtgagtcacagctcctctgagattggggagaagcagggacttccccaggatcatcagtaacaatgtggccgggtcaaggctgtcacccaagtacatggacaggtgttggggttctggggttcctgagctgacactttaaaatactggaaacacaccagacatggtgtcagcagaggaggaaagggtggagcttggacctagccaccagcagctgcatgctctccctaagcctgcgtgccctccctaagcctgcgtgctgtccctgtcctgtctgtt

SEQ ID NO: 41098 - DNA, 1233 bp, Artificial sequence
  DNA replication origin
agttgtcacagaagaggctcctcaatgtggggaggggaagacaagacgtggagaggtacttacgaggcccatgataaacatctcaccattcctgctcagtcagtctctctctctctctctctcagatgcgcacacacacacacacacacactctctctctctctctcttcctggctcttgcaccagatcctccaaattctgtttgacctgcccttgcacacctccagggctctgggattccagcagttggtctcctgccccctagggccattagcaaagccagaggaagctggatggcaaagggcagtggggcccttcactctttcccggaagaagtgtgctgaggccagacgcgtcacgtgacagtgggactcgccctcctggaagccagctcagctggtggagatggcacctcagaggcctcggcaggccctccacccagccctgcctcacggctgcctgccgtctgctgaaagattagtccgagcacgaccaggacgtggacagctccaaggccacctccaccagcaggcctgccctgactctcccagcactggccattacagctccttcctggactgacccctgcgtggttccatccccatgcaggtcccctcccccagggccagcctgaggctcactcaggcttagcagcaaagtgcttcataaactgcaaagtgccacatacatcgcgcctgtggccatgtgttcaagaatgctgtgactaaagtgaggagaaaggcagtttctgtgccacagcctccaccccagatacacgagcccgtggagctgtgggaaagaaggaggaggtgctggacgaagctggaaatggtaaggggaggctggggaaacatccagctgtcagcggcctccccggggcacgctgggatcagccaagagaatgcaacagccaggggtgggagccccctccgcggttgcacacgccaggtccctccagtcttgcaggttcaaatgaaggcttatgtgaagggggaatcgctctggacagctcagtgcccctcagagtcacatcaccaccattttccaccacgcggaggtggttgaaaaaaaggagtcacagatgggtaaggtttgaggggcgtcgggctgacgaggcaaaaaaaaaagtaggtgctgtggtgctgatgggaggttctccctccctcacaggacgccaggaaggaaatggggccgctacagaggtggtgaggtgccagggcccacggagggccc

SEQ ID NO: 41099 - DNA, 1626 bp, Artificial sequence
  DNA replication origin
aaggtgttttgctgagcgcctccacatggaggacctcatgggagcctccagaccactccaggagcagggtaaaaattctctacaactgcactgaggtacaacaaactgcacacattttgttgtgatgtacgtatacacccataagcccatcaccacaatcaaaaatgacaaacatttccatcaccactaaaattttgccatgcctctctgttctctctcactccttcccattatagatttatttttatttctttagagatagggtcttgctctgttgcccaggctggagtgcagtggcacagtcacaactcactgcagcctcaaactcctgggctcaaaacgatccacagtctcctgagtagctgggactacaggagcttgttaccacacccagctccagtttataaattcatctccagtttataaaggaggaaaccgaggtactgagaggttaaaaaaccttcctgcagacacttgtccagcaagtggccactccaggatttggaccaaggtgatgtgtcttcaggctgtgtctctgccactgtgccacgctgctgggtggtaggcagcagtgggtgggtgcctgcagtggtctgtaaagaccacctgagatgtccttcctcctctgttccaccctgtccaggtccaagaagacagtctatgaagagagagcaggtgtgactctctcagtgtgctcctctgtgagaagcaggctgacatcccaaagggaagggcggataacagagacagtgcaagcggaggagatgagggtgcctcaaagccgggaggctgggtgatgcaggagcctgcgtgtcccgaggggggtgctgggcccagtgtgagtacgtgtgactgtgactgagacagtgtgactgctgaaggcagggacacagcagctccctgactgggggcagaaggcgttaactgtgtgaaggctggttgtgggtgggtgggctctgggcctcgaacccgggggctgagggagatagtaaacagcagggtgactgacgggaagatcatgttggtagccctgcgaagatgctgcagggctgtgggggtttgtgtgactttgcagttcaacaaattcaaattcagccaacgctggcagggcctgttgtgccaggcaaccagctaggaggaggagactcggacccagcttgcagctgaagggcgctggctgccgggttctgtgggttcaccttgcggtgtcttcccttgctaacactgagtccttacaatagccccatctccaggttgaggctagatggaggggacagagggaagtgacttgcccaaggtgacccaagctcccgagtgccagggcaggatctgaattcaggctctcagactgcagagcctgagtccctccctgccatgcctgtgccagggtggaaatgtctggtcctggaggggagcgtggactcctggccttggctctggagacatccccctagaccacgtgggctcctaacctgtccatggtcactgtgctgaggggcgggacggtgggtcacccctagttcttttttccccagggccagattcatggactgaagggttgctcggctctcagagaccccctaagcgccccgccctggccccaagccctcccccagctcccgcgtc

SEQ ID NO: 41100 - DNA, 611 bp, Artificial sequence
  DNA replication origin
tgggaagaggtagacaacagacaattgagatctaacttatcaccaccatgaggaggcggggcattcaacagagagaaatcaagcagaggagactagggactttggtggaggggaagtgggggtggggaggcctccccagggaggtgatgttttagctgagagctgaagggctgagggatggagccagccagacacctgggggaaaagaactaggtagagggaacggcgctgtcaatggctctgaggaagggaagtgcttggtgagtttggggacacagccaagaggcccgaggggctgcagcagagagaggtggggcgggtgggccaaactgaggtcagataggtcctggggcaggtcttgttgggcctgtgggtcactgtcaggacttgagtgccatgggagccactggagggctctgagcagggtcatctctgccctgtagccccacttgggctgctgtgcaggggacagactgcagggtcggggcagaagtcaggaggctaccacagccatccaggcaggaggtgacagtggcttggatttgggtagtgggtagagatgtgagatgggttggcttctaggttattctgaacttcagtccaacaggatt

SEQ ID NO: 41101 - DNA, 820 bp, Artificial sequence
  DNA replication origin
accacgagtgaatgaccctctcttacagccctccagagcagcccccacctcccaggaccacccttcccctgcctcttacgatgacgtcatgtgtgtccctgtgcccgcgcaccctcccacccccagcctggaggggcctggcacagaggcggcggctgagacttcctcttccccatcccctcctaccccagaacgttgcccctttcctgaatctagcaattaattacgcaatcatttgttcatggcctcttctgctgctagtctgtgagctcccgaggcccaggtgttgtctaacttattcaatgccttacccaagggcctagcatacagtaggtgctcagtaaacagagcctagtccccatcaccccatcacagcttgggctagacctccaggtttcatggaaacggaggctagatggaggagtgctccctgcaggggaagggccaccttccagggctggctctcctgctgccctgtagctctatggcctctctatgtctgcagtcaccttcactggttccaggagcaggttggatgaggatatgggtggaggcttttgcttctctggtatcctgccattctgtgatgacaggacacaacatctgtgtggaggaaatgtgtgctgggcctgagggtgctccttataaaaattacatagtcaatgtccatcttaggctcagctgattgtttagtctctaccaggccttgtgctaagggctttacatacattttcacatttaatccagcacacttataaggtgtctactatgactatataaaacttttagaagaaagcacaagagaaggccgggcgcagtg

SEQ ID NO: 41102 - DNA, 1150 bp, Artificial sequence
  DNA replication origin
ggcagcgggccccgcaggcaggacagctcctcgcccgccgccgcgccgccgccgggggcccgttggggtcggggtcggggtcggtccgggcgcgccgcctttgctcacacccccaccaccccggcctggcagagccgtcggccagtccgtccttacccaagacacgacgcgcaggatggtgtgcggctgccggaccagggtgtaggggtcgaaggcgcccccggctttgcccgctccgtacgcacccccttccatcgtggctgcacccgcgcggtgccccccgctcggcgcgcgccgccggcccgtgcgcgtgcgcggcgcccccgccccctcccctgcgcgcgcggccggcggcccagggctcccgcgagggggcgtcgtgcgcggcgggcgcagctcgcggggcgcgggcggggggctgggcagcgcgcgacctcgggcgcgggggcgcgcgtgctgcggcccggggctcagggcgcgctcgcagccagtgcggtgacctctttgcaaagtgtttgggggagggcggtgcgtgcacagcaagtgtgggccgtgtccctgccccgcatccccggtcccctgccccggtcgcagcccctctgagccgtcggctctgctgaaaccatcttcacgcttgatttgtttggctgtttcctgccactttgtcggccccaaatataatgagagggcaggagctgtgttcgtccttcttagagggtgcttggtacgcagtaggcgccgcatgaatatttctcgaatgaatgaaccacgagtgaatgaccctctcttacagccctccagagcagcccccacctcccaggaccacccttcccctgcctcttacgatgacgtcatgtgtgtccctgtgcccgcgcaccctcccacccccagcctggaggggcctggcacagaggcggcggctgagacttcctcttccccatcccctcctaccccagaacgttgcccctttcctgaatctagcaattaattacgcaatcatttgttcatggcctcttctgctgctagtctgtgagctcccgaggcccaggtgttgtctaacttattcaatgccttacccaagggcctagcatacagtaggtgctcagtaaacagagcctagtccccatcaccccatcacagcttgggctag

SEQ ID NO: 41103 - DNA, 2470 bp, Artificial sequence
  DNA replication origin
gggagccctgggccgccggccgcgcgcgcaggggagggggcgggggcgccgcgcacgcgcacgggccggcggcgcgcgccgagcggggggcaccgcgcgggtgcagccacgatggaagggggtgcgtacggagcgggcaaagccgggggcgccttcgacccctacaccctggtccggcagccgcacaccatcctgcgcgtcgtgtcttgggtaaggacggactggccgacggctctgccaggccggggtggtgggggtgtgagcaaaggcggcgcgcccggaccgaccccgaccccgaccccaacgggcccccggcggcggcgcggcggcgggcgaggagctgtcctgcctgcggggcccgctgccgccgctcctccttcccgggcccggggcgggcgggatccctggtgctcgcgggagacgccgctccggctcccggagccctggtttcctggggcccccggttcgtgcgccccccttcccgccccgattgctgtgacctccaggccgcggctatgccgcgaaaggctcggattgtgcgcggccgccagggcggactggggaccgtggggacggagccagggtttaaggtggccttttttggggggtggatcagggcgtggaccatctcggtggggtgcatgccgcgcctgcgatggacgttggaggaggagagggccgggaaccgggttcgtattgcctagcccggcccgtgtggagcgatgagtcgggaactgagtacctctcttccacccgggaactgcctctccttctctgcgtgaccttgggctgggagccacccaggaaatgttctcgagaaatgaggacttcaattccgaggtggggagtgtcatctcctctctcatgcctcagtttcccaatttatagacaaggtgggcggagccttcttgaggcccccttgggctctgacatttcatgaaccggtaacacccctcccactcagcatgcacctggatgcccaaggcgggtgtctgggagaaaggtctgctcccacagtgaagaggccagggtggcctccagcctagctggggggcagggtcctcagtgcagagggctgagtgggctcttgttcagacgggtggtcagggagaggatgggtcagagacagtgagcacagagggaggggttcaggtgccttgagtggcacctcatggaaagaagccctgctggggtctggagagggggtttctggggctccctgggtttggctggctgtatcccagaaactcccactcgaggttctggcctctgcaggcctggggcccgttccttgtgggcttagactaggaatgggctagactgtcagggaccccaggggctaccccaaggccagctgtgacctcagggtgcccaagcttcctcctttccttggttttcagggtctggttggtaggatggcttgggtatgtatccctggtctgcgaaggatgaccccatttaaagccttttcttctcaaatgccgtcagatgggagctgtttgagggcaggaaagcccagttcctttaacccttgtgtcggtgcctgcacagagccgggcaccccagcacatctgtgtttgtggctctgaattcatttatctgtgccagtctcctgctccccagatgccccaacagacccttgccaaaggtgggagccctggggggcacctgccggatcaggcgggtgggctgcgttcactgctttagtctgcccacccctgggcctctggcctggaagggcgaagccactggctttgtgagggggcttgtctgcttgggtcatttctgcctctgatgccttcatttagcaaagctttattgaatctgctgggccccaagggaaggcagcgtgactcagaagcagcccttgttctcgggaagccacagtcccactggggagtgagccaggtgcccccaggcagaggccgcaagagccaggagaggggtctccctgctgtggaatcaaatttcatggtgaaggtgatgtcagattgggcctggtgggatgagggtttatacatatgcacatccaggggagaggacgtggaaagcaggaggaaggatcagcccctctgagcacccatggggtgcaagaccacacacagctacctagctggttccccaacactagaggaagctgcggctcagcgagcgaggccaagtgcctggcccaaagtcactaagcatgtaagtggcagacgagcatttgagcctaggtcttcctgtctccaaagagtagttctccccctggggcagggaagaatccagaatcctggaatgtcaggattggaaaggacacaaaggtcacctggaccaaccaatgctcaaacgaccccacagcctcccagtcctgctcacacacgtggatacaaggcgctcactacctttgtcgaaccaagaggtgtctgatacaggctgattgacacctttaaaagtagctttttttcctgatcagagtaatacctgccaa

SEQ ID NO: 41104 - DNA, 1415 bp, Artificial sequence
  DNA replication origin
aacatagcgaaaccctatctctactaaaattacaaaaaattagccaggcgtggtggcacgcgtctgtagtcccagctacttgggaggctgaggcatgagtatcgcttaagcccgagaggtggaggttgcagtgagccgagattgcgccatcgcactccagcctgggctaaaagagtgaaactccatttcaaaaaaagaaaagaaaaagaaagaaaggaaaagaaaatgcaagttatttttgtttgtttgtttttgagacagggtctcgctctgtcacccaagttggaatgcagtggcacgatctcagctcactgcagcctccaccttccaaattcaagcgattctcctgcctcagactcctgagtagatgtccgccaccacacccggctaatttttatatttttagtagagacagggtttcatcatgttggccaggctggtctcaaactcctgacctcaagtgatccgcctgccccggcctcccaaagtgctgggattacaggtgtgagccatcttgcctggcctgaatgcaagtttaaaaggcctgccgtaagtctgctgtggtgcgttttgttatcccctccttagatgaaaagctgaggcccagagaggttaactggagtcactgggatcggaacccatggcccctgctccagggagtccccagccatgtggggagtcccacatgagcagcgtgtgcaaagctgttgggcgggcctgagccccagggagaaaaaacagaggctgggagaggaagggaagagaggaggagaagccaggaggaggagggagggaggaagggagaggcagatggcagggctgttggagggagccacacttggcacccagaccggaagaaccagctgtcaggtgggaggggaggcagggtaggcgcagaggagtgccttggcctggagacctgaggctgcgttctgcaccctctctgccagtgattggctgtgtgactggagcaagaggcccatgctctcctggccttggtttccccatctatcaaatgggaaaaggatagttggattgctctggtggatcccgacctttccacccttgaagaaccccactcttgctcctagtggactccaggttgggaactttggattggtcagtctttaaagaagtgatgttggggccaggcgcgatggctcacacttgtaatcccagcactttgggaggccaaggtggttgactcacttgaggtcaggagtttgagaccagcctgaccaacatggtgaaaccctgcctttactaaaaatacacaaattagccgggtgtggtggtgcctaggattatgcttgtaatcccagctactccagaggctgaggcacgagaatcgcctgaacccaggaggcggaggttgcagtgagccaagatcccaccactgcattccagccaggcaa

SEQ ID NO: 41105 - DNA, 1281 bp, Artificial sequence
  DNA replication origin
gatcttggcttactgcaagctccgcctcccaggttcacgccattctcctgcctcagcctcccgggtagctgggactacaggcccccgccaccacacccggctaatttttttgtattttttttttttttagtagagacggggtttcactgtctcagccaggatggtcttgatctcctgaccttgtgatccgcctgccttggcctcccaaaatgctaggattacaggcgtgagccaccgtgcccggcctgggggggcatctttgaagaacgggcaaagtggcctcgagctggctcatcatgaaggggagtgggcgacccagtgctggtgtgagattcaaagctgggggacaatgtcctgtaagtggcctcaggaaccagaaggaccctgtcgacctctacacccagcagagggagggtctgagggataaagcagcccccactgaacaggctgcaggaagcaaggtctggggcaggccaggttacagtgcaatttacaaaaggtgtcagggacattctgggaggggctgaaggctcagggactcttgccccctgcactgtgaggtactggaggagccccaacttgttaaagctcctgcatgattgcagcttgggtttgacagcttggggctgtcccagctacgcagccgcccctctctccaggtccccttcacctggcccctgctccaccagcagcggggagatgagcaaaactctatctgtgaagggacgtttgtcccagaaacacagggcatgactgcccttccaggctccagctgatgccgtctgctctgctcttgtgtccggaattggtgggttcttggtctcactgacttcaagaatgaagccgcggaccctctcggtgagtgttacagctcttaaggtggtgcgtctggagttcgttccttctgatgttcggatgtgtccggagtttcatccttctggtgggttcgtggtcttgctggctcaggagtgaagctacagaccttcgcggtgagtgttacagctcttaatgccgcgcgtctggagttgttcgttcctcccggtgggctcgtggtctcgctggcttcaggaatgaagctgcagaccttcgcggtgagtgttacagctcataaaagtagtgtggacccaaagagtgagcagtagcaaaatttatcgcaacgagcagacgaacaaagctttggaactgagcaggttgccaatgcaagctcgggcagcctgcttttattctcttatctggccccacccacatcctgctgattggtagagccgagtggcctgtttt

SEQ ID NO: 41106 - DNA, 860 bp, Artificial sequence
  DNA replication origin
ttctgcagccgtttggattcaagggaggatgcataaacccctcacggctgccagacgctgctgagagatccatcaatgacagttggccatgagattggcaatgtgaaggtcaggaatgagcctgagaagatggcgaggaggggcgagagagcccgtggggagtgcgtgtgggagaccgcagaagaaaccctggagacggtgacaactcttctgaaggaccagagaaatggatgagggagtgtcttcctgagatggggaatcacgcacatttgcaagctgacgcagaagagccaagagtagagagggcgaaactgagggtggaggagagagagggagagagaactgatggacgtgtgtccttgagtaggtgagaggaacaggctcacgaggctgcagccaggctggcctgggccaccagaacaggggagatagtctaggatgaggggggcaggtgtgaagatgcctaggactgaatttaaccagagctgtgccaggcgagtgtgatgcgcagaagggctggagctgcaacacgtggccactgggaggtgcggagggagacaggagggaccaaggggtggtgagggccagtgcacaggggaagatcagtggttcagaggccccaggcccaaggatctaggatcaggggagggagagggagatggaaaggtaggagggttggaggagacgcctggatggaggatcagggagtgcgagaggctactgggaaggcagggccaggcctagctagggtccagctggtgacagttggctgaggctggcggacaagaccatgcgggaagaggaggccaggtgtggaaagggtcacagaaatagacactccaatgaccaggactggagca

SEQ ID NO: 41107 - DNA, 1170 bp, Artificial sequence
  DNA replication origin
catgcggcttcagccattttcctcacttgaccctgggggaagacaaggccctgttcctgtgaaggggggcccttggcagcctgactcatttctcaaagtgtgaccgctcccttcttccctcagcctttccccaggaggcaggatggatgcctgcaccaggacaagggcaggaaggctgggttcagcttgtggggagagggctcggcagcccccttttcagggagtgagctccctgtgcacaggggtgtgcaagcggaggtgccagccaaggacgctcaggaggggatgattctcctttctaccccccgtgctgcctggccctctctgactatcagacttgctgtctactcccctcaaagcctttcctgaccctctccctgggtctgggggagagacgtgcacccaacaactgaaccaacaaataggaaagaagttatattgtgatgttaccaagaaaattaattgaggcactggagaataccttagatctggagtctggtctggagggcttctctggggaggtgtcttttgtgttgagatgtgcgtgttgaggagccagctgaaggaagatctggagaaatacaggcatcccaggcagaggaaagagccgagtgtgaatgccctgaggcagggatgaactcaggagggcttgggaggagagtgttggggagcttcagaggaaggcaggagccctggcgtttggtgggggaaggtctttacctgggcagggggcggtgggtgagcatcaatccaagagtctagacctggggggtgacatgacctgacttgggtttaaggggattgtctggctgctatgaggggacagagtgtgggggtgcaagtggacatatgggctgctgtcattgcctggagaggggtgacagtggcctgccccagggtggagggacttgacagttttgggaggaggttgaagcagctggcccgaatgtcagactggttggaggggtcgagtatgaacccaggactggggcccagcagctggtgctggggaggctgagagagatcactggggaggctgagagagcctggggcactggaggaaggactcatggcccaagcagggggacctcagggccattctagggtgatggactttatcttcagccagcggagggattgttgaggtttggagtgggtgatatccccctg

SEQ ID NO: 41108 - DNA, 1065 bp, Artificial sequence
  DNA replication origin
tcaccttcctgtctaggcctctgctttctcatctgtgaaaggggataataaacaccatttacccagagtggtttggggggggggtggtccgtgacccccaggaaggctgctctgcaccacagtgagggtctgccatctccagtgaccatgctacccccgagggctgtagcctccttgctgagggaggcagcaccactgtgagcgccgcagacaggcaggcagaagagggagcgagggtagtgtgggctcccagaggcagagcgggtcccaggctagcgaaaggccacccatccaggggctcagtggggaaaggggacgagtgtgggctggtgcgcggtggctgtactcacccaggtgaagatggagaaaaaggagaaggcgatggcggcccgggctgcgtccgtcccttcgttcagtgggttgtccttgggcttggagacctgccactggttggccaggtagcagaatcccacgaaccagaggaaagcccagaaggctggggggtcccaggaccgggcagaataggcagtgccacacatgggggagagggtgagtggggagaaaatggggaagccgaggaacagagggacattcaagagtgcatctcccatgctcccccacccccaaagggacaggcaaagggggtaggggaagagagaggggagccaagagaagatgcaggcgagaagagggaagccagccagatgcaggggggaggaggccacagacagggcagggtcagggccagtcagaggagagccacgggcagtgagaggggaggatggagggagagacagagaaagaaggtaatcaactcaggccgcatttctgcagcctctgccaaacccccatgtccagccacaccgctgacgtgggcccccccggtccacccctgatgcctgcaactctgcaggcaggaagaccccaaccctcaggctgccagacaaatgaggtatgggaaggaggacgaggctggggcaaggatggcagcttggctgggtgggtctgggcttcgacttctaacgtgctgcgaccccacagagccccaggtttagcgaggggccc

SEQ ID NO: 41109 - DNA, 978 bp, Artificial sequence
  DNA replication origin
atcggccccgaggaaaagacaaaacaaaacaacaacaacaacaacaacaacaaaacgtgcaagagcgcgcctgcgcacacggtccgctacgacccccatccctcttcgggcgtggggtggcgctgggcgcatgctccccggcagcgcggtcatcctcgcctccttcgggccgctctagccgccccactcgctgctctgcggggaggcgggcgctcccgcaggggttcctccaagatggcggcgcagaggaggagcttgctgcagagtgtgaggaacaggcccgctctctgggcttggggttgggagcctgggcgggggtgctgtcgggtgcaggaacggctccttctccgagtttggacagccaccctctccgtggtggggtgtgtcagccaccttctcctctcctcgggctggccccctcgttcccgaggccagggcgtgtgtgcgcggcgggcccggcccccgggtcaagggcgccggggctgtgggctgctgctgccgggcgtcgagggcgggagcgtcctggagccagaagggaacacggcgggcggcagcagagctatccgagtctcgagcccactgcgacaccgagcagacgtgcaatgataataacagcagcatccacagtgtaccgcttactgcatccccggcgttgtgttaattgctttacatttgtcagtttcattttcgtagcagccccctgagataggtgctactgttattcctatttgacagactgagacactgaggtggtcgtttgcctaaggccacacaaatggtacgtattgaggcaggattaaaatcaggcagtgtgattccagaaacccccttaacccctgggctgtactaaaggaatgaccagtggtagctgtcactgggttctggtcctggctctgactgtgtctccctcagcctcagtttccttctcctaaggcgagagcgctgagtggaagaattgtcttcagactcatccctacc

SEQ ID NO: 41110 - DNA, 1001 bp, Artificial sequence
  DNA replication origin
gcctactgtgtgccaggcctctgtgaatgtgggaggggaaaagagtgacaggggccatgtgggaggaaggaattgggggatgtttacccttctggccagctctctgggagggaggcttctggcaccacagggcctgagctgggagggtggagggtggggcctggtgtgcccagctgtggctgtgtgaccgagcaagttacttatctctgacaggctgggcgtggggaagatgtacttgccacacagcgcccaacacactgagtgccgcattgaggacatggaggcggactttggtatgaacccaacaaggctgactccacttcggcctcccaagaagcttgggaatctggaaaggtcaggagaacaaagacccaagctgggggaagatggagagcaagcaagtcccctgaccctggccagctctgggcagggcagcttccctggggagtggggcgtgtctttacttctcactgggcctcaagggcaggggctggggcttgggcaggtcctcctcccctttgccaggagcaatggaaatggaggaatgtgattattttgtgcctgccttcgtgcttgggggccaatgtcaaggttttcttgatgctcagaacgagttcaatggagaatccagacttgaaacagcacttctttcatgggctgagggacgcccagagttgctgctgaaggctcagggagggagagaaggttctggggaaggaaagtgtctgtgaggcggtcccttccagaggggaatgagtcccaggcagggagagctgtggcatggggaattgggggagggggacacatttgagcagaaattgaaggttctttgggggccggagaagaaggggcagagagggttgaacagccaggctggggagaggaggagggcaacatttttgcagggcagaatagactggattttgggggagtgacaattaccttaagcacatgtcatggagatgatttattttttttttgagatggagtcttgctctgtt

SEQ ID NO: 41111 - DNA, 1742 bp, Artificial sequence
  DNA replication origin
ggctgcggcgggcgcccggcatcgcaggcagcgcggccccggcccggccccgatcccctccccccacccccacttccaccccgtcccggggacccggcgcggccgctcggctgcaccccggggcggcggcgggggcccggcgagcggacgggcgcgggggagggaccgcggcgggcgcgcggggggcgcggaggcgaggccgagcgcggcgcgcaggggtgcccgctcccgccggctcaagcggctccggcccccaccccgccccctccgcaaccccctcccctcccccgccagccgggctccgccgccgcgccgggccgggggcgcctcgcaccgcagactccggccgccgccgccccgcgccgcccgcgcgtgctggatcgagtgtgtgcgtgtgcgagcgagtgtgtgtgagtgcgagtgtgcgcgcgcccctcctgtgaccgtgcgtgcgccggcccacggcccggggcggcctgcgcgggggcgtgtgcggggaatgcgggtagttcggagtgcgggcctggtgtgcgtgcggggcagcaagtcccgttctgtgtatgcgtggacgggtgcgttccgcagcgtgcccgggtcggtgtgactccgtgtgcccgagtctgtgcctgtgtgtgcatggacgtgcagatccgtgttgcggtgtgtgcgtggatgcgcctgtgcccgcgtgaacctgggccgggatttcgcataggcatctgtgaccatgtgcagaggcctgggcctgtgatgtgtgcacggtgccgggcctgttacggtgtctgcagagtctgtgtgtctgcttggggcgtgggtgaccgctgtacaccggcctgtgtccttccgtccgaccccctccgtccctcacatgcccgaagccacctgcgcactcctggggtaactgggggggcctcccctcccccgcccccctcacccggccaccctaggcccggtcggccctgccaaccctcttgagcctactctcctgccacttgcccaccagcggttctccgagggcccaccgtgtcgtgccctggctcctcgtggccttgctctaggccattcctctcagggctcagaggcgtcccccacgtgtttcccgcctttcaagtggttccgttctggggcctacagagcagccacttcctcccgcggtgcgaggcacaaggcattgtgggtacgcagcagacatctctgcgccgccatcgtcgaaggtgcagggatgcgctacctattctatatcccagcgaatgtgctccagaatagtcccagaggcctttgctgaaccatccgggctgcctagggctggtctacctgctccaggtgcctccgtgcccagcttcatccatccttgctgaggaggcagagtgatcctactccaacattcacttgagcaggtcactctcctgcctgcaccttcaatggctcccacttgccctcagcttaagttcagtgcctgggcggggcacagggagcccctggtgacctagtcttgcccccttcttcaacgtcaccctcactgctcttttcttcctggaggctctctctaagcaagggtgggcaaaccatttgctttaagagattgattgtaaatcttttaggctttgccagccatatggtctctgtcccaactactcaactctgccatcgtagcataaaatcaaccatagacaatacgtaaaagaatgagcctggcggtgttccaataaaactttatggacacaaaaatttgaatttcgtgt

SEQ ID NO: 41112 - DNA, 1486 bp, Artificial sequence
  DNA replication origin
cccggcgtcctggggggcgccgcggcccctctatccccgcgctgcccgccctcccgcgctgcgcttggcgccccccgcccggctccgcggcccactccccgagcgtgaccttagggggcgggcgcgggcgcactggggctgggggcccggaggccgcggtgggggcgggatgccggggaagccgctcggcgcgggccccctccccctacccgccgctcctccgagctccccggtccccggagggcagagcctcagcgcccgaccccctcccacggccgggcgggggacgtccccgaggcgcggggctcgagccgtgctttgtgcgcggcaccccccagcctccggcgcggctcccccacaacctccggcgcggcgcggggctggggtgggaggcctccgcgcccgccttccccacccccgaccccagactgcggcggcggcagccgaggcccaagcgcagtcgggggctgggcgggtgcgggggctgcggccgtagctacccctggggaccaggcagaggcaaatgtggagagggcccccggccatttaccggggtgggggcccccggctccttgcattgctctgcccagggcgggggagggaacctggctgagggagggcgctataaatatctgcaaatagtgagttctggaaccgggagtggggaggggagtgcgcctgggtgtgtgtatggtggggttcctgagctggggtgcagcaggaagggatgccgcgcggccagacctagtggtctgaggtcggatgacccccagccccggaagatgcccctgaaggcccctgatggggtgtgggcagacacactaccccagtgggattcctccctggttccccacttcattcctgggacacaccagtccagattcgccttgatgggggagttgtgagcactggcgtgtcgtttggggagggggagcagttatgaaagatccagacatggagcccagcagaaggatggaggggagagcccccacccccaggagctgcagctctgagggggttttcagtctaaggagtgctaaggggagccgctctgggtcctaggaaggtttgaaagaggggtcccagcccaggaggaagagagaggttactggaagagatgacgacaggaagctgccagagatctctgggtagagaaaggtgggaagggcgttgtgggccaagggaatggcatgagcaaaggctcagaggtgtgagtgtctggcgtgtgttgagaggtggcagtgggaacagtcaggcactgtgggtgccccctggaagaagtgagatgaaaacggggcagaggctgggcagggaggccaggtggaggtgaggtgggagggcacagcagggagctggcacttggtcctgaggacggcagggagccaagacctggctggggggatgccgctggctcagacccattctaagggtctgcctggtgcccttggtgtggtcagggctacttgaggcacactggtgattcctt

SEQ ID NO: 41113 - DNA, 750 bp, Artificial sequence
  DNA replication origin
gcgggtgtgtggatttggcgtggtcatttattcattcaacaaactcagggtgagcaccttttttgtgtggggctcagtgcttgaggctggggacccaggggcatcagacagcacagcccttgtgtgggacaaggggttctggggagtaggctggggtcagggaggcctggagaagtgcagctcagccgaatcctccaggaacaggcacggagattgaagggtgagattacacagaaacttctgtgcctccttgagggacttggactttctcctgagggcagcggttccaagctgggaggggcagcatcagatgtggctttcgcttggctcatgggggccgggttgggggcccattgaggaagctgctgccattccggtgagcggtaggcttggggttgggagatttgggaagtgcgggcagtgggactgactgccttggtggtgtggggaggggcccagaagggggcaggtgggtggggaggggcccagatttgggaagtgcgggcagtgggacggacaagccttggtgatgggtggggaggggcccagaagggggagtgttgggaacgtcatcggagcgtcagtcccttggtgccaggcttgagtcacaggttactagctcaggttgttgggacagcgatttgagtttcacctcgtttgccacagagggtctcaggccagaaagccaggcctggtgtgacccaaagcccatgcccactgccctccttgctgcccagcccagatcattcc

SEQ ID NO: 41114 - DNA, 839 bp, Artificial sequence
  DNA replication origin
gcagggcagggcggcgctgaactcagcagagcaggggctttctctggggccacagggcaggggaggagcgcctgtcaggtgtgggaacttgcaggctgggcctgcacccccaaaccggaggatatttgtccctccaagtctgttgctgcttctcatctgggctcctgtgtctttggactgttccatgtcatccagcagctgtccctgcagtgcatgctccagggctgactttgtcctggggggtggggaacagtggcgaccgaggcctgtggtgaccctgctctcctgtggcctcgccagcagggtgagggcggggcagacgtaaacaacaaagtgggatcgcctctgcagggatgagcgctggggggacagcctggagagagggcttgcgggcgggggcagcacttcagccagctgctcaggggcccctgtctgacgagtggcatcagagcatgcagggacctgaggaagggcgttccaggcggagggatcagccagtgcgaggaccctggaatggggccatgcctgaagagtgtaggagacaggaaggtggggagtgtggctggagcctgggggacaagggaggcaaggtcagcagaaacgcaggcatcagatggccagggtccatggcacgcagaggagttggggttttaattcttagtgtgacagggccatgggagggcttgagcagggagatgtggcctgatggggaatttgcggtgactctggctgctgcagaggcaggagggaagctagtgaggacctcggggtggcagaggaggcagagagaggtccatcctgggagcatttgggggaacggggcctgcaggctttcctgc

SEQ ID NO: 41115 - DNA, 1061 bp, Artificial sequence
  DNA replication origin
acgggcagggctgaccgcatgcagttatcaggaacacgataactaacccactttgagcccatgctgttatcaggaacaataactaacccactcctacaatagcagcataaattcctccatgagggtggagccctcacggcctaatcacctcttaaagtccacacctcaacaccactgcactggggattaaatttcctacatgtgaacgttgggggacacatttttcagactatagcaccccctacatgattacaggctggcaaggggaagctgtggacacaggggcttggggatccctgggcctgtggccaggccaggctagctggaggccaggatcaggcagacagcagcaaacaaactccccaaggaggtggtgcaggtggcatgggacccctcgcttgcttgtctccaagttccgggtgatcggggctaggggaaaataatgggggtggggggatggaagttaaggggaggaggggggatggatgaggagggcagcctggatggaggtgtgtgggcagggggcagatggatgtggagtgccagctccagggtagatcagggcaaggttctgcagtgtgggtcaggatccagggcctccggagcctcctggagtctgggcctcaccttggagttttcctgactttttggaccttgagcctcctttaagctgcaggagacccagacacggcgcactgtccagggtgacccgttcctgttggagttgggtagtggtgggaagggctgccctgggtacccttggccttgcagggaactctgggctctgggaaacataatttcagcctggccttgcagtgtgccaccggggtgctcacatggtttcaggctggtgaggggcttaggaggttggcaggatgggcagatgcagctttcctgggcagcgaatccgatcatctaccagagctggagagccctgtgacctgaaaatggcaggcccatggggtcctgatggcagtgggggtgagagggacccttgccttgggcaaggctgaaggcagcagcctggactttgcccctgaaactctgagaagccccaaggc

SEQ ID NO: 41116 - DNA, 1188 bp, Artificial sequence
  DNA replication origin
ggctccccataagccgtgaagttggactcgcacaccacaaaggcgtccaccacgtcgcccagctcgtggaagcgcacgtccagcaggtcgaactcgtggttgacgttgatggcgttgatgacgcggcgcggcacctccctgggcaccagccgctccttggtgggcaggttggagtactgcaccacagtgggcacgccgcagctgggtccgtgccagccgggcaggcacacgcactccacccacttgcgccgggcgcctcggccccccgtgcgctcccgggcgctcaggaggtaccggggtggccgccgggccgaggagccgttggccccctcaggcttctcctccggccgtcccgggggcggcctctccagcatcttggtgccgggtttgaagcagacgccgccggccttggtgcgcacgaaatactcggtggtgtcctcgggcagcaccaagtccacccggtggagctcctcggccgccttgctgggcggcagcggctgcagcaggggcgagtgggagtagagtggggtacgcagcaggtcagggcctcctggctcggggctggcctggggcgtgaccggggcattgttccagaaaaagctggacaccaggttagggctgagggaggccagttctcgggggaaggtgacataggacagggtcttgaagaagtgcaggaaggagatgaggcacaggccggccatacagaacatgagaaagagcttgtagcgtctcatcttcatcctgcgggagagagagagacaggagactcatcagggcagcccaggctcctttcctaggaaggggacctaggaggcctctgctgccaccttgctggacaatgtggtggccagcacctgctgcccctgcatggagtgacctcctgcccccaagagtcaactcgcggtaccaaggcccctgaaagccccagcactgaggacaccgccgtgctcccatagcccttccctgagatccccaggccaccaccctgccccctctgcagcctgcttctccgcctggcccaccccaccctgactgtgcggctgcactgctaggcttggctccaggagtaacatgcgccttgggaaaagctcaactcgcagtacagactccgccccaggacagaacggggagagcaggctgtaggctgccctcctgggtcctgtccctcccctcctatcttctttt

SEQ ID NO: 41117 - DNA, 2755 bp, Artificial sequence
  DNA replication origin
tgtcctatgtcaccttcccccgagaactggcctccctcagccctaacctggtgtccagctttttctggaacaatgccccggtcacgccccaggccagccccgagccaggaggccctgacctgctgcgtaccccactctactcccactcgcccctgctgcagccgctgccgcccagcaaggcggccgaggagctccaccgggtggacttggtgctgcccgaggacaccaccgagtatttcgtgcgcaccaaggccggcggcgtctgcttcaaacccggcaccaagatgctggagaggccgcccccgggacggccggaggagaagcctgagggggccaacggctcctcggcccggcggccaccccggtacctcctgagcgcccgggagcgcacggggggccgaggcgcccggcgcaagtgggtggagtgcgtgtgcctgcccggctggcacggacccagctgcggcgtgcccactgtggtgcagtactccaacctgcccaccaaggagcggctggtgcccagggaggtgccgcgccgcgtcatcaacgccatcaacgtcaaccacgagttcgacctgctggacgtgcgcttccacgagctgggcgacgtggtggacgcctttgtggtgtgcgagtccaacttcacggcttatggggagccgcggccgctcaagttccgggagatgctgaccaatggcaccttcgagtacatccgccacaaggtgctctatgtcttcctggaccacttcccgcccggcggccggcaggacggctggatcgccgacgactacctgcgcaccttcctcacccaggacggcgtctcgcggctgcgcaacctgcggcccgacgacgtcttcatcattgacgatgcggacgagatcccggcccgtgacggcgtccttttcctcaagctctacgatggctggaccgagcccttcgccttccacatgcgcaagtcgctctacggcttcttctggaagcagccgggcaccctggaggtggtgtcaggctgcacggtggacatgctgcaggcagtgtatgggctggacggcatccgcctgcgccgccgccagtactacaccatgcccaacttcagacagtatgagaaccgcaccggccacatcctggtgcagtggtcgctgggcagccccctgcacttcgccggctggcactgctcctggtgcttcacgcccgagggcatctacttcaagctcgtgtccgcccagaatggcgacttcccacgctggggtgactacgaggacaagcgggacctgaactacatccgcggcctgatccgcaccgggggctggttcgacggcacgcagcaggagtacccgcctgcagaccccagcgagcacatgtatgcgcccaagtacctgctgaagaactacgaccggttccactacctgctggacaacccctaccaggagcccaggagcacggcggcgggcgggtggcgccacaggggtcccgagggaaggccgcccgcccggggcaaactggacgaggcggaagtctagagctgcatgatctgatagggtttgtgacagggcgggggtggcggcggcccctagcgctatctccctgcctcctgccggctccttggttcttgaggggaccaggagtgggtggggagtgggggtgggggtagggtttccctactgaagcccttgtgaatcaagggtcaggcctttgagctcagaaaatatccctcctgttgggagagggcgcaggccgtgacgtctgggtggcccttatgactgccaagactgctgtggccaggaggtgccactggagtgtgcgtggtggtccctgggtagcgggggagggtaggcaggattggggaagagagcctgcaggatctcaccaggcagcctctggggggtggccaggccgggaaaaagcccaccatttggcatccctgggccttgggctccgtgtgggagaccggcctgccaggaggacccagggctctgtaagtagatgcatttgggtccaggaggaagcgtggacacctcgtagggaagagatgaaaaagccacatcctaccaagaggaggtgctgagggatgctttgcagtgtagtcagaagtgctgggccagatggagacagaactccaccccctgccgcaaaggacaggacctggctgccctgggatgctggtgcctgagtctgtctctgtgcacccctcaggctgtcgtgagccaacacaggggcctggagaaccctgaggagctttccttttggttctaaacccggcgttgacgttccttctccctttcacattgctgtcttgtggactgtgcactcagtccttgcaaggccaagagtccagttgtaggtgtggccttgagggggaagtggggaggagaagactgacatgagtcctctgcacggatccgtctctccctccccatcaccccttccttctgacacccagtcccagctgtccactgtcccaggtgcagtcactgttgtgcccttccttggggcaggctggctgggggccagaaaggggccatgaggctgtcttgggcccaaaaagggacaataaggccagttgtatgcttcctgttcctcatagcttgccttggtggggatgtctttgttggagttgattctgagctgctgtgattaggagaccctgaaatacagtggtttaagcaagatggaagcttgtttctaattagtctagattgagatggcccagagctggtagggcagctctgcgtttcttcatacgcaccttccaattctg

SEQ ID NO: 41118 - DNA, 1085 bp, Artificial sequence
  DNA replication origin
acaccagaagttcctctatgatgctattctgtggcagccttgcacttgagccggatgaaaattgtaaaaacccaggttgggcgacaggacggcgcgtcttcccggctcctttccagagtttaggaggagccatgcagactcagccggcctttgggggtaggtggacaggcccggcgcgccctctcgaggccccttcaacctcccgggggcagcagcgccgtgtcggctatgaatggggcctctggaaaactcaggcttggaacaggtaaccccccggtttccgcaggccacaaatcaccacccgcaaccgaaggacgcgcaggctgggagcggcggcggggccaccagtgcggacctccactgagggcggcgggatccgaccgcaagggctggtccctgaggccactaaggggtgcgctgggctaaggccgcctgggggcaggagccagcgcgatcgtggcgggccagcaggcggggctggctgaggactagcagcgacccgagaccccaacccttcccacgcggaccccgggatccctctcccagcagccgcccatctagggccctgagccaataagagctcgagatatatatgattcaccgggcctgggccaatcaccttgacgcgcgctcttcgccagcacctcgcgcgataacctggcgtcctcggccttcacaataaaaactcttcgccggaaaacgacctttccccgcccactgcgctgacaccggaagcgaggcgtgtctgggagatcactccgcgctccggcggcgaaggaaagaacggactctgatcatagaagcctagtaaagtagtacacctctctcctttcgtgaggccataagaacaaactccttttctcgtcacagctacgccctgggcataaacggttggggcgtcaaagggagggagggaagggagcgggcgggaggagacggtcacgtggtcgcggcggaaggatgcgtctgtgctgcgtccccatagagacgaagtctataaagggccggcgggcggccacggcagccatttctactttgcccgcccacagatgtagttttctctgcgcgtgtgcgttttccctcct

SEQ ID NO: 41119 - DNA, 1272 bp, Artificial sequence
  DNA replication origin
cgccctcttcttctggcggtacctagtggctgctgtcttgttttgctccatttttttcagcttcttatccagtttctcaccctttacttttgctgctaccatcttctctccaggaggatcgtaaggtttgggacgggcagacccacagagaacacctggagatgggaggctcctatttggagagcccctggtagaggggctgtgctgaggagaccccagataggactctgggctcatacagatgccactatcattatctgaaggggtgtcttcctcctttatgcactgagggatcatggcaacgtaagcagtgtagtctggcttcctatctccttcagtgatatccacttcactgcccagctctaaactaaaggaatgatctggagtggaggacaggacccctggggaaaggggaagaggttgtaagaaggtgaagggggcaacctggtcgggttttgttaaactttctgggagatggccaattgggttcaccgtctgggggggctgcttattagtctcctggactaggggggcaaagagatcacaagtgtcatccaacgtggtcagaaggtcatctggcatggtttccaggtcatctatacccaacagggcatccaagtcgaactccttcaaatccattttctccaacatccaatctgtcccggagaaggcatcctctgcaaaacatttgagtgatggggccaagtgagtcagatacaaaggtaggaggcccctaaccctagatcccaccaggacgatgtggtggtggcccactcacccttgctgttgttggagggactgaccaacccatccacagccagccattcggaggagcccgccttagccttgtcgctggagaacccatgaggtttgaagtgcttggccacctccaggtaatcatctaagagacctaggctttcttcagcccccaaacccgactggtcgaagggggacatcaagtcccccaccaacacctcgctgctcaggaagctcatttcggtcatgttgcggtgctttgctggaatcgaggaatgtgcttaattcgaaggtgtctttgtcggttacagcaacgctgctgctgaatgccgtgagaagcctgaatgagaatcagaagccaactcccattagaggttagctgttctgagaatttcatccttccacttatgaggcgggacttctctagatcggccatctagagaatcgggaacagggcagttgtatttgcccctccctgcttgcaactcaggttccacaaaatggacgctcacggag

SEQ ID NO: 41120 - DNA, 1447 bp, Artificial sequence
  DNA replication origin
gctgaattcacacctgtaagacacctctcagcccgtgtgtgcttagacgaccttgccttggagtctggagacaaaggcttgttttgtctccttagactaaaagctagaaagggatgaatatttgttggacacctattatgtgttagacactgtgctaagccctttaaagatggtttgcatcctgcaaagtgtgaaaccttatcgccatttcacagatgaggcacctgagactcagagatgttaacgggctttgcttcccatcctcagtcaggaagcagcagagctgggatcaaacctgagtgtacctttctctaaagctgtgactatctgccagcatcggaggggtgggggggctcagggcagccctcagcaaccccctggtgcccctcaccacacattctccaaagaggtggagagggttacgctgggcagcccagtgtgacaacatctgggcaggggttgggagcactggactcgtactgggggctgctgcttcccagcggagtaaccttgaccaggcagctcatctctggcctcagtttcttcatcggtaaaatgggggcaaaagggtggaactccaggcagtttaaagaagtgcctagcacacagcaggtgttcactaaatgcttcctgagttgtgaggcagtgagtagaccatttggcctgcattggggagagtcttggtgcttttaatttgtttggctggatgcaaatgaacaaataaaagggggttataaccttgaacactccctctccccaatccacagcccttgggtgagagaggaagggagacaggcctcaggagcgtgggattgggggaactggtgtgacagggtcctggaaagtggtgagaatgaagcctttgcagccggatagaggcatctgtttcacctgggggccctctgagaagccttcctggaggaggtggcctttcagccaagcctagagggtgggaagaagcagggttgtgaatgagaagtgtggaggcagcctgggcggttgagcgacctttagagctgggttctagctcagctctaccgtttaagagctggggtcttaggtgggtgacccctcaccggggcagtggggtgaacacccccgatctggatctcagagaggagacagggtggaacgtggcagagcaggcacctgggacccgggggtggtcagtaatgccccccacccacctctttttactcatgacgcagcccccatgctgaggggtcaggaccccaccccaggcaagaacctggattttaaggagctggccgcgggctgggggcttcctaccctctgggaaggggtgggagctcaccagccgccgccgtcagtctgtctgtcgcctccacgcctcccccctccagcgtcccgcgcctgcagctttccccgaagacatttggtgtcagtataaggacggcttttcctcgcacgcagcgcggctcggtct

SEQ ID NO: 41121 - DNA, 1768 bp, Artificial sequence
  DNA replication origin
gaaggaagggagggcttcgcttcgatgccagtttcttggcgcgttggcttctctcttcactggggcatttatttatttatttctggggatcgatcctccccacccgcgcgtacccgtcaggtgagccccccatcccgcgccttcggggccatgccttgggaggaaggacaggaaactttgaccggtcctctctccaaggccacgaaagttctctcggtgccaatactgaagccagctgagccagcgctgcagaaatttattcaacaagtcaggctgccggccggggcccgggttgtccgcgcgtccggccgcccctccgcggctgcggctctgcgggcagctgggccagagctggtgcccgtgtccggcgggctgagctgggagcgctggcctgggagcgcggcagcgggggccactggatgggggaatcccgggcagggtttaactttcccggaggcgggggtggcggagaccccccctttggctggcaccccagcggggcggaggcctcgctgcatgaagccaggccagggtcggagccggggctgtaggggtgaaagggaccctcggccggctggaggtgttatgtaatgagtgcttatgatgattgggtgctaattgcctactgggtggtgttgtgggggagctgtgggggactacggggcttggcagtggtggggaggcctcttttgggggaagtcatggtgcctgggggagggggctgtggtggggcccaggctgaggcctcagtcagcccctctgctagtgtctttctgccttgtcagggccctgggggctcctgacctgaggatgagattggggtctgagaagacctctgagctatattcttgtcctgagggtctgtatcctgggtccaggtgtgtgtgtgtgtgtgtgtgtgtgtgtgtgtgagagagacagagagagagaatgagcgagcgctggagtgggcctgcgtgtctggcgtgtgtggtgtgccggggtctgatcaccatgcgaggagagtcctcgctggagcactcagattggcccaggcagtggccagttcgtcctctgtctctcactgcctggaggattcgccccgcagacgctggcaccacctcggggctaggacgctgtgtgaacaggggtgtggatctgtggcccagccccaggggaagggtttggcccatggtgtgggcctacctccctgcaccccgtcctcagaccctgctggcacctggtcacctcttgaatctgtggctcctcttagccctaaggactcgcttccggaactcttgtccactcttcaggacaaactttctgttcaggcttcaggatccagggctgggctggggactgagctggggtctagagacctccctgttaccttcccacctccgccgtcaacgcagagacagagggaggggacaccagtgggtgataggtcaggacaggacagggtgacactgagcagagaccaggtctggggcctcagcagggggaggaagaggaaaagaaagaatgtgcctggaggctgttgagctggcctggcaccaaacccatgaatctgcccacaaccccagagggcctggtcaccacaccgtgccctccacgctctcttcctagctgtgcagagctgctgtgcctgccccacaatgggaggcttggggaaggggctgctggcctggctggaggccccttccccttcctttgaccaaagttctctgcccgcttcttccgcattccttcctcctcaccctgcatgcccctcccctccccttgcccc

SEQ ID NO: 41122 - DNA, 774 bp, Artificial sequence
  DNA replication origin
agggttttccaggcagagggaacacggtagggcacagggaggggtttagtgaggctggaaccatgtggggcaggggctggatggcagggtgtcaaatgccaggttagagcttacacttggtcttgtgggccacgggtgggtgtctagcaggggtgggacttgggcaaattcacttattagaatggtgactcccaaagcagactggaggatgcttgagggaaagactgaggcatagaaaccaggtaagaggcccctacaatggataccgatggatggattgatcacccattcattcgacaagtgttggagcccagctatgtgttggacactggtctgggcttgagtggaggcgcccccaggcctgttcagccatgtcatgtgggaccgcagtacaccaggcctgggcacccggtggtgaccctaaggagtccccagcctgatggaggaggcagagccacacccgaatcacactcttgtgaaggaaagtggagcctaggctgggtagagggaacctctggggggcatgagtgacaggagaacagggcagccagcttgttctgagtggggatgccacaggagcctcctcccatgaagaaggaagcctcagagctagggcaggagagagcgggaggggagaagtggggaggcagagaagtgggatggggcatggcctcctggctgaggaagcagcctgatcaagggctcagagctgagtttagggtcaccaggttgctaatagcctggtgtgtgggctgggagaggatgtgcatgagg

SEQ ID NO: 41123 - DNA, 835 bp, Artificial sequence
  DNA replication origin
gattgttggatggatggatggatggattgttggatagatggatggatggagagatggatgcatgcatggatggctggatggatggatggagagatggatgcatgcatggatggacagttggatggatgaatggacggattgttggatggatggatggatggatggatggatggatggatggatggatggatggttgggtgcttggatggaaagacagatggatggatgggtgggtggatggatggagggatggatggattgttggatggatggatagttggatgcttggatggatggatggttagatggatgaatggatggttagatagattaatggatggatggatggatagatggatggttggatgaacggatggagtgatgaagcaaagaagggtgggtggggagtaaagatgggtgagtgagtgtatgggggaaagatgggtgggtgggtgtatgggggaaagatgggtgggggggtgtatgggggaagatgggtgagtgggagtatgggaaggtagttgggaatgtgacatttcagtaaatgttagctccagggttctaatccaagtctatgtgactgtaccatctcctcctcctccttcagggatccccactctcagtcttggtgccctccctccaaggccctcgactccatactgttctacactttcagagcttcaagagatctcagagactgcctgggctgggtttttcagactgagtgccactgaataattctttgtcactggggctggataattctttgctgtgggactctatcctctatcctgtgcactgtagtgtacttggcctttacccactagaaaccagt

SEQ ID NO: 41124 - DNA, 1966 bp, Artificial sequence
  DNA replication origin
gggcaagggctgagaccatccattgctgaatttctgaagctgagcagcccagggatgaaagccactccatctgcctcctgcggggacccagtgcagtgggcgagttagatgggccacagaggcagtgctgtgcagcggccaccagcactgctgtgaatcagacaatctgggctgctcggggactgggtgaccttgtgtgagtggtgtcagctctccaggcttgttccttttccatccccaggggattgtgagagctgaggtcatgtccctagggtgtctggtacacagtcgtcagaggtactgccaaattcatcactgtggtacgtgctagccagggcaggtgggagtgcttctggagaggaggctgagccaccaccttgtgaggggcaagaggcacatccggggaagcttcaagaagaggtgacctgcgaactgggctctgaaacagtctgcctgctggagaggtggaggaaagggaaagtgtaggcagaaggcgtgtttggagaaagcgagtgctgaggccagtgagtgataagactgcaaggattcactgaggcgagagtctaccttgcgtaccaggcttgggagggtgatggggagccatgggaggttcttgagcaggagagaggcatctggagagtgtgtttcaggcagattagcctggcagtggcaaaacagcttggaggcaggaaaagcctccagcctgaggttttgtgtctcagctctgctcttttccagctggtgaccttgggccaatctgtttcccttttgtgtcttggtttccttatttgtaaatggggcttataaaagagctgtgaggattaaatgagataacatttggaaaatgttcaagttgtgttgggcacacagcaagtgcctggttatcgtgtggggcagattggaggggcagagaccagagctgggggataccgaggatgctgggtcagggtcctggggagacacactgaagatgggctgagaggcctcaggggagggaggagagccatgggcagagacaggccgtacttcacagaggagagcgctggccttggagtccagcaggcctggtgtgaatctctgtgccagtaattcctagctgtgaaacccaggagaggcccctgatttccccatgtctcagccttccttatctgtaaaatgggcctgctgacctccactgctcagggccttgttgaggaggcagcaggggcaccgggctcctgggagacgccactaagtgcactttgagcctgaaactggcaggaggggcagagggagcagaggatggggctggaaggagagagcgcacgacaggaagaggggaaaggcgagggggatgggggatgttctttggtaattagaatgttcgaacttcaaaaaagttaattaatgatgaagctgctgctggagccaggctcaggctcgaagggggccctggcagcgactgaaattaattacaggctatggcgggagagtggcagtggggtgaggggacgggaaggagcagggctggggccaggaggagctgagaagaggccacgagtaggcagcatcccaaagtgggcagggctggggatgggagggaggctgttgccatggaaaccaggtcacctctcccactcctctctgggtggggtcctgctgagggtttggctggtgtggctacatcccagctaagggcaagggctttgaaatggaggggtgaggggtttgcttggagacactcctgagtccccggatgttggagtgggcagggcccctagagatttacagtagcacccccccttacccacaagggacacattccaagacccccagtggatgcctgaagccacaaatagcactgaaccctatatttactatgtttttttcctatacctgcatacctggataaagtttaatttataaatcaggcattgtaagagatgagtagcaaccaataataaaatagaacaatcacgccaggcgc

SEQ ID NO: 41125 - DNA, 1343 bp, Artificial sequence
  DNA replication origin
catggtgaaaccctatctctactaaaatacaaaaaaattagccgggcgtggtggcgggcgcctgtagtcccagctgctcaggaggttgaggcaagggaattgcctgaacctgggagacggaggttgcagtgagccgagatcacgccactgcacttcagcctggcgacagagcaagactccgtctcaaaataaataaataaataaacaaaaataaaaaataaaataaaataaaacaattaggccaggcacaatggctcatgcctgtaatcccagcactttgggaggccgaggcgggtggatcacctgaggtcaggagttcaagaccagcctggccaacacggtgaaaacccgtctctactaaaaatacaaaaaattagccgggcatagtggcaggcgcctgtaatcccagctacttgggaggctgaggcaggagaaacacttgaacccaggaggcagaggttgcagtgagctgggatcttgccattgcactccagcctgggcaataaaagtgaaactccatctcaaaaaaaaaaaaaaattagaatcacgtacgataatcaaagttatatgaatgtggtcatgcggtctccctctttctctctctcagaatctcttattgtaccgcactcatacctaattttgggccacagtggaccatgggtaactgacacggcagataatgagggacaactgtatttattcatccgacagatgttcattgaacacctactagatgttaggccgtgagtgtaaagtccctgtcccctttggaatgtagattagagcagtggcagagacaatgagcatgtcagcaagacagtggcagggcgtgaagagggcgtgcggcagctgggggtgatgaggttgggtggagacttctcagaggaggtgaacatgatgctagaagctcagcccttgaagtgggaacagcacatgcaaaggccctgaggtggagtgtcctgatgtcactcactgtgtgtctgaggagcggcaggagccagtgaggtcagagcagagtgagccagggcagggcggagagagatgggggagcagggtggagagagatgggggggcagggcggagggagatgggggggcagggcggagagagatggcggagagagatgggggagcagggtggagggagatggggggcagggcggagggagatgggcagggcggagggagatgggggagcaggacggagggagatggggggcagggcggagggagatgggggagcagggcggagagagatgggggagcagggcggagagagatgggggagcagggcggagagagatgggggggcagggcggagggagatgggggggcagggcggag

SEQ ID NO: 41126 - DNA, 1103 bp, Artificial sequence
  DNA replication origin
gatgctagaagctcagcccttgaagtgggaacagcacatgcaaaggccctgaggtggagtgtcctgatgtcactcactgtgtgtctgaggagcggcaggagccagtgaggtcagagcagagtgagccagggcagggcggagagagatgggggagcagggtggagagagatgggggggcagggcggagggagatgggggggcagggcggagagagatggcggagagagatgggggagcagggtggagggagatggggggcagggcggagggagatgggcagggcggagggagatgggggagcaggacggagggagatggggggcagggcggagggagatgggggagcagggcggagagagatgggggagcagggcggagagagatgggggagcagggcggagagagatgggggggcagggcggagggagatgggggggcagggcggagggagatcggggggcagggcggagagagatgggggagcaggatggagagagatggggggcagggtggagagagatgggggggcagggcagagggagatggggtattagggcccagggagatggggtgtcagagtggggccctgcaggccaggcaagggcttcaaagtttgtgctgagagagcccaggagcaggggcagggttttgtgctggggagggaggtggtcttgctgatgtttttaactgcccactgctgctgcaggaagggtggtttggaggggccagggcagacccagggggccgatggggaggctcctggtcatccggtggaggacctctaggttcagagacaaggaggggcttgccgaagaccgcagagccagtcagtgctgggacgagttcaaatgcaggtctcctggcttcgtggtcttgtttgctgcttttactgcatgagagcccctttctgtctcctgacactcagtttctgggggaggaaagggggttgcataggtggggtgtggtgagttccatcagcatctctcctcttacagaaggagaacctactcccgactccagtcattgcctgttaagttcagtcaggctgcatggtctggaagttcacctgggtgtctgacttcatcatactatgtgtggctcaa

SEQ ID NO: 41127 - DNA, 851 bp, Artificial sequence
  DNA replication origin
ccctgggatcagtctcttcctgccaccccttgttgtagagaaacacaaagtgtaagaaaacactctttgtcggctgggcacggtggctcacgcctgtaatcccagcactttgggaggccaaagtgggtggatcatctgaggttgggagttcgagaccagcctgaccaacatggagaaactccatctctactaaaaatacaaaattagctgggcatggtggtgcatgcctgtaatcccagctactcaggaggctgaggcaggagaatcgcttgaacccgggaggcgtaggttgtggtgagctaagatagtgccattgcactccagcctgggcaacaagagtgaaactctgtctcaaaaaaaaaaaaaaaaaaaaaaagaaaagaaaaagaaaacactctttgtcatcaaggggctgagttgtgcacgagggcagtcttgtcccccagcctatcctggggcaggggccatggttggtgtcctcacttaactgagagccaatagtcctagactgggtggggaaggtggagcctggtggccgtgtaggggaggggagttagggaccagcagggggttgtcccaagggctccctcaatgagccagtcatggatgtggcttgctctggtccggggtggaatggagggaggctgtggcaggagagaataatgggcccgcgctcaaatgagtggagattgaaatgggttcccacaggtaaagagaacagtgcccggcacccagtagggtctcaaacagccttgcttttctgtctacccatccatctttcaggcatctgtttattttcatggcgaggcttcatggggacgggaacaagtccttgatgagcgcctgccaga

SEQ ID NO: 41128 - DNA, 1232 bp, Artificial sequence
  DNA replication origin
aaccaaggcaggagaaagagaggctgcgtctgtgggggtggggcatggtggggagggctggctggagctgggcctggctgcctgcgatgggactcggcagtcctgggccccgcgggtgccagcgcctgtttgtgtgcctgtgtgtgccacccccgcagcccctccatcacacgtgtctcccggctgcctggagagctctttctacaaaatgtgaaaatgacagttgggctcacccacgcgcagaatcctcatgcagtcccgctccctcgctgccccttccaggtcaccatcggccctcaccctctctgcctagctgctgccccccgcccaccgcacccctcctttcccggcccctcccccaaccccctcttccctcctcctgctccttcccttggccccctcctccctccctgctctctgccagctcccccctccctctttcctccctccccctcaggtccccaaggtctctgtctctagctctaggtctctgtcacttttttgggtcactccccctcatctgaatttatgcttgagtaggagtgtgcatgtatgaggatgtccaagaagggagtgagtgtgtgtgtgcaggtgtgcagttgtgtgtgtatttgtgcttgtgtatgcgggtgtgtggttgtttgcatgtgtgtgactctgtgtgcaggtgtgtgactgggtgtgtgggtatgtggttgtgtgtatgtgtgactttttttggaggtgtgtgactgtgtgtgtgggtatgtggttgtgtacgtgtgtgtgactgtgatggtgtgtgactgtgtgcaggtgtgtggttgtgtgcctgtgtgtgtgtgtgcaagtgtgtgactgtgtgtgtgactgtgtgtgcaggtgtgtgattatgtgcgtgtgtgtgattgtgcaggtgtgtgtttgtgggtgtgtggttgtgtgcgtgtgtgactgtgtgcatgggtgtgactgtgggtgtgtggttgtgtgcatgtacgtgactctgtgtatgcaggtgtgtgactgtgcgtgtgtgcacacaggtatggaagtgtgtgtgcatgcgctccagcgggtgggggatggatggtggtggcatttcagggaacgaatggagctttcactcaatgactcttcaagcagcgggagggggtggcagcttcacaacagtcggacaggtttgtgcagcatgtaggaaaagccttcatttcctactgacagtggtgacatgggtggtgacaggtggagct

SEQ ID NO: 41129 - DNA, 1002 bp, Artificial sequence
  DNA replication origin
ggcaacagctcacctccctcagaatgactgtaaggctcaaaacaggtcatggacatgaaaactctacagggcttatggttgcaagataacctctcttaatactaggtgggtgggcaggtggatggatgtgtgggtggacagatggatggatggacaggtggatgggtggatgagtggatggacaggtggatgtctggctgactatacagatgaatgaatggacaaatggaaagatggctagaaagatgagcagatgtatgtatgtacgtatggatggatggatggatggatggatggatggatggatggacaggtggatgggtggacaggtagatggatggacgggtgggtgaatggatggatgagtggatggatggatggatgggtgggtggatggatgggtgggtggatggatggacaggtggatgggtggacaggtagatggatggacaggtgggtgggtggacaggtgggtgggtggatgggtgggtgggtggatggatggatggatggatggatggatggatggatggatagacaggtggatgggtggacaggtagatggatggatggatggatggatggacggacggacggatggatggatggatggacaggtggataggtggacgggtggatggatgaaccggtggctaggcatatgggtgagtaggtacatcgatctgtggtgggtgaatgacagagctcgacttctaagtcagtcagcacaagtgagggagtcaggtttcattgccccagtgaaatgctctacgacgtcctccttcaaactaagcaacttcttttcctatgggtgcttgccttgacatcctatgaagaccactctcccataaactcttcgtccctgaaaagccagactccccagcatgctctccagactctcctgggactcagaagcattgggaccacctgccagtgtcttcaggcccatgagctctatgggagcagggcacatctgtctagatagacaccgcaggatccctg

SEQ ID NO: 41130 - DNA, 963 bp, Artificial sequence
  DNA replication origin
cccactgccctagggagacccccttgggcacagggaggggacatgcggagaggccattttagggccagcttctctctgtcctcatcccctccaatcccagagggctccttgaagatcacctagttcaaaaccatctttcccacatttaacaaatgaggaaactaaggtccagagagggtcgtggctagtccagggtcacacagcaattcagtgtgaccaaacagcagttcaggaaggaccaagccaaaccagcacaccttccccaacagtgtgtgattttctcccatgtgccccacctgactttactgggaaatgagccaaaaggtggcctccgtacactcagcacccagaactctgcctggcggacagaaggcgcgccaaagacacgtgtgaaatggacacagcaggtgtactgagctgtgtactgtgccaggaccacagagctatacatgctcctgtgccgggcatgaggaggcagggagaatggggctgggggtcgggaggcctccgggagaaggggatgtctgagttgagacccaggggaggatggggattgagtaggtggagggggagggctgggcggcagtagcgggggttcagggagtgtaaagggcttggggagggagctgcaggagctgggggttacaggctgggtggaccaaggggtggggcatgaggctggagaggacagggcctgggcatggaccatgtgcctgagggcagtgggagcataggaagaggttagcaagtggttgctttagaaacacccctggccagagtgcggtgtggggggggcggtggggggggcagtgggggtgagctggacatgggactgctcctggaacaggtgtgagcgaatggccggtactgggcaggggtgggggtgggatgcagagcagcaagtgggtgggagagggactgctgggcccagtccaggtcctccttgagtgtctggtgtgggca

SEQ ID NO: 41131 - DNA, 1808 bp, Artificial sequence
  DNA replication origin
ggcttggggagggagctgcaggagctgggggttacaggctgggtggaccaaggggtggggcatgaggctggagaggacagggcctgggcatggaccatgtgcctgagggcagtgggagcataggaagaggttagcaagtggttgctttagaaacacccctggccagagtgcggtgtggggggggcggtggggggggcagtgggggtgagctggacatgggactgctcctggaacaggtgtgagcgaatggccggtactgggcaggggtgggggtgggatgcagagcagcaagtgggtgggagagggactgctgggcccagtccaggtcctccttgagtgtctggtgtgggcacctgggtgggcgggagggacctcagctctcaggggccagcacagagggccacgtcgctcctggctcccacccacagtgctgcttgtttctgtcctgggggacggcgggggctgccctcagcaggcagctgccatgggaccatggtcacactccaggccacggagcccacaggcaccgccaccttccagaggtgtgtgcacgttgcagagggtcgcacacaagggatgtttgtacgtgatcttgatctgaacctcttgtccggtctagggtctgcccagcagggggcagcactgtgatgggaccgctgaggctgcaggcgggcttaggggcatgggacgggacacgggcggaggcctcgctcttgccaggcgggcttctctacatctgtgtgagggtgtgtgtgggtgtgagggtgtgtgtgggtgtgagggtgtgtgtccaccagagaacacgtgtgaggacgtgtgtgcacgagtgtgtgtgcaatgaagggtgtgcacaggtgagtatgtgcctgtgaggtgcgtgtgcacatgtaagtacatgggagagtgtgtgtgcatgtgacaatgtgtgcatctgaggatgtgtgtgcacaagtgagcaaatgtgaaagcctgcacacgtgaatgggcacatgtaagggtgtgtacatgtgagagtgcgtgcctatgaaagtgtgtgtgttgtgagggtgtgtgctgtgtctgcctgggagggtgtctgtgtatgcctatgaatatgttcatgcctgagcatatgtgtgcttgtgtgtgtgtgcctgtgagggtgtgtgtgcctgtgagagtgtttgctgtgatgtgtgtgtgcctgtgagggtgtgtgtgcctgtgtgtgtgtgtgcctgtgtgtgtatgtgtgctgcgagggggtatgcctgtgaggggtgtgtggctgtgagggtgtgtgtgctgtgaggaggtgtgttatgaaagtatgcgtgcctgtgaacatgcgtgtgtctatgagcctatgtgtgcctgtgggggtgtgtatgtctgtgaaagggtgtgtacgtgtcaagagtgtgtgtgtgcctctgagcgtgtgtgcgtccataaaggggtgtgcctgtgagggtgtgtgtgtgtgaagtgtgtgtgtgcgcctgtgagggtgtatgtgtgacgtgtttgtgtgtgtgcctgtgagggtgtgtgtgaaagggtgtgtatgtgtcaagggtgtgtgtgcgcctctgaacgtgcgtgtgtccatgaaggggtgtgcctgtgagggtatgtgtgtgaagtgcatgtgtgtgcctgtgagggtgtgtttgtgagagcgcgtgtgtgaagagtgtgtatgtctctgtgagggtgtgtgtatgaagagtgtgtgtgtagcgagcatgtgtgtgcctgtgagggtgtgtgtgtgtgaagagcgtgcgtgcgccttgcacgtgtgtgtgggcgcctgtgcctctccc

SEQ ID NO: 41132 - DNA, 986 bp, Artificial sequence
  DNA replication origin
agcgcaggctctgacaggtgccaggagagggcaggcagaggtggggacagaggtccctgggggctgtgaaggaaacacttgagcatgaagtgaagacctggaatttggaggctgctgggcctgctggacgtgctggaaaggagtgacacttggcacgaagtgcctgagtgccgcgtcggatgcagggccacttacggtagtgccggggctccttggcgtggggcccaggtttggcgggggccggggcctccgggcccagggcctggcgccggctctgcagggcctggtagaggcccagggcgcggcgcttggccttgcgcaggatgtggcagacatactggaagatctcctcgtagcagtcgccaggctcggcgtagctggccaccgtgctggaggacaggtagcgctgccgctgctccagcatcagccggtgctcccgttgcttggtctccgagaactgggtcgctatgacaacgaggcacaggttgatcatgaagaaggagcccacctgtgaccaacgggaggagaggacagggacagggacagggatggaggggacagaagggtgagagaggcagagtcatggagtggggacagcagggagacatggggagagggaggcagagggagatggggagatggagatggagatggcggtacagaggcagaaatgaagcaaggaggaggggcagggaccaaccggagacacagaggccagagcaagggcaggtagaaagagacagtgaggtacagagacgcgatgacaaagagagtaagacgggctcagaaaagacagatgcaagggaggggagatgcaggggacgagtggaaacagggaaagaaaagggcaggggaggtggaggggcccagagagacacaggcacagacacagatggggacaggaaaagatcgctgaggcctcgctccaggagaaagcgacggcccaggcagctccctgggcccgaccggaatctgcttcaaagccc

SEQ ID NO: 41133 - DNA, 1122 bp, Artificial sequence
  DNA replication origin
agagggtcgcggctgctcaagcgccgtccccatgcctgccgacttccttctcagcaccaactgggagaagtggtattggggctgggggcagggcccacctcccgtggccctggcttgcctcttcccgagtgatcatttccaggggaggcaggcccatgcaaagtctggcaatgccggcttccgagatgtctcccttcatctccctgacccttagtcttcccatctgaaaagtggagataatattactatcttctcccttctcaggaccgtttcctggaacagatgaggcaaccaacagggcagccccttccaagcctaaaagcataaacttggccaggggcggtggctcatgcctataatcctagcactttgggaggccaaggcgggaggatcacgtgagcccaggagtttgagaccagcctgggcaacatagggagacccgtctttacaaaaaaaaattaaaaaattagccgggcatggtggtgcatgcctgtagtcccagctactccgaaggctgaggcaggaggatggcttaagcctaggagtttgaggttgcagtaagctgtgtttgtgtcactgtactccctgggtgaccctgtcttaacaacaacaacaaaaaacaaaagtgtaactctcacagccccacgacaagcacagagcacagggtggcatgagtccccaacatgccacagctttgaggggcaggcccacagcccctttgtgtcaggtacccagggtcattgctcaggtgtgctggaaagcaggggacagcagcaggaacccagagaagggagtgatgtggctgcagtgggggggaagaattttagctttccgagactgaggagagacacttgttctttcctctcaagtgtggcttcctccgaggccgatctgctatctccacacatacacagggatcgagttcctccagggcaaaggctgagttccctcagccccaggcccggcccagcgcaggctctgacaggtgccaggagagggcaggcagaggtggggacagaggtccctgggggctgtgaaggaaacacttgagcatgaagtgaagacctggaatttggaggctgctgggcctgctggacgtgctggaaaggagtgacacttggc

SEQ ID NO: 41134 - DNA, 1111 bp, Artificial sequence
  DNA replication origin
gggcctaggccaggagggatggccggtcagcacggatgcgcgccctgcaccgtgctgggcccatcatgtgccttaagggagagaatcctcctacagcctgcatggtgggcgttcctgccccaacttctacaacaggggcagacaaagctcagagagctgcagccgcttccccaggcacccctgaccgcctttccaggctgggtcggctggttccaggcagacctgtgggcctgggagccaagcgcactcagggatgtgtcccagggtggattgggcctggtgtgggcaacgactctatgcccctctcatttgcttttcagagctgtgcccgcaacatagccccctggatgcgacgccccacaccctggtgcagcccatccccgccacgctggcttccgatcccgccagctgcccttgctgccagcatgaggacggccggcggccctcgggcctgggcagcaccgactcgggccaggagggctcgggctccgggagctccgctggtggcgaggacgaggcggatggggacggggcccggagcagcgaggacggagcctcctcagaactggggaaggaggaggaggaggaggagcaggcggatggggcggtctggctgtgcggggatgtgtggcgggagacgcgagccaagctgcgcggcatcgtggacagcaagtacttcaaccggggcatcatgatggccatcctggtcaacaccgtcagcatgggcatcgagcaccacgagcaggccagtgcagcgcagccgggccgggcctgcgggagaggtgtgagggccccaggaccctgcccaggcctgggcagccccatccatctgcctgggtttgtgtgtctgtccacctagaagtgccgggctgagctgggtccagttcatccatgtgaccttactgcccagccagggccgagctcagaggaaggaagggcttgggtgtctgccgaatgaatgatgagtgaacgagtgaagctggctaggactgggcctctccggggctcttttcctcctaagctgctcagcctggataccaaggcaaccacagcgcatcccctgccagtccctgcaaatctgacttctattcacctctccacctgagccctt

SEQ ID NO: 41135 - DNA, 1387 bp, Artificial sequence
  DNA replication origin
ggtgtaaatactccctccacggccaatttcaagctcccaactctttcatcactggcttgcaaaattcctgagtgtttggaaattggccctcaccagctggctccagcaagcccctggcaaggacagtgccggggctcgagggtagcagggctgtgcaggccccctcgatgctgccccacttggagactggagcgagccccacagcactcattccctgtggggctttctgcaggaatgctgctcccctgcaggcctgggtcaggcactgaccagaggctgaactctaagcaagggggtcctgggggccctgtctcaccagctctccccctgcagagagccctctcgctagccctccccagagacctttttaattaagctggaatggctggcaaatgagcagctctgaacagagtgtcatggcagccccgggagccccatttaagtaaattgaatggagcctgtgcttggtgagctaacgaagagggaggtgcgtgtgcggccccatggggtgcggcatgcagggcctccacagaaggagggccgcagggcagcaaacagaatgtcgaaatcccaagccctcccggggcgtcagtcttgccacagaaagaagttggttcgaacctggcccccagctggcggcgggacctcgggccagtgacttccccgccgttggacctcagggtcaccagctgctaggtgggaaccttcgcagagctggggagtgggttcagggagtcaccccatccaggggctggtggatggcaggagccagaaaatggtgtttttccaaatggggcaggaccagacctgccacccaggctgtcaaccccaggtggggcctgtggactgaggcatccttgctaaccccactgcccctccctcccgtgtccccacagaggccctgctctcctcacacacacatcctcccccagctcccaccatctcccagaagctgtcccctcccctatgtactgtccccctggggcccaccagccctgtgatggcccaggggcctggagcacactgttcagctcagcgcccactcctcctgtcctccctgctcccagcccacaggagggacatgcagagaggacacacaggacaaccacagggccactcgccctcagcgccatggggctgtatggggtggagtcactggatgggacaggacaccctggcctggtgaagggacgttgtgacagagacaaggggccttgagggtcatgcaaaggtctggattttgtcctgagggcaatgaggagcaacagaagttttgaggcagggaagagcccaacaagactggccctctggaagaatcaccccagctgtttgggggggaatggacagaagggcccaggtggccaggcttggtggcacctccctgtag

SEQ ID NO: 41136 - DNA, 1106 bp, Artificial sequence
  DNA replication origin
tgggagtgaggtgtcaggctggttctgagcacagaaggcaaggggtccacacatacctaaataaagctaagagccctgcaggtggggcgaaggggaggcactgtgatggggtgcaaccaggaagacttcctggtagaggaagcctccttagaaaagctctccatttctgctccttccttgtttgtctgtctcgtggctcccttgctgttgttctgtcctgtctgccatctgtccctccctctgtctccatctcactcctccagatcccaagctctgcccaatccccatgacccccaatgggcacctggaccccagtctcccactgggtgggcacctaggtcctgctggggctgcgggacctgccccccgactctcactgcagccggaccccatgctggtggccctgggctcccgaaagagcagtgtcatgtctctagggaggatgagctatgaccagcgctccctggtgagtccttgtggggagctctggacgggcgcttcctgctggggtgtgtgtggaggggccctgaagagaggtacctgccagtctagcctcagactctggtgcccagccaaagtcaggcaggggccatgtctgttgcattcctgggtgcccagtgccagagtgggacctggcaataaggaacgaatgaaggcctagtgccagtggggtctggtgcagagaattggattttcatctcagcaacaatgtgtagggtaaaaagagctgggctttggagtcaggcagactgcagcttgaatccaccttctgccacttccaagctgtgtgaccaggagcaaattactgcccttctctgagcctcagtttccttacctgcaaaatgggaagatggccctaacttgctgtaccttcctcaagggaagtgaggtggcaggaggggatgtaacctccgggtggatgtgcccccatgtccctgtggatgtggatggagtgaggtgggacagggagaggagctctagggtcaagcccattccatcacccgctggccaggtgggtggtcttagagccacagcgggggtgcaggctgcctttgggcacctggtgccccagccgtgggtgtgcctgtggggcgctgacccgaacg

SEQ ID NO: 41137 - DNA, 1549 bp, Artificial sequence
  DNA replication origin
gagcgcggcggcggcgcccgggtctgcgaggttgccgcggacgaggggccgccgcgggccgcacccctgcacaccccacacgcccaccacattcatcacgggccccatctggcgcaccgccaccgccaccaccgccggacgctgtccctcgacaacagggactcggtggacctggccgagctggtgcccgcggtgggcgcccacccccgggccgcctggagggcggcaggcccggcccccgggcatgaggactgcaatggcaggatgcccagcatcgccaaagacgtcttcaccaagatgggcgaccgcggggatcgcggggaggatgaggaggaaatcgactacgtgagtgggggcggggccgaaggggacctggtgcggtgggataggacagaagtgggtgcggccccaggaggcggggcccgagcgggcgggcccacggggggcgtggccggggcgtggccggagcggctagggcttcaggtgtgaggcaggaggggtggggccagaactgcccacacctgagctgggccggctcctgggagagaagccctccctggctgcccccggggggcagagagttcggaggtgaccctgcgaccccagttggcgcgatggccgcatgggcggagaccggcaaccctgcgcatcgctgacccccggcgctccgtcctcctcttgctagaccctgtgcttccgcgtccgcaagatgatcgacgtctataagcccgactggtgcgaggtccgcgaagactggtctgtctacctcttctctcccgagaacaggtgggcagggccaggcctggggtgagggttagagtaggggtaacgtgggagggacggatctctgccaagccaggcaaggccattggtggcgctctcccagaccacagcggaccctcccggcccagaggtgggggtctccaggggagagtgcagcctcctgagggctgctgggtgaagatggatttggggagtgggattggctggaggaggtcagggaagagtctcagccttggcttccaagatccctggggatcagggttccctctggggctaggcgaggactttaggcaagacggatgttggtggccaggctctcctgggctctcctctagtctaggccatccctgtgctgggcaccaggttgaaccattctcaagtagcctgtatggcttgcatctgaggggacatcagaaggcttcctggaggaggaggcctttgtgctgggctctggaggcaggtggcattccagtaggcacatcaggggctgtgaagaggaggagcctggtgcaggggcagggagcagcctgagggaaggcctggggcagaagcagagggtactaggcagcgtggtatcctcctgacaggctcagggatctgggctgggtaagcctcgagtgccagggaaaggtgggtgacctcgtggtgtgggtgtatggtcagaggaggcagcgccaggtgggcaccctgagcaggtgtagagtcggcacctggccagaggagaggataggggttgcttcctcgaggccagcgtggtctgcactgc

SEQ ID NO: 41138 - DNA, 821 bp, Artificial sequence
  DNA replication origin
gaggcatgaggtggggagaggaggcaggtagtgttaggtggtctgcaagcccccgggtgtgccatgacaaggggcaaaagtttattctgagggcagagagagccggtgagggacttacagcaagagtggtgtccctgcttgtcaggtctgcttgtcagtgcagcttcctgagggctgctgggtgaagatggatttggggagggggattgggtggaggaagtcagggaggagactcagccttggcttctgagacccctgagtagcaggggtccctctggggctaggcggggactttaggcaagacgtgtggctgaccaaggttggctgtgtccagactgagggggtcactgggagaagaaacagaaagattctctagctcaagacagggcccactcagtggtggaagcagggctgtgtgcaactcccaggctggtaatggacctctggctcttggcttcatgggtcccacccagtaaggctctggagctggacgtgggggtggcagtattgtgtgggaggaatgcgaacacttggacgcatctttctctatttccttgtctgctctgtctcctcacccccaccagtgcatgcatgcacatgcgtacatggattccaccaaggaatctgtgcatccaagttctcccctctgctggccgccttgttttctgccttatttctggatgggcgaataagtggctggtgggtggatggatgggtggatgcatggatgggtgaatggatggatgggtggatggatgaatggatgggtgggtggatggatgggtgggtagataaatgaatgggtggctggctggctggct

SEQ ID NO: 41139 - DNA, 913 bp, Artificial sequence
  DNA replication origin
ggacctctggctcttggcttcatgggtcccacccagtaaggctctggagctggacgtgggggtggcagtattgtgtgggaggaatgcgaacacttggacgcatctttctctatttccttgtctgctctgtctcctcacccccaccagtgcatgcatgcacatgcgtacatggattccaccaaggaatctgtgcatccaagttctcccctctgctggccgccttgttttctgccttatttctggatgggcgaataagtggctggtgggtggatggatgggtggatgcatggatgggtgaatggatggatgggtggatggatgaatggatgggtgggtggatggatgggtgggtagataaatgaatgggtggctggctggctggctggtgggtagatggatgggtggatgcatagatgggtgaatggatagatgggtggatgagtggatggatgggtgggtggatggatggatggatgggtggtggatggatgggtgggtgagtgggaggataggtggatggatggatggatgcatgcataggtgaatgaatggataggtcaatgagaggaagaagacagatgtttccaggaggcagccactgagcagggaaggagaggtggctttcttggctgaggacgatattgtgccatgcccagggtatttacttcttacctgctgcctcatttagacctcacagccaccttcctggaggcaggctcaacacatgcccactccatggaggctcagccaggatgggcacctccccatggccctgtagggcccaatcagcctcctcagccctttctgactcccctgcagcctgtgaccaaccacaacccctggatgctgctgtacttcatctccttcctgctcatcgtcagcttctttgtgctcaacatgtttgtgggtgtcg

SEQ ID NO: 41140 - DNA, 765 bp, Artificial sequence
  DNA replication origin
ctcttcacctataaaatccagacaaaggattccccctgccagccttaggattgctgcgaggattaaagagttcatatatgtagcgtgccttgcaaagagtcaatatttaacacatcacagtcattgccacccatgtgcaagccacggtccaaatcctgcctccctgacccaccttccctctgaccgttcccttccagactctgagcttcctgagggcaagcttgtccggcacctcctcccactgcagtgcccagcatagagcccagcatggaggggctgctcacatcctgctatcagctaaccccttccccaccctatccctggggtggggtcctgctgagaccccaccctcaccttgtaaccttgggctgggaggcagaccagggctcaccgtgggctgattgtagtgctccagggacatggtgaccacgttgaggcagatgatgaaggtgatgaagatgtccaggtagtggctggtgcacatggagtggatgagcagccgggtgtgacaataggtggcatagtagggcagccgctgggcctctgcaggtggtgcagggggagtggcaaagaccacagagggttggggtcaagggaaagggcacagagcacaaaggacagaaaggtggaggaaagggagggggcaaagaggaagatgttgatccaccccaggccctgggatcagtgttagatctcctccacccagccaaagcaccatgagagaaactgtggagaagggtgacaaagaaggcaggacattcattc

SEQ ID NO: 41141 - DNA, 1239 bp, Artificial sequence
  DNA replication origin
ctgcctttgagaaggtggctctgctggctgggaggagaatggattggagggagaggctggaggcagggaagctggtgaggaggctgctgcaaccctgccggctctgagatgctgacagcagggaggggacagatagaaaagctgacggcaatcctggttaagagatgctgcccccgccggcctgtgcagggcacaaagctgaattcctagagccgcgaccacgccagatccttctcagcggtcagggccttacagttggcctcacgggtgctcagtaagtgcttgttttattaatgaagggaacatcatttaattagtcagacactagcagtgtagaacggctggccaggaaaccctgctctggagtggagcggagaaactcgaggagtggtgattaatggggtttacttttcagcagttaacgtgaacgttttctgagggttctaaggccttctgagggttctaagagatatttcatttctagggcaagaatgtgttttagccttatcttatccatagcatgagttaaaggtggtctccaatgcatggatagatttgaactaggtttggaatctgggacgctttctcccacaggagctgtgggatgggggtggctgggtttgcagaggcttctggggcccacgggcctgcgtgattcctgccttccctcctctctatggccaggcctcatgctggcccaaggaggcaaatctgacctcatgcagctgtgttcctgctcttgaagatttcccagaccagcagatgacagtgacagggataagtgcatttcggtggtttcgtagaggagctagtgttagagctgagacctcctgccttctcccttcccttcgttcatccatccattcaaccttggtagccactcaaggcgtgtagcatagattgtgtgcatggaccctggggccagcctgctgggtttggacccttgtcctaccagttactagctgtgcgactctggacaagtgatgtcacctctcagtctgtctccttcttcttctgaagaatggggataaaagatagttcgtggattattgtgaggaggaagtgagctcatgaaccttaagtgctggaaatgggacagcttgtggtaaaggtggcacaagtgttttcttgttattctgagccctgtgctggacccagcctgccctccaggtcctgtaggggtggcagacgtggacacacagcctgggggaatgttacagctgctctgacccacaggct

SEQ ID NO: 41142 - DNA, 1443 bp, Artificial sequence
  DNA replication origin
ctgcccatgtcaccctccccacagctggcctgcttccccgggacagtcaggcctgagaaggggcatctggggcttccttcaggggcccctggggagtagggtgcattcgtgaccagggcctccctgtccttcctttctggtttttcagctcaacccccaaccacaaagcccaagaagactccatcaccttcccgccctgggctgaggagattggccgcctctcccagcaccctggcttcctgcccccttgctgggggcactgggggctctgcagggtgggggtgggaggcagaacaggcctacctctgccctctccaccctagggccccggaaccgaggccttacccctgtcctctgggagcccctccctgcccttcccagcccagcccgggttgcagcccaggccagggagcctctgccgggtgacctggtcagcgtggaaatcactagggggcctggccctggccttcaggcctgcctgggccccaggtcccctccggaactgggtggagttgtctaccctagaatctgagccctgatcccaggcaacactgggggatgaggcagtgtagacagggggcctgttctggctcagctctccccactgtgctggtcctgggcaggcccctccactcctccgtgccctgcatgcccctcccatgtgtggtggggccctgggtgggcagagccctgagcagcaggaccagcatcctcactgtcccagcacctggctgatttctccaccccagcccgcccaggagtaccttcatgatcccgttccagttgtcacccgtggagacctggaagagtgtgaggaaggccatgccgaagttctcgaaggtggcatgccggctcatgccctcgcacgggttctcgtcgttgcagactggaagcggggaggaggtcagccctgcccgatggcggagtgcctgcggggctcaccctgacctggtgcctcccgcctcgcctcagaaccctcatcacaccctaggaggggcctgcagactgtgcccagcccacagataaactgaggctcggggagatggcacatgagctggggctcaggtttgggtgagtctggctctgctccccgccgaagaatgggtttctgagaaagagggtgaaatggggtgagggccagcccctcggggaaccctgctttctggagccatcccggtgcagggcggagctcagcgagcgctctgttgctctttcccctgccctggcctctccacttgctggggtggcgctggctcaggacaggcaccaacaccggggtagggagggcagttttcctgggagaccagacagctgagggccctgctgtaggcatctccccaatacaaagaccctgatgtgacgggctcaggggtctcaggcctcccccgcccccccagttcctcctgcagccctgctgcacccccaccacgggcctgctctggg

SEQ ID NO: 41143 - DNA, 1206 bp, Artificial sequence
  DNA replication origin
cgggatcatgaaggtactcctgggcgggctggggtggagaaatcagccaggtgctgggacagtgaggatgctggtcctgctgctcagggctctgcccacccagggccccaccacacatgggaggggcatgcagggcacggaggagtggaggggcctgcccaggaccagcacagtggggagagctgagccagaacaggccccctgtctacactgcctcatcccccagtgttgcctgggatcagggctcagattctagggtagacaactccacccagttccggaggggacctggggcccaggcaggcctgaaggccagggccaggccccctagtgatttccacgctgaccaggtcacccggcagaggctccctggcctgggctgcaacccgggctgggctgggaagggcagggaggggctcccagaggacaggggtaaggcctcggttccggggccctagggtggagagggcagaggtaggcctgttctgcctcccacccccaccctgcagagcccccagtgcccccagcaagggggcaggaagccagggtgctgggagaggcggccaatctcctcagcccagggcgggaaggtgatggagtcttcttgggctttgtggttgggggttgagctgaaaaaccagaaaggaaggacagggaggccctggtcacgaatgcaccctactccccaggggcccctgaaggaagccccagatgccccttctcaggcctgactgtcccggggaagcaggccagctgtggggagggtgacatgggcaggagcaagagaggaggagagggcgctgggccatccgtctgtccatgcggggacttagctgaagctgaggcaggcagatgccgcaacaaggcagagtggggcagggcagcccggggccatctcgggggttgaatctcggtcttgctgcctccgagcgtggccctgggctggcctctgcctccagcagcctctgggatgtctccgtcctcatcctcaccgccctccctgccacgcaggacacgctgcgggactgcacccacgacgagcgcagctgcctgagcagcctgcagtttgtgtcgccgctgtacttcgtgagcttcgtgctcaccgcgcagttcgtgctcatcaacgtggtggtggctgtgctcatgaagcacctggacgacagcaacaaggaggcgcaggaggacgccgagatggatgccgagctc

SEQ ID NO: 41144 - DNA, 1405 bp, Artificial sequence
  DNA replication origin
tggggcagggcagcccggggccatctcgggggttgaatctcggtcttgctgcctccgagcgtggccctgggctggcctctgcctccagcagcctctgggatgtctccgtcctcatcctcaccgccctccctgccacgcaggacacgctgcgggactgcacccacgacgagcgcagctgcctgagcagcctgcagtttgtgtcgccgctgtacttcgtgagcttcgtgctcaccgcgcagttcgtgctcatcaacgtggtggtggctgtgctcatgaagcacctggacgacagcaacaaggaggcgcaggaggacgccgagatggatgccgagctcgagctggagatggcccatggcctgggccctggcccgaggctgcctaccggctccccgggcgcccctggccgagggccgggaggggcgggcggcgggggcgacaccgagggcggcttgtgccggcgctgctactcgcctgcccaggtgggcaggggctggagaggtgtgagggtcgccagagggggggcaccgcagggccagatgggcagcagggccagggaggccttgcacagagacctctgtctttctgggccccaccctgctcagctccatagaaggggtgaccctgtgatgagggggtcggtcccaggccatgggcgcagagaaccaaccgggagggcagctgtgtcctgcccaccccacagccccgggacccggctgataatcccgcctgtccccaccccgtccccgtccgcctaggagaacctgtggctggacagcgtctctttaatcatcaaggactccttggagggggagctgaccatcatcgacaacctgtcgggctccatcttccaccactactcctcgcctgccggctgcaagaagtgtcaccacgacaagcaagaggtaatggcagcccgggaggcctggccccttgtggcaggggcagcacgaaacctggtggggggcctgtccgagggcagagcctggctctgggctgtagagaccaggctgggtcaacgtgggcacacgtagcttccatggctggggcagattggctccctgagtcagggccaggtgtgggcctgtggtgtggtggccacagctgccgaccccagcaccatgccgcacacagtaggtgcttgggtagggcagctgccccaccttgtgtgctgcaggtgccaggcagggagcctgtgtgtcacttgcaggacagcttgccctttctgtgacatgaggggtcatctgcccgctcttcccccaaggcatcatcctggcactcaacctcctccaggtgccctgtcctggcctccacctcagggcttaggcccacccagctcaggggttcccatgggcctgcctccagagcaggcgcagttagccccctcccctctccccagcagtgtggg

SEQ ID NO: 41145 - DNA, 1109 bp, Artificial sequence
  DNA replication origin
gctgtgtctttgcccagggcccccgccccctggaatcaaaagggctgcttcaggatttctctcttgctctcacaatggggaaacgaaggcttagagaggggggacttgtccacagtctcacagtcagtttattaggtggcccctcactgctggcccagtgagattggtgctcaatgccaccttccaggggctgccccctggcctgagcgtgctccctcagctctgtcttctcctttcccagcagcacccccaagtcccttctccccggatgcctccagccctctcctgcccatgccagccgagttcttccaccctgcagtgtctgccagccagaaaggcccagaaaagggcactggcactggaaccctccccaagattgcgctgcagggctcctgggcatctctgcggtcaccaagggtcaactgtaccctcctccggcaggtaccgacacctcccaggccctagagcactggtctgtgggcaaggggcaggatctaagccaggcctggaagtccaagggactgggaggggaaggacccaaccaaaggccgagggcaccaccgtgcaagggggtttgggaacgctggggtgacgctgagactggagggggaggtggcactggggcggatggagtgggcggggctgggtcctggggacagcagagtgtggggaggaccccaaggcgggtctggaagaggcctgtgatccctagcttgaggggaggggaggagaggaggaggagtactggaggttttgcagggtggcggggtgctggcagtggggaggacaccctgggtgctctgggtgggtgtgagtgggggcttgattactaggaatggaggtgggagggcgggtctggtggatgagaagcctcgggctgcagggtcccccgtactggattggccagggccacagccctcctacccacgggcacacagaggtctgaagcactgagggctccgctgtgggggtggggaaatggggccgggccggctcccacagtgagtgcagttgattcactgggtgactgtctgacccgtcacaccaggctgtgtgctctggcgggcaggacacaaactccctgcctgccgggctcactgtttagtgct

SEQ ID NO: 41146 - DNA, 845 bp, Artificial sequence
  DNA replication origin
tcgggctgcagggtcccccgtactggattggccagggccacagccctcctacccacgggcacacagaggtctgaagcactgagggctccgctgtgggggtggggaaatggggccgggccggctcccacagtgagtgcagttgattcactgggtgactgtctgacccgtcacaccaggctgtgtgctctggcgggcaggacacaaactccctgcctgccgggctcactgtttagtgctgagagtgagctgcctgggtgcaggagggatgataaccaaaataaatgtctgcagagtaaagtctactccatggtggacaggcagggagaacagctcctggggaggggctgcaggtggggggccccggggttgggaggtggggggctctggggctgggaggtggggggcccacggggccgggaggtgggggccaggggccggagcaagtgggagggaccggaaccagtgggagcagccaaggctggggccgcgtcagaccatggggggtgcggtgggggtgccacgtgccctgggggagggcggtgggcccagggcttccccttggagtgagcctggagccttctgtgacgggcagggccgggtctgacctgggtttgaggcggatgctagctcctctcgggggacctctcggggcaggtgaaggccctgcggtgacgccgcctaagctggacgtgcggaggggagaagccctgctccgaagggagctccttggatggggtctgcctgctgcctgctgtgcgggggagggcggcgtccaggttgctggggtgggggccgacacaggcggcctccacggctcccacctccccccaggccaccgggagcga

SEQ ID NO: 41147 - DNA, 1788 bp, Artificial sequence
  DNA replication origin
gaggacgggtgtcaggactcccagctgggaacccaatgcacgcagccttctctgctcctctcagcagcccgccaggagaagtgccaccagcctgccggctgccaaggctcaggtgcggcagatgggccaccactcacacgggctggagccagggtttgaacccagccgtaccctctgatttatgtgtcaggctggctgggctacggtgcccggttgctcagccaaatgcaaatctagatgtttctgtggaggtattttgtggctatgactaacacctacaatcagttaactgtgagtaaaagcaattacccctcgtcacctgggtgggcctcatccaatctgctgaaggccttcagaggaaaaacagaggctttccaaagaacatagaatcccacccagagactgtgacatagaaatcctgccttagaggccgggcgcggtggctcacacctgtaatcccagcactttgggaggctaaggcgggcggatgtgatgggcgaggtgatggggagtgatggggaggtgatgggggaggtgatggggagtgatggggaggtcgtgacggtgagtgaagaaggaagaggtgatggggaggtgaaggaggaggtgatggggaatgatggggaggtgaaggaggaggtgatgaggagtgatgggcaggtgatcggggaggtgatagagagtgatggggaaggtgatggggagtgatgaggaggtgacagcaagtgaaggaggaggaggtgatggggaggtgaaggaggaggtgatggggaggtgaaggaggaggtgatggggaggtgaaggggaggtgaaggaggaggtgatggggaggtgaaggaggcagtgatggggaggtgaaggaggaggtgatggggaggtgaaggaggaggtgatggggaggtgaagggaaggtgaaggggaggtgatggggaggtgaagggaagtgaaggaggaggtgatggggaggtgaaggaggaggtgatggggaggtgatgaggagtgatgggagaggtgatgaaggggaggcaaaggaggcggtgatggggaggtgatggggaggtgaaggggaggtgaaggggagatgatggggagtgatgggggggtgatgaaggggaggtaaaggaggaggtgatggggaggtgaaggggaggtgatggggagtgatgggacaggtgatgaaggggaggtgatggggagtgatggaggaggtgatgggggaggtttcccctaccttccatgctgccttgggaaacggagagctcctggactgcacctgttcagtgtttatccacagtgaccgggaggttcttgagaaagaaagtgccactcagaagcccatctgctcctcctcccctccaccccatgcaccacaggacataaatcccagatgaaaaaggaggccggagctggggtcacacccagagccacccattgcccccatcactgcaggaggaggccccagggcctgggtgcaacccacagcctccctgtccacctcccgcgcttcctgcagcctgggccagccctgtgacctgatgaggatctattttagtcgctacactgcagggcagagaaaaattgctcctctgcaccgtccccttcggtcaccccatttcagagcagagcccctgggttttaggatcaaagagcagtgggaagctgagagcacggcctgtccattaatcagctgttaaggactcccagaagcccacagaggtctgcaaagagtggtttattttcccttacatccttaaaacctgtggctctagccagaaagagcgtgggcgt

SEQ ID NO: 41148 - DNA, 1377 bp, Artificial sequence
  DNA replication origin
gggctcacagctgctcttgcaggatccctgccagcagcctcagcagctgcctcccctgtcagcagggccttctcctggaacgggacatcttaagcttgttgggatcaattgcccgtggcgttccagttaatccccctggcaggcgactgtcagctttagcaagaggaggcgcgaggacttgtcaggacatagccttcccttagggtatggagagcagaaaggggccagtggggtctgaagggcttggggggtagcggaagcaccccagggcccgtgatcccatctttacaaaacgctcctgggctttagcccccacttatccagagcaatgggcaggaggatgaaccagagtccagcacctggcctggtgcagtgggcactcaggaaggctggtaaaaggctgtgtggacctaggtggaagctccagtgaagagaaaagagtgtgtgtgtcgggggtggggctgtgggtgtgggtgtggggggtgtgggtgtggggggtgtgtgtgtgggtatgtgggggggtgtgtgtgtttcctggtgggggagagggcctagaggtatccttagcctctaacgccgcccgaagatccccagccagacgtgccctttaagaatcgtttgaatccaggaggcggaggttgcagtgaactgagatcgcaccattgcactccagcctgggcaacaagagtgaaactccatctcaaaaaaaaaaaaaaaaaaagattcacacagccagtcattcagctgcaactgattctgcatctgctgcgttcttagcagaccatgatagagacgcagagcttgcctgctgaggtgtttctgccagaaggcttcctggaggaggggtgttaaccctgcaacaggctgaggagacgagggggtcatcagctacagcagcgcttctcagactggtctgggaccagcacctgggagcttgtagaaacgctgattctcagcagggatcagccactcctgggcagggcccagcacccaagtcttaagtgaccaggtgtttctggggagacccactaggctggggcatgggagactgggtcccaagggaaccagcatccagggaattctctccttcggccaagagtttgcggcctgacagtgttctctgcactgtggtcaaggggctcataggtggacaaagtgtgtactcggagcactggcaaagcagaaaacagttctagaagaatctggtatttagtatttttccggaaagcatcaacatcagcatcatgggaaacgctagtatcctgatggacgctcagtctcttttatcccccaaattaggcattaggacaattgttctaggaagtgaatgtgtgttcagcttctcccgcacagttgaccatttctttgccctctcac

SEQ ID NO: 41149 - DNA, 1531 bp, Artificial sequence
  DNA replication origin
taggagcctaagaagaggacctggcaaggacccagatggtcctcgtcaagatgaggacggggccgcctgtgccttgaaacctgcctggcaagaagtgtccctgctcgtcagggggtggggggagcggggcgagggtgggaaatgtcttgctaggagagagttttttattctttaacttatataagctgtggccacagtgcgctccttcgagacgcagtgttccctgtgcccatactgcaggagcctcagaaggacaataaacttcctgctcattctggaacaggctggtttccatcgtgtcttcctcattaccccatagcctcaagggcccagcaaggctctgtgtgcagcagaaaaggtgcttacagcccccgccttacaggctcagggggcatccaggctcaggtgttatgggtggcatcgggctgcccagcctgcttctttccagaccctggtattggccttgcttatatgtttttacattccttccattcctcagaaatgctactggtgcgaatcaaacctttctgtgaagcaagaaacagagggatttaggattcaagcctaggtcaggcaggctgagcatagctttgatagcagtggaggggctggaagtggaggtgatggaggtggagatgacagcagtggggatgatggaagtggaggtgacagcagtggaggtgatggaaatggaggggacagtggtggtgacagcagtggaggtgacggaggtggaggtgacagtggtggaggtcacagcagtggaggggttggaagtggaggtgacagggtgggggtgatagcagtggaggtgacagtggtgggggtgatggaagtggaggtgacagtggtgggggtgatggaagtggaggtgacagtggtgggggtgatggaagtggaggggacagcagtggggatgatggaagtggaggtgacagtggtggaggtgatggaagtggaggtgacagtggtggaggtgatggaagtggaggtgagagtagtggttgtgaagaaagtggaggtgatggaagtggaggtgttgaagtcaagcatatgatgttagaagcagctgcagtgcaaagagggcacatggtggtgcctcctcatgggtctgagatgggattcacggggatgacatgcccagcctagcacctggcacaggcaagtgcccggtcagtgcccactggctgctgctctgagcctccctttttccagccacatgctgggtgcagaggatgcagaaggggatgaacctggcttccttccctgaagactctccccagctgaggatggaagctctcagggtttgttggatgggaaggagcaaatccctctcgagcccgtttaaataaggtgagtttgaatcaggctctagggggatctcccaacacttaattgcagttagggagggtctctcctggtccctttctgtctgccagctccatcctccacactacaggcaggcttccctgacaaggcccttttggctgtcccatagctttgtcgtgtgtggggccctacagcttctctt

SEQ ID NO: 41150 - DNA, 1428 bp, Artificial sequence
  DNA replication origin
ccagcagcgcctccagcgcggcccgccgccgctcgcagtagtagaaggcggcctgcgcctcggtcaccttctcgttcacgtgcgcctcgtccaggcagttcagctgggactcggccatggcgccccggccccggccccggccctggccccggccccgccgcggtccgaggtcccacagccgcacctggagccgccgaggggcggggcgcctcacctggccgcgagctctgccccggcccgtcccgccccgccccgccgtcggggagcggccaatccgcgcgggcgtggccgtcgggcggggaggggccgccgcctccgccgggctcgccgggacctccgggcggcctggcggacgcggtcgggcccgggcctgcagggcccaccagccggggctagagtccctgaggggacgcccccagggggcggggccgtcgcagacccacgtgcgggctccggccccgactcctccgcggggtaaaggttcgctgtccggccctcgctgccatccgcccccgccggccgcgtcgcgggtacgagttcattttccgcgcacgtggagtccggagcacgtgttctggcccagtggcctctggggccgccgagctgaccccttccccgtcgagggtccggtgttggtgggggggcctgctgcaggacgggattgtgacggctgaggagcgggcagggggtgtgcaaaagcgaaatgctaatgagagctcgagctccccacccttgcgtcccagttctgagatcagagcccttctgggctgggagtccaacaccttcactgtaaaactttcttttaaaaaatagctatccaaacagaaatgatgtaaagagcagcagtggaattccccccgcccccaccttaatttgaagtagggtgtgtggtgtctctccgtgtgtgtttgggcaagataggctgccagagacatgattactatattagtgattcaaaatgtatgtttgagctcaaggaaggaaaccgcacgtgcgtgcacaccacacacacgcacacacacagcagcggtggcagcagctctgctgtttcccatcggattaaatacaatcgtcttagtcattaacatattatgttgttcatgcactgctctacaatttgattctccacattcaaaatattttcagatcataacaactaaaggttcacatttctctcactttatagcgcagcatctcagagctggaaggagcttttcaagctcctccaaccccctcattttacagttgaagaaattgaggcctagcaacgtgtgcgttgcccaggtctcccgtgaaagaggcagagcacggggactgcaaggttttctgtcttggaggtctttcgctgacatcacggccgcctttaccctttctccttttcttgtgaaacgacaggttattggggacctggttttcaccccaggggat

SEQ ID NO: 41151 - DNA, 1287 bp, Artificial sequence
  DNA replication origin
cgcgctggaggcgctgctgggcggcggcgagcaggcctaccgcgagcggctcaaggaggagcagctgcgggacttcctctccagcccggagcgccaggccctgcgggccgcctggagcccctacgaggacgccgtccccgccgccaacgcccggggcaagagcaaggccaaggccaaggcccccgcgccggcgccggctgagtccggcgagtccctggcctactggcccgaccgttccgacaccgaggtgcctcctctggacctgggctggacggacactggtttctaccgcggcgtgagccgggtcacgctcttcacccacccgcccaaggacgagaaggcgccgcacctcaagcaggtggtcaggcagatgatccaacaggcccagaaggtaggcccccgccttcgcccccacaccgctgggacctcggccccagtcccctggaccgggccccacctcccaggcagggcccggggcaggccgccctgagcaccctctggaaaatgggccccaacccgcccctacttcctggggctgcagtgaggcctgtagagcgaatggctgggaacgtgtttggcaaattacaaggtgctggacagatgtcagccgtcggtattccagcgttcagaggcactggctctgctctgtacttctgaaacttccctgtccagccttcctccccagggaagactgggggccgaggccctgtggttaaaatgcaccactcaaaggtcttgatgataacctacgtgctgcccagaacatatcccgagccgctttctcatgtgatcgtcaaaacaacttcagggagtgggtggcggtgaccttcccggtcccacctctgccatgctgctccttggaccacccctctcctcccatagtcaaagctgagctggcgccctcacagtcacagcctctcctgggccgggtactaggccccagctgcctggaatgaatgggggacggggtatattgaggacctactgtgtgcctggccctgtgctgggcgccttggcacagcaggtcacctgactcggcagctcaggaaagggctcctacttagcatatgtgtcctgcttgagagttggaaggaggggctgtttccagggtggctggtgaggccagtccactgtggaacaggtggaagactttaatctttatgcctttgggtgggagtcctgggcagcttccagatcaaatgtaggatgccccactacatttgaactttcaataaacaacacataactttttagtatcagcttatcccaaacatgacatgagacgta

SEQ ID NO: 41152 - DNA, 1366 bp, Artificial sequence
  DNA replication origin
gtatgaggcagtgctcctggataagagccgatgcggggcgagggccagaggcctggggaggcaccaggccagagggaagagggctcacctgagatgtcagcactggaattctcgttgggcctcttccccgtcagaaactccacttcagaggtctcggtggagacagagctggccatgccattgggcgccgcaggcctcttggctcggcgactgaagagcctgctgctgaagcgcctggcgggggcggcctccccccgggccgcttctcccatgccgtttcggctgggtgcctctcgggatttgggcttcaggtctctgtgcatgtgagagaccatcctgccatccttctggctcagctctcccaaggggatgggctccacggggggcagcacctgctccaccgtaaccaggtctttcaggaagctctccaggcgccaggccgactcgccaccgctggcgccctcctcctgcccctccgggttgccgcccgcctcccgctgttgccgggcagcccagcgcatcatctccccaggcgggtggcggcagcctgacaccaaggcgtacttggggttgataagctttcgagccacagtggaggagtaatggaggccaaccctgcccgccaggctcagctgccggtacaagtccacctcctcggagatggcgtacagctcccggaactccgtgtcaaagggctctacgttctgtcctgtcaggagcaggaggaggtttctgtccacatgggaggaactccaggtgaacctgggaacgtggggacagaaaagcaagacacatgtgcccaggcctctctcttgccctgcccccgcccccacctgcccctccgctgtggccagacccttgctgcaggtgtacggctccttgtgggccacacgctggactgattccctccacccacccgtagcctccctttccccagagcttggcctcaaatgaagcaagcaggcagtgggtgcagggaaagagcatgggaagtcaggcctgcatttaaacctggtttatattctcatgtgccttgtaagctggggctcccaggacatatgttcacagggttgttgtgaggcacaaatgaagtaactcatataaaacatttagctcagtccctggcacaaacacacatttaaaaaatagtaactgcagctgccactattatgaatattattctactctgtattggttcttttctgatttttttaagcacttagtgtctgcagaaacccatactctgaccatgtgacaggacttaccctgctattcactgtttcatgtgctcagctctctcttctcgtcacctatattttaatttacttggagggcagagattacacagatacagtctctcgtgttc

SEQ ID NO: 41153 - DNA, 2213 bp, Artificial sequence
  DNA replication origin
gaagcgaactcgacggccgggccagcccacccggaagccctcccccagctcacacctgctggcgcgtgacgcccggagccgcgcgcgcgcccgccagtgcctgcccggccgttcggggcgccccggcccgcgcgccggacgtcgccccgagtccctccccgcccctcgactcaaatctcggcggcgcccgctcccgcggagcgcgcgctcagcgccgccggccgcaccagccccgcgcgcgctcacgccccctccccggcccgctccccgccccacgcgcgctccctcgcgaggacacgcacacgccgcgcctccgctcaccgccccgggccgcgccgcgcgcccccgggggcgccctcgccgacccccggccgccccgctccgtcccggcggggcgcgggggaggggaaggacggcgcggccgccgcacctcactcaccgccgagccgtgccggctccgagtgcgcggcgtttcgctgtgaggcgaggcgcgcagtctccgcttctccgcagactatggaggcgacgtcgtaggggggactgaggggcgcaggggtcactccctcccgtttcgccttgcagcagcacggggaccccaaaaactaaaaacaaaataaacaaactttcccctccgcatccctcccccaaaaccacaacacaaacactcgggggcccgcccagagccccactccattggccgcagggaggatgcttccggctctcactggctggcttttgtgcccgtcaagctgtcgttccgcccctccaattcctcgttgctgccttcgcccctcattggttaagtgcttcccgtttaacgagctaggattggctgagctgcctgagccaatcatgtggggacacaccccctcagcatcccagaggccgcttcctcggtcgaggacccagagagactcaggggaaattagagcatgatggcggccgaggtcgcttggcgcaaccatcgtcttttttctttatttttagctcattagtgccttgcctcggcgctgtttccctaagctcctctctccaaccagtactgccctataacggaatccatacgtgccggctccttgatttatcccctccgaagtgctgagtgtgggctggttgtgcgtcattggactgtcaggatgtcactccccagtcaaatcttcaagctattggtggaacagcaagaaagcccgtccatcaacaagggctaataccattggtttgactccactgtgttatttcctggcaccttattgggcaaataggtgcgtcagatccggattcgctctgctacggttaattgtttactggggatttggggtcaactctggttgtttggccagtagttgacgataatagtgactcccttgcctattttgtgccaagtattgggctgctttcttcacaaacattatctggttaaacctgggagtaatgcagtatccagtttttatagatgggaaattaaggctggcgagagcttagaaaacttgcccaaggtcatccagatacagagtcgttggtgggcctggcatctggtcctgggtcaaactgcagagacttcactctttttattatgctttagtgcctccaccttagacgatgtacttgtcagccaacctagcatcttaaaaacgtttcatttggaactcaaagtcttcagtcagtttctagaagtgactttgttggggacttactatggaaaggttgtcattgcctccaccacatcttcctccccaggacccattcctctcccctttaaggtagacatttctgcctccttttatgcgaagcctaggcaccactcgcaacccctgaccaaccatctacaactcattctttggagagagtcctcaagagctggaaaactaggagaaatcaagtctaaagagagagacagaataaatcgtcttagaaatgaataatttattgcatgcaaagagaacagcccttcagctcctggaaatcttccaggatagttgatgctgagcaagacgtgtgctcctggctggtggccactgggttctttccctatagcagcattcatcgaagtgaatccaacatttcagccagaggagggcaggacgcttaggacccattgccagtgagcttttgcgaccgaaatgatctccaggagcacaacgctggactctagcccacattccatcttgggtaattaacattttaccgtcccaaatccccatcccctgtagctt

SEQ ID NO: 41154 - DNA, 1158 bp, Artificial sequence
  DNA replication origin
ggccgcgccgtccttcccctcccccgcgccccgccgggacggagcggggcggccgggggtcggcgagggcgcccccgggggcgcgcggcgcggcccggggcggtgagcggaggcgcggcgtgtgcgtgtcctcgcgagggagcgcgcgtggggcggggagcgggccggggagggggcgtgagcgcgcgcggggctggtgcggccggcggcgctgagcgcgcgctccgcgggagcgggcgccgccgagatttgagtcgaggggcggggagggactcggggcgacgtccggcgcgcgggccggggcgccccgaacggccgggcaggcactggcgggcgcgcgcgcggctccgggcgtcacgcgccagcaggtgtgagctgggggagggcttccgggtgggctggcccggccgtcgagttcgcttcccgtctccggggggcctcggcgcggggacaccttcccggcccgcggaggcgcgtccgcccctggctggcggtggcagagggaggcgtcaggcctcggatcctcgggtccctgcgcagcgtcccggcctgtgtgcaggacctgcgtgacaaggtgaatgcgttccacacccctcgccagggccctgcgtgtgcggccacttggggaggcggctcagactctggacaaggaaacgaggggcacggagagtgtttttacaccttcccgtggtccggtgcccttcagttccagactaccggtttattcggctgtagaggctggacatccgatccagcgagacacgctgtagtggttaaagacgtccagtaacggtcacctctagtcaagcgccttaaggaccagcttattctgaattctttggaattcaggttaccagcctgggactttaagttcgtgctttctcatgtgttttggctgttttattactttttagcatcagtgctagagattgaacgagaggatggtgaatttcaagttggtcatttgtattataatttaagcaaaattatacaaaattggtcaaagatatttcttcatagtgaataaaacaagccaagaatcagtgaatgaaacattagtgcccccaccaacagttaagtatatatataaagtgtgtagaaatgatagacattagcattttgtgaaagtttactaatagaggttacttctctcttcgc

SEQ ID NO: 41155 - DNA, 1395 bp, Artificial sequence
  DNA replication origin
taaaaccgctcccggctgccagcgcggtggattccggctggcgccccgaacacctgaggtggcctcggccgtctaggggcggccgcaccggaggacgcagccgacctccccgccccgccgcgtccccggcccccattccaacggcgacgcgagcaaggtcggcccggcggctctccggcccgaggcggtgcttctctcgtgggcgccttcggcccatacgaccctcggtcggacagtccgaccacagccgccccgcagcccccgcctgaggggaacttgtaggcgccggtgggtctccgctgactcccgccccgcactcacctgccccacgggccacctcagcgccaatccgggtcgggttagcagcttccccactcgcacccagtcagcgctcagcggcgcctaagcgcacgcgtggcggggcgtggcatgggcggccgcgggtcatgctgggggctgtagtcgttcccgcccactaggcggggcgcgtccaggggctttgcgcccccatcccaaggccagcatgcatagcgatgatttcttcgtctgcaccgcagcctgagaagcttgggacagtatggtgtggaccagcagtcagggtggtgggagatagacgctgcaaataacttgctaatttttttttttttttttttttgagatggagtctcgctctgtcacccaggctgaagtgcagtggcgtgatctcggctcactgcaacctccacctcccaggttcaatcagttctctgcctcagcctcccgagtagctgggattacaggcgcccgccaccacgcccagctaatttttttgtatttttagtacagtatttttagtagagacggggtttcaccatgttggccaggctggtctcgaactcctgacctcagatgatctgcccgcttcagcctcccaaagtgctgggattacaggcgtgagccaccgcgccaggccggaaaacgaaattttctgagtaccttctgtgtcagattctatgctgtgcaattcccatctcaccaaccctcacatccacctaggcttcatatcacctttctagggactcctaaccctcgtgcttccactaaagctgtgtttacaaacatcaggctctcctggttcttaaatgaaactgagcatcagccagggaaagagggcattaagtgtccaggtgtctgacttcagctgagcagacatttcatcagttgccccaagttctgcccagaacctgacatctgggtagttctgatgctggagtccgtgtgaatttaaaccaatcttaaagaaaatacaacagcctgggttaacagagtgagaccctgtctctacaaaaaacaacaaaaaatgaaccacgtgtggttgtgtgtgccatagtcccagctactcaagaggctgaggtg

SEQ ID NO: 41156 - DNA, 1240 bp, Artificial sequence
  DNA replication origin
tggaagcactgccccaaggccctcgcctcccaacgaacagaagagacatttgcccttgtggagctcacagtgcagcctggggaggtggacaacaaatataagaaataagcagatcatatggaagatccgagaggagccttaggacaaaaatggaggagagggagaggtctggggagcctggtggggaaggtccaggatgtctcctgtgagcaggggcagctgtgtgcatctgtgcggcctcgggagtacctggcgggttggagtggagttgaggaaaggggaagaaggccttcatggccagatcatgcgtggcctcctgggcaccagggcagggtggctttggctccattgtgtgggaagccatcgcacagccttgagcagaaaaggcctggtctgatgcaggacccaggcgatagtagccgtgcaagggcagaagcagggagccccaggttggggggcgactggagagctgggctttggcccagcaggcagcagtggcgggcagaggagcggctggaatcagccccatttggagagagccaggttggtgtctttatggatgaagtggggggagagggaaggaacagccaaggatgacttcaagggctgtggcctaaagggccagggtggagtggccattgatggggtgagctggggagggggcacgtgtgggaccacattgcgcggtccctgatggggtgtgtcacgagaccgaatggagggttcacagggacagttgacatcaagtggcatttgtgagagaggtctgggctggaggtaggagttggagtgttgtcacatctagattggcagttggagctgggaggctgccgagggtgtgaggtgggggagcagaggttggggctaagcccagccttgggggtcgggaggacaagtagtggcagggtgcggtgtcctggaatccagccgtgaccaagggagctgaggaccgaggcctggacacggaaggtaggcatcatgggcacaacaggaagtccatgagaggcctgggagcagggtgggggtggccgtagagagctctctgggaggttcccctgcagaggggaagaaggaggtagggcagatgctgggcaggaaatagcgcgcgtctgtgtgaggggacccagctgggagtagaagatcccagatgaccccgagatggtcctggggaggagctcactggcggcagcaggcaagaagtctgggcctgtggtgccgatgctgggtggtgagcgtggac

SEQ ID NO: 41157 - DNA, 938 bp, Artificial sequence
  DNA replication origin
gccagccgccccgtccgggagggaggtgggggggtcagccccccgcccggccagccgccctgtccgggagggaggtgggggggtcagccctccgctgggccagccgccccgtctgggaggtgaggggcgcctctgcccggccgcccctactgggaagtgaggagcccctctgcccggccagccgccccgtccgggagggaggtgggggggtcagccccccgcccggccagccgccccgtccgggagggaggtggggggggtcagccccctgcccggccggcctccccgtccgggaggtgaggggcgcctctgcccggccgcccctactgggaagtgaggagcccctctgcccggccagccgccccgtccgggagggaggttggggggtcagccccccgcccggccagccgccccgtccgggaggtgaggggcgcctctgcccggccgcccctactgggaagtgaggagcccctctgcccggccaccaccccgtctgggaggtgtgcccaacagctcattgagaatgggccaggatgacaatggcggctttgtggaatagaaaggctggaaaggtggggaaaagattgagaaatcggatggttgccgtgtctgtgtagaaagaagtagacatgggagacttttcattttgttctgcactaagaaaaattcctctgccttgggatcctgttgatctgtgaccttacccccaacccggtgctctctgaaacatgtgctgtgtccactcagggttaaatggattaagggcggtgcaagatgtgctttgttaaacagatgcttgaaggcagcatgctcgttaagagtcaccaccaatccctaatcgcaagtaatcagggacacaaacactgcggaaggctgcagggtcctctgcctaggaaaaccagagacctttgttcacttgtttatctgctgaccttccc

SEQ ID NO: 41158 - DNA, 1557 bp, Artificial sequence
  DNA replication origin
tcctcacttcccagtaggggcggctgggcagaggcgcccctcacctcccagacggggcggctggccgggtggagggctgacccccccacctccctcccggacagggcggctggccgggcggggggctgaccccccaacctccctcccggacggggcggctggccgggcataggggctcctcacttcccagtaggggcggctgggcagaggcgcccctcacctcccagacggggcggctggccgggcggggggctgacccccccacctccctcccggacggggcagctggccaggcggggggctgacccccccacctccctcccggacggggtggctggccgggctgaggggctcctcacttcccagtaggggcggccgggcagaggcgcccctcacctcccggacggggcggctggccgggcggggggctgaccccccccacctccctcccggacggggtggctgccgggcggagacgctcctcacttcccagatggggtggctgccgggtggagaggctcctcacttctcagacggggcggctgccgggcggaggggctcctcacttctcagacggggtggttgccaggcagagggtctcctcacttctcagacggggcggccgggcagagacgctcctcacctcccagacggggtctcggccgggcagaggcgctcctcacatcccagatggggcggcggggcagaggcgctccccacatctcagacgatgggcggccgggcagagacgctcctcacttcctagatgtgatggcggctgcgctcctcacttcctagatgggatggcggccgggcggagacgctcctcactttccagactgggcagccaggcagaggggctcctcacatcccagacgatgggcggccaggcagagacactcctcacttcccagacggggtggcggccgggcagaggctgcaatctcggcactttgggaggccaaggcaggcggctgctccttgccctcgggccccgcggggcccgtctgcttctccagccgctgcctcccgggcggcgctcgccggcgcggcggcaaagactgagacagctccgctgcccgctgaactccatcctccccccatattgctttcttttattggtggtttacaatctcctttatgaagatagtcctctgtagattaactgtcacgcttccaggaaacgctaggatcttttttccttcctagtgtcacagaggatacctacttgctccccttctccacttttcccatcccccttccccaatacacccacacaccctcatctacgcacagggaaaccagcagctagtaaagcttctgaacaacctgtgcctccctgctctgctctattctgcttaaaggcctccaagctgtactgtgtatcatcaagaagagtctaaagaaaccacaaaggcaggttcttcactttagatgcagaactgaactaacaaggctagaaatctgttcatttgtgcttcaccacaactgtgtgatcatcccataatgtatcaccatttactctttttaagtggttcagatgtcaccagacaatta

SEQ ID NO: 41159 - DNA, 943 bp, Artificial sequence
  DNA replication origin
gaggtgggggggtcagccctccgctgggccagccgccccgtctgggaggtgaggggcgcctctgcccggccgcccctactgggaagtgaggagcccctcagcccggccagccaccccgtccgggagggagatgggggggtcagcccccccacccggccagtcaccccgtccgggagggaggtgggggggtcagccccccgcctggccagccgccccgtccgggagggaggtgggggggtcagccctccgcccggccagccgccccgtctgggaggtgaggggcgcctctgcccggccgcccctactgggaagtgaggagcccctctgcccggccagccgccccgtccgggagggaggtgggggggtcagccccccgcccggccagccgccccgtccgggaggtgaggggcgcctctgcccggccgcccctactgggaagtgaggagcccctctgcccggccaccaccccgtctgggaggtgtgcccaacagctcattgagaacgggccaggatgacaatggcggctttgtggaatagaaaggcgggaaaggtggggaaaagattgagaaatcggatggttgccgtgtctgtgtagaaagaagtagacatgggagacttttcattttgttctgcactaagaaaaattcctctgccttgggatcctgctgatctgtgaccttacccccaaccctgtgctctctgaaacatgtgctgtgtccactcagggttaaatggattaagggcggtgcaagatgtgctttgttaaacagatgcttgaaggcagcatgctcgttaagagtcatcaccaatccctaatctcaagcaatcagggacacaaacactgcagaaggccgcagggtcctctgcctaggaaaaccagagacctttgttcacttgtttatctgctgaccttccctccactattgtcccatgaccctgccaa

SEQ ID NO: 41160 - DNA, 1018 bp, Artificial sequence
  DNA replication origin
ccgcggcggcgagagcgacggtcccatctttcccaccctcttggttgccgctggccacacgccctccgctggcggcgacttctcagctccgtgcgcccgggctggacagtgagcctcgagaggagacgcgggcggctagagccggagtggggcgagccgcggaacccggccgggagccgcgcgaggcggtgagtgagagtccgggttggggacccctcccccaccgcggcctcgccccgcctggagcatcctttttcccccccgaccctgctgcgcgcgtcctcggggggtcgggcgaggcggccctcgcgtcccctgccctcttcttgccggccttctgcccctgccctcggggccggagtcgcagagcggcggtcactgtgccggggctgggacccgggccgggccgggcgggcgggcgcggtcgtgcacctgtgcactgcctggcagggctgtgctgcgcggggcggggaggcacggaggtcctcgccctcgcttctcccgggatgtgttttgattgcagggacggggtgtcggccgctttctctggggtcttgtgcagaccttcaggatccaagtgcagtccttgggattcccaggcaaggaggctcagctggacttgttggtgccagtatagcaaacctgaatgctgccaggtgtacagggctctgcaaatctgaaacttgatggccaagaactttacctcctaagaaagcgtctgtcaggacgctgatgcagtccaccctccccgcttcgggtacctttgatactccatagtgcctagggctggaccttttgagtcgactcccaaacctgccacttgctagctgtgtaatcttgtgccttggtttcctcgtctgaaaaatgaggataatagcaccaatcgcatacggttgtttgttgtaagtgtcgaatgaaataattcacgtgaagcgtttgacacagtgcttggcccatagtaagggcccaagaaatgtttgcttttgggatgttgagaatgcctggtttgcctgtgtgc

SEQ ID NO: 41161 - DNA, 1303 bp, Artificial sequence
  DNA replication origin
ccgggtcccagccccggcacagtgaccgccgctctgcgactccggccccgagggcaggggcagaaggccggcaagaagagggcaggggacgcgagggccgcctcgcccgaccccccgaggacgcgcgcagcagggtcgggggggaaaaaggatgctccaggcggggcgaggccgcggtgggggaggggtccccaacccggactctcactcaccgcctcgcgcggctcccggccgggttccgcggctcgccccactccggctctagccgcccgcgtctcctctcgaggctcactgtccagcccgggcgcacggagctgagaagtcgccgccagcggagggcgtgtggccagcggcaaccaagagggtgggaaagatgggaccgtcgctctcgccgccgcggccaccacagacactgccgccgccggctcctctcagccacggaagctgcgggcccgcccaccacgcccgcctcccgtcctgaagactgtccgctggagaagtgacggcggcgctagccaatcagaggcctgatcggggtcgtgatcggcggactaaagggcgggcggagaaggaagcggcatgaagaaggcgaaaacggcggcctgacttcctgtgactgacggcacggcgcagccaatgggcaacggggagatgacctcatctctgaggaaagtctggaactggctgagctgcggcgagggggttggcgacgagccgggggcggagctctgggccttaaagaggccgcagccctgtggtcaccctgtgaagggaagggcggtggaccctgccggatcttgcgaagttgccaaggggtcaatgcccaggcgcgagtaattactgcattaatcccagaccccatcccgattcttgtcggggactgaagggtctccgcctggggctccgaagtcgatcatttcacattcacgcttcccaaaacgagacacaataaattccgctctggcctggagccttgaattcccgttacggtcccgccccgccgaggcccgtcgccttgtttctctgagtcagtttccccaacggtgaaagggaggacgctgacacctgcctgcccctccctatctgccgaggccgtggagatcagcagcagcgaaagcgctctgggcttagaagaggaaaagggctgcgtgagcccaagagcttgcatcggaaggctccaggaagagcatctgcaaaaaagaggattccacgggatgacccccgacaactcttggaattctaaaatcctatacccttgcccgcacccattcgtgtagtgaaggggcgcgcgttaggcgcagag

SEQ ID NO: 41162 - DNA, 1061 bp, Artificial sequence
  DNA replication origin
ttccgggtgctcagagtctagtctggagacaataagaaaaatggttaatcaccatggaatgtgctagcgccttagcccgaagcaggggtctggttattgaggtttgttgaaggaagatgcctgtaagggctgggtgcggtggctcacgcctgtaatcccagcactttgggagaccaaggtgggcggatcacctgaggtcaggtgttcgagatcagcttggtcaacatggtgaaaccctgcctcttctaaaaatgcaaaaattagccaggcgtggcagtaggtgcctgtaatcccagctactcgggaggctgagggaggagaagcacttgaacccgggaggcagaggttgcaatgagctgagattggccactgcactccagcctgggtgacaagagcaaaactccccctcaaaaaaagaaaagagggggagggcaggggagaagggggaagggggaaggaaagcaggtattgaaggagaaattgctgagctgggctcaggtctagccttggcctgggttagaggagtgggctccaagcagagtggcccccttagaggcaaagagaatggccttgtctgcctcctttcaggctttggatggggctgataggtgaggtggtgggtgcttgtcagccaagggcccctccacataaggggacaggtggggggcagctgcgagtctgtagacccaagacttgcagcagctggaggaccggtgagcagcctggtaaagcgacctggggaggcaccagcagcatctgctgcagtatggccacactagctgtttgatggaggacagggtagggagcagagagtagggagccgagggcagggagcttccagaaggtcattctgctgcattgtgaagaacagctgaggaggcggccaagagaagaaaggtccgaggggggccgggcgcagtggctcacgcctgtaatcccagcactttgggaggccgaggcgggtggatcatgaggtcaggagtttgagaccagcctggacaacatggtgaaaccccgtctctcctaaaaatataaaaattagctggggcatggtggtgcgt

SEQ ID NO: 41163 - DNA, 924 bp, Artificial sequence
  DNA replication origin
ggagggaggtgggggggtcagccccccgcccggccagccgccccgtccgggaggggggagggggggtcagccccctgcccggccagccgccccgtccgggagggaggtggggggggtcagccccccgcccggccagccgccccgtccgggagggaggtggggggatcagccccctgcctggccagccgccccgtccgggaggtgaggggcgcctctgcccggccgcccctactgggaagtgaggacccctctgcccggccagccgccccgtccgggagggaggtggggggaacagtcccccgcccggccagccgccctatccaggaggtgaggggcgcctctgcccggccgcccctactgggaagtgaggagcccctctgcctggccagccgccccgtccgggagggcggtgggggggtcagcccccctcccggccagccgccccatctgggaggtgaggggcacttctgccgggccgcccctactgggaagtgaggagcccctctgcccggccacgaccccgtctgggaggtgtgcccagcggctcattggggatgggccatgatgacaatggcggttttgtggaatagaaaggcgggaagggtggggaaaaaattgagaaatcggatggttgcggggtctgtgtggatagaagtagacatgggagacttttcattttgttctgtactaagaaaaattcttctgccttgggatcctgttgatctgtgaccttatccccaaccctgtgctctctgaaacatgtgctgtgtccactcagggttaaatggattaagggcggtgcaagatgtgctttgttaaacagatgcttgaaggcagcatgctcgttaagagtcatcaccactccctaatcttaagtacccagggacacaaacactgcggaaggccgcagggtcctctgcctag

SEQ ID NO: 41164 - DNA, 1274 bp, Artificial sequence
  DNA replication origin
ggccgggcggggggctgaccccccccacctccctcccggacggggcggctggccgggcagggggctgaccccccctcccccctcccggacggggcggctggccgggcggggggctgacccccccacctccctcccggatggggcggctggccaggcggggggctgacccccccacctccctcctgggcggggcggctggccgggcagaggggctcctcacttcccagtaggggcggccgggcagaggcgcccctcacctcccggacggggcggctggccaggcggggggctgaccccccacctccctcccggactgggcggctggccgggcggggggttgacccccccacctccctcctggacggggcgactggccgggcagaggggctcctcacttcccagtaggggcggccgggcagaggagcccctcacctcccggacggggcggctggccgggcggggggctgaccccccccacctccctcccggacggggtggctgccgggcggagacgctcctcacttcccagacggggtggttgccagacggaggggctcctcacttctcagacggggcggttgccaggcagagggtttcctcacttctcagacggagcggccgggcagagacactcctcacctcccagacagggttgcggcccagcagaggcgctcctcacatcccagacagggcggtggggcagaggtgctccccacatctcagacgatgggcggccgggcagagacgctcctcacttcctagatgggatggcggcggggaagaggcgcttctcgcttcctagatgggatggcggccgggcagagacgctcctcactttccacactgggcagccaggcagaggggctcctcatatcccagacgatgggtggccaagcagagacgctcctcacttcccagacggggtggcggccgggcagaggctgcaatctcggctctttgggaggccaaggcaggcggctgggaggtggttgtagcgagccgagatcacgccactgcactccagcctgggcaccattgagcactgagtgaacgagactccatctgcaatcccggcacctcgggaggccgaggctggcggatcactcgcggttaggagctggagaccagcccggccaacacagcgaaaccccatctccaccaaaaaaaaacgaaaaccagtcaggcgtggcggcgcgcgcctgcaatcgcaggcactcggcaggctgaggcaggagaatcaggcagggaggttgcagtgagccgagatggcagca

SEQ ID NO: 41165 - DNA, 1369 bp, Artificial sequence
  DNA replication origin
ggtgcctgggccccagccctcccacggggactgcaccttgggcctggctcggaagcgggtcagagtctgcgaaagaccagcgaggactcttgggtttcggggcaggccgcgggcgcccacccacgccagcaccgggagccgcgcggcgactcggcgagcccggcaggcaggacaggactgcggcgcaggtctggctcaggcggaggaagcagccgccgccccagctgacggagtgcggccgggggcttcccagaggaggcggcgacgtcgagccctttcgaacgtttccacccggctagctcacgtagcctcggccccgcccggccccgcccggccccgccccacccactccggccaccgccccctccccggcctacagttcgcgggtggggcgacctgcgacagcccctttaagaggcgtggtcacgtgctccgcccccacctccgcctcgcgcgccagtaaggggtggggtgcgggaggaggtgccggggaggtggggggagcgaagtgtgcgctgctgcgcaggcgcggtggtcggacgacagaccgtgtgtttccaaaatggcggcagcgatggatgtggataccccgagcggcaccaacagcggcgcgggcaagaagcgctttgaagtgaaaaaggttgggtctcgccagcgccttcctcagggaagctagagaggcgcggatctggctggcaggcccgaggatggtcgaggcgcggagtaaagggtttcatttcagggcgttcctgggaccgggtaccacgaaaggaagccggggggcgggtcttagagttgatcggcgtgacggcggcccactgttgggggaagtgttggtttcgctgtgaggctaaggggccaatcacagagctgcttattgagatacgcggggttgcgacttggcggcgggagccaagcgcttgagctgtcactggagtggttgagaggtgggggaaggacagggtagggtggggtggggtgggtggaatggggagtcgaagcgaatgcggcggtggaggatggggcagtgcggcgagagcctggaacctgaggtcctaccgcattagaggcctctgaggaccccccttggtgatcttgctccgcccctttttgaagcttggggtcctctcacttggaggggtcctctcacttggagggatcctcgctgaaccgaggcctcacactgcctggttagagtctggagtgtaatgcttggctcttctgagacgtctgttggcttttcacacaaccaccccactcttgggttctctgtcacgtccagaatctcccccttccaaaataataataaaaagcatggtggaacttgttaagaaaatccgagcccaaatcctgtggcagttagggaggg

SEQ ID NO: 41166 - DNA, 1057 bp, Artificial sequence
  DNA replication origin
ttgtcgtcctctgcggaagcggcccgggcgcgggagccgcgggcgtagccagctccggagccccgcgcctccgccgccccgcgcgcccttcctttgtgtctcccaagcaggggtgaacgcagaccacttggatttgatttttccgtgcgagttcccttttttccaagttcggggcccctccttcccccagcggcgcgcgcccccggggtgtccgccccctccccctccggcccagccctgggcggggcagacgcccttggagtcgggagaaaagactatctgatttcaaaaccgacgcgacccgagctgggctgcggaaatggcgcccatgtcccggctccggccaggtcgtgatcaggagacaggtgtggccctgggacccgtttggagagcagaggggacataagtgggtgctgggggcgggggagcttgtggccctgcggcccccgcccagcccccgccgagcccccgccgcagcatttcggagctgggcgcggcaaaggagggccgggacgcaggcagagcgggggttgagcggggcctgcggcagggaaaccgggagaagcaggaggccgggcggggcggggcaggacggttgagtccttcattgcttctatcacagactgaggagcctctccccaccgcaatccctttatactgggtaggggttcgaaggcacagggacagagtatacaggacactgcttgaggcagcgcgtccacccaccatctgtgcgacctcatcaagtcacctctctgagcctcagtttcccggtataatggaaacggcaattttaaatgacacgtaagtgcctggcactcattgagctcatcaaatgaagagccccgtctctgggcccccttgcccctgagggaaatgcacacacaaacctagaaaatgtgctgtaatgcacaatgtgggacagacccagtcactctcctttcattcttcttccatcgaatattctgaggcttcggcgccagccctttgccggcggatgctgccgagatgaagacagcatgctcggcctggtgaagccaataaaagagcaggctcc

SEQ ID NO: 41167 - DNA, 1144 bp, Artificial sequence
  DNA replication origin
tccggaggggggcggggcctaggcccgagccgctcacacaatgggggaagtggagccgggggcggggcctgtcccaatcacgggatccgccctaggccccaacgcggttagcgcttccgcaaactcccccggcgtcaccctgtggctccctttaaaggggaggattttaagagtggggaggattttaaggggggaggggcgggggcggactcagaatctattttcagtcggtggatagttacgagggaaggttcctgcctttggtctctgcgtaagggaccagtgggaaccgggacgacggaaccccggagctgctccgaggaaggcgccaagtcgccactcaggtggccaaatgggagcgcccgtagggcggccctgctcttcggcccttgggtggcgggtcccccaaaaccccggtcgaattcaccaggcagggtgtacccactgccggctgttccgggccagatacccagtgcgtcctcacttctccattgccctcccaaagggagcagttcacatccaaaaagcacgttgattacgagttgttttcattttctctgaattttccttttcctttttatgtattatttatttatttattttacaacgagcattattactctgaccagaaaacaaaatcacagcagtggaaagatgtttcggcaccagacccaaattcatttcttgccctccacgtgtgtccatacgcccttaccaggtagcactctcaccgcagaagccttcaagtattttcctaaacatggctgggacctgaagacatttctagggtttgtcttttttttttttctcgtccgctcccaatagaacaagttagtaaaagaccacgtctagccattgccttatctaatgtaattatgggaaaaacaaaaatgtggtaaaggtaatgtaaggatggaaaaaagcaaaaatgtaatggtgagaggaaatgctggaatataaagtctagtgtgtgggactccacagttttgcagctgaggtcggagacgtgctttcaggttcctacacatcaccctgtgtttggccatgggtaaattggtactggaggaggtggcaggggtgtaagtgaccccgaaagaaaccccgaaaccagtatctactgatacggttaaaagctttttctcgg

SEQ ID NO: 41168 - DNA, 813 bp, Artificial sequence
  DNA replication origin
ccaccctccgaaccctcctcctgccgccgcgctccgcgccgccgccgccgcaccggcccctaatggccgcagagaactcgcccgagccgagagccaggctggcgccgccgcctcacatcgcgcggcggccggcggaggcgcggcaaggacgccgggagcggagctggccggaccagagggccgagggggccgggccgagcagcgccgcccgcacgcccgcgccgacgcggagcccaccgaggaggccccgctccggcggcggcgcaggcggcccctcctcgcgccgcgctcccctccttcgccttcctttcccgcggaaaataaataaatacggccgctgctacggcccccaccgccggcggccaggtgctgggagcgcccgccccccggggctccgttcggggccgcccgcggcggcgggagaagacgccgcggggcgcggggttatgtaatggtcccccctaggcgtcgacgccggcccggctgctggaccgcggtgggggtgtgtgcggacgggagggggctgggggtcgcctcagcccgtgcgccccgggccccctgccactgtctcggcccctgccgcctctctccgacccgactcccctccgcactctctggctcccgcagttagcactcagcccggcgtcctgcttgcccactctcgcccgctctctctcgccctctctcccccccagcctagcacacaaacaagatggcggctgttgtttcttccctctgccgaatcctccttacaggctagcggtagcggcggcggccggaaatgagccaagggggggtggaaaaggggagtgg

SEQ ID NO: 41169 - DNA, 1412 bp, Artificial sequence
  DNA replication origin
cgcctaggggggaccattacataaccccgcgccccgcggcgtcttctcccgccgccgcgggcggccccgaacggagccccggggggcgggcgctcccagcacctggccgccggcggtgggggccgtagcagcggccgtatttatttattttccgcgggaaaggaaggcgaaggaggggagcgcggcgcgaggaggggccgcctgcgccgccgccggagcggggcctcctcggtgggctccgcgtcggcgcgggcgtgcgggcggcgctgctcggcccggccccctcggccctctggtccggccagctccgctcccggcgtccttgccgcgcctccgccggccgccgcgcgatgtgaggcggcggcgccagcctggctctcggctcgggcgagttctctgcggccattaggggccggtgcggcggcggcggcgcggagcgcggcggcaggaggagggttcggagggtgggggcgcaggcccgggagggggcaccgggaggaggtgagtgtctcttgtcgcctcctcctctccccccttttcgcccccgcctccttgtggcgatgagaaggaggaggacagcgccgaggaggaagaggttgatggcggcggcggagctccgagagacctcggctgggcaggggccggccgtggcgggccggggactgcgcctctagagccgcgagttctcgggaattcgccgcagcggacgcgctcggcgaatttgtgctcttgtgccctcctccgggcttgggcccaggcccggcccctcgcacttgcccttaccttttctatcgagtccgcatccctctccagccactgcgacccggcgaagagaaaaaggaacttcccccaccccctcgggtgccgtcggagccccccagcccacccctgggtgcggcgcggggaccccgggccgaagaagagatttcctgaggattctggttttcctcgcttgtatctccgaaagaattaaaaatggccgagaatgtggtggaaccggggccgccttcagccaagcggcctaaactctcatctccggccctctcggcgtccgccagcgatggcacaggttagtttcggcagccccggccttccacgttccctttaatcttttctactcggtgcgcctttattcttccattttttttttcttcctctctctctagttccctgccccttaattaattttaaaggtatttgaatgagctggtcgaagacgtccagtagcccaaccattttctttgcctcctaatacattgattgcaacactatgtcatatcggtgtgtgttctggaattagagctcgtaagtgggtgctatatagaaatggcctgtattgttgctctcatgcaatttaatttgggaaatgccaatgcatttgtgtgtaagagctcctatgcaatttaagtttc

SEQ ID NO: 41170 - DNA, 1996 bp, Artificial sequence
  DNA replication origin
ggctgcaggggaatccgctgtggtgcggctgccaggcgcggcccctactcgagtggctggcgcgggcgcgcgtgcgctcggacggcgcgtgccaggggccgcggcgcctgcggggcgaggctctggacgccctgcggccctgggacctgcgctgccctggggacgcggcgcaggaagaggaagagctggaagagcgggctgtggccgggccccgcgcccctccgcgcggccctccgcgcggccccggggaggagcgggcagtcgcgccttgccctcgcgcctgcgtgtgcgtccccgagtcccggcacagcagctgcgagggctgcggcctgcaggcggtgccccgcggcttccccagcgacacccagctcctggacctgaggcggaaccacttcccctcggtgccccgagcggccttccccggcctgggccacctggtgtcgctgcacctgcagcactgcggcatcgcggagctggaagcgggcgccctggccgggctgggccgcctgatctacctgtacctctccgacaaccagctcgcaggcctcagcgctgctgcccttgaaggggctccccgcctcggctacctgtacctagaacgcaaccgtttcctgcaggtgccaggggctgccctgcgcgccctgcccagcctcttctccctgcacctgcaggacaacgctgtggaccgcctggcacctggggacctggggagaacacgggccttgcgctgggtctacctgagtggaaaccgcatcaccgaagtgtcccttggggcgctgggcccagctcgggagctggagaagctgcacctggacaggaatcagctgcgagaggtgcccactggggccttggaggggctgcctgccctcctggagctgcagctctcgggcaacccactcagggccttgcgtgacggagccttccagcctgtgggcaggtcgctgcagcacctcttcctgaacagcagtggcctggagcaggtgggcactgggcatctggcggggttggtgcaggaggcggcacaaggccacaggcagcgtgcattcactcaacaagcatttgccagccccttggtgccaggtctcagcctgggcacggggaccctgagataaaccaggactgcccctaccggtgtgagtgacagtccgggcagaacccaggccacacacggtgcctgcacaggacggtattgctggagcatagaggagggaggaatttgggaccatgcagtcatctactgtttgtacatattgagagcccccaagaggttttgccattattgggtggtggggtggaccatgaactgggcatctgggtgacttggacggagcaagtgttttgacatcagaccagcctgggttttgacccagcgctgcacttcctggctggaccagcttgggctctccagcttctcttctgctgagggaagatggggctcccttccagacttgggggtgggacagctctgccaggagctcacattggggcctggcaactccttgcagatttgtcctggggccttttcaggcctggggcccgggctccagagcctgcacctgcagaagaaccagcttcgggccctgcctgccctgcccagtctcagccagctggagctcatcgacctcagcagcaatcccttccactgtgactgccagctgcttccgctgcacaggtgggcacccccacctagacctccagccaaagaccacccagccactctcagtcaagcccctgtcatctccccaggcacaccatgtccatgcccatccgagcagcttgtggggaggggcgggtcctgtgagagccaggcatgtataagccctttccagggttagttacccttcctggggatgttgagggtggacttctctgagccttgatttcatcatccataaagtgggcatggtatctgctctgcctagcgggctgggacctaataggtaggcgagaccactttacataattacatgagaaagtcacaagaggtcggggatgg

SEQ ID NO: 41171 - DNA, 990 bp, Artificial sequence
  DNA replication origin
ctaatcataggacctccactgcgtggggggtggggggcagggaggctcagggtgattggcactttcctgggcccaaaggaggaggctctgaggggtttttggggcaggagctgcaccatggctgggactaagtgagggacagcatgtggcctcggcccttgtgcacaacagactctccctccccgtcccaggccccggagctccacccatgtccccttggtgctgccgcttcttgtacttctgctgctggccccggctaggcaggccgccgcccagcgctgcccacaggcctgcatctgtgacaactccaggcgacacgttgcctgccggtaccagaacctcactgaggtgccagacgccatccctgaggtcagcagggcaggagcacaggcacagagtggcagtggggcaaggtggggacccagagggaggagcctgggctgggcaccagttgatctgccaccgcctgcccgggagaccttggcaaattacttctctttgagcctcagtttacacttctgtaaaatgggaataataaaaaccagtaacagggagatgatctatttaaaatccttactgtgtgaatggaataagtaggtgacccatagatcgatactgaattcactgcagaccctgtggtggagaggcgggctgtggcagggtgaggtgtggtctctgctctgcagagtcatcagctagtggaggagagagagcgaggaggcagggacagcacagtgtgaaaaatgccacagtgggtgatgcccagggcactggagaggaaggcttcctggaggaggtgtcaggggtcggatgaagagaaatatgggaaaggtgacaggagaaaagagtgttccggggaagaagcagcacttgcaaaggcggggtccctgcctggctcagccccactttctcctcgctgtccccagctgacccagcggctggacctgcagggcaatttgctgaaggtgatccccgcagccgccttccagg

SEQ ID NO: 41172 - DNA, 1109 bp, Artificial sequence
  DNA replication origin
cctctgggagggcagcccacatggcaggagggagcccaggactgctgactcccgggccagctgctggtgccccctccctgtcgggctggcccaaggattcaggccggggcctcagtcctcggctggggcaggcaggaggccctgtaactccagccgctgctcccgcccgccgcccgccccttcttcacctcagcctggggaagcctggcttgcctggtctgccgacaatgcctcccattcagccctgtcccagctgccaggcctgcgggccgtggaggggggctcctgccaggcggggacagcctgtccctgcgctgcgcctccaggctggaccagcagttccaggcggcatggaggggtgagtctttgggcccgatggtgcaaggggggattcagagcagctcagtggcctcaggtaagtctctgccccctctgggcctctcagaggctggcgggcaggggctctggggacttcctggggttctccaggaagggggtctcccaaggtgggctctgagacacgtggcaatgtggccactgccaggaactggtcctctggggcttgtctgagagcccagcagtggtccctgcattatgaatgcttgtcgcttcagcgatctgtccccatgggtcccctccctggcctgccctgaggcacagccttcaccacaggctctggagaagccaccaactccaacgcaggggctggagcctgggacccaaaggagactccaaaacagacgatagtccagtgagcagcgagggggaggctcctgggggccggggaacagcccagcgatgggggagaggccatgcctgacacaggctgagaacagaggggccagctgggcaggggaggtgatctatcatcctagcgctttgggaggccaaggtgggacaatcacttgaggccaggagttcaagaccagcccgggcaacatagcgagaccctgtctctaccagaagtaattaaaaaattagccaggcgtggtggtgtgtgcctgtagtcccagctactcaagaggctgaggtgagaggatcactttagcccaggaggtgaaggctgcagtaagccatagtcattccactgcactccagactccagcctg

SEQ ID NO: 41173 - DNA, 1214 bp, Artificial sequence
  DNA replication origin
aatcttttccccacctttcccccctttctattccacaaagccgccattgtcatcctggcctgttctcaatgagctgctgggcacacctcccagacggggtggtggccgggcagaggggctcctcacttcccagtaggggcggccgggcagaggcgcccctcacctcccggacggggaggctggccgggcggggggctgacccccccacctccctcccggatagggcggctggccgggcgggggactgacccccccacctccctcctggacgggttggctggccgggctgggggctgatcccccacctccctcccagatggggcggctggccgggcggggggctgatcccccacctccctcccggatggggcggctggccgggcggggggctcacccccccacctccctcccggacgaggtggctgccgggcggagacgctcctcacttcccagacggggtggctgctgggcggaggggctcctcacttctcagacggggcggctgccgggcggaggggctcctcacttctcagatggggcggccgggcagagacgctcctcacatcccggacggggtggcagggcagaggtgctccccacatctcagacgatgggcggccgggcagagatgctcctcacttcccagatgggatggcggccgggaagaggcgctcctcacttcctagatgggatggcggctgggcagagacgctcctcactttccagactgggcagccaggcagaggggctcctcacatcccagacgatgggcggccaggcagagaggctcctcacttcccagacggggtggcggccgggcagaggctgcaatctcggcactttgggaggccaaggcaggctgctgggaggtggaggttgtagcgagccgagatcacgccactgcactccagccttggcaccattgagcactgagtgaacgagactccgtctgcaatcccggcacctcgggaggccgaggctggtgcatcactcgcggttaggagctggagaccagcccggccaacacagcgaaaccccgtctccaccaaaaaaatacgaaaaccagtcaggcgtggcggcgcacgccttcaatcgcaggcactcggcaggctgaggcaggagaatcaggcagggaggttgcagtgagccgagatggcagcagtaccgtccagcttcggctcggcatcagagggagaccttggaaagagagggag

SEQ ID NO: 41174 - DNA, 1348 bp, Artificial sequence
  DNA replication origin
gatgtgaggagcgtctctgcccggccgccccatctgagaagtgaggagcccctccgcccggcagccgccccgtctgagaagtgaggagcccctccgcccagcagccaccccgtctgggaagtgaggagcgtctccgcccggcagccacctcgtccgggagggaggtgggggggtgagccccccgcccggccagccgccccatccgggagggaggtgggggatcagccccccgcccggccagccgccccatctgggagggaggtgggggatcagcccccagcccggccagccaacccgtccaggagggaggtgggggggtcagtcccccgcccggccagccgccctatccgggagggaggtgggggggtcagccccccgcccggccagcctccccgtccgggaggtgaggggcgcctctgcccggccgcccctactgggaagtgaggagcccctctgcccggccaccaccccgtctgggaggtgtgcccagcagctcattgagaacaggccaggatgacaatggcggctttgtggaatagaaaggggggaaaggtggggaaaagattgagaaatcggatggttgccgtgtctgtgtagaaagaggtagacatgggagacttttcattttgttctgtactaagaaaaattcttctgccttgggatcctgttgatctgtgaccttacccccaaccctgtgctctctgaaacatgtgctgtatccactcagggctgaatggattaagggcagtgcaagatgtgctttgttaaacagatgcttgaaggcagcatgctccttaagagtcatcaccactccctaatctcaagtacccagggacacaaacactgcggaaggccgcagggtcctctgcctaggaaaaccagagacctttgttcacttgtttatctgctgaccttccctccactattgtcctgtgaccctgccaaatccccctctgcgagaaacacccaagaatgatcaattaaaaaaaaaaaaaaaagaaagaaaaatctacttctggagaaacaaattaccttcccatctcttttgtcaggaaactcttggatgatgtactgaccaaaacagggaataacctaacagagaggaagacagggattttaggaaaccggagatcacacaggaaggaggtaaagggaaatcccaggatgatggcaaagggaagtccccaaacaacagctgtgcaacaagaataaagaacaatcagaggacctcttgagcccagaggtcaaggctgcggtgagccaaggtcgtgccactacactgaagcctgggcaacagagtgagaccctgtctcaaaacagaaaaggacctatcagccccaagtggagc

SEQ ID NO: 41175 - DNA, 1578 bp, Artificial sequence
  DNA replication origin
gcagcccccaggaggtgtcttgaaattttcgtggggcctctctcttcggcgtccggagcttctggggtgtccagatgctttgccgaccccgcgcagggggtctcgggggctggcaggggcgtcgctggcagggccccccttccttttgtgttgtccttggccccgcagcacccggagttggaggggccgcggcgagggccggggagcggggccgcccgacgggccgcccctttcggctgcggcggccacgcgagcccggggatccggggcctgcagccgggcccgcgggaagggggcggcaggaaaggggggcgcggtctgggcctgctgggcaggggggcgtttccggtcgcaggatcagtctctggacttcgaggcctgtgggaggcccgcggccgtccagggagtgctagggggctgcggaccccggctctggcgcctggggacgggggcgccctgacggggctgggggcctgggagccgccgactccggcctcatacccccatcctgcccgctgcgaacctcagggcccccctccgggtttgctccctcctcctttcccctcctttctcctcaactctgtctgttttaggcgtttataaggcgcctggttggggggactttcacagacaaagccgtcttcccaggggggaaaataatcatataaaaacagctcactctgatagaacctgatggctgtattgccaacagggcattgacggggaagactagggggctagggccctgcgtggggagtctgggggctctaaaagggggctgggcctgagtggggagctggtgatcagcggttttatttctcgggttgctagctttggcatcagactttgaaccccaacttcttgccatattcctcagcatctgcagttcagcctgatgaaaatagcagaatgcagatccttgaattttcacacaaatgagataattatagtacatgtagcaactgtgttggacacaaaatgctggcagaatctttagttctactaccaatacttcctctacacacatacagccatcccctccgtggtggtcttctttccccgtgtccacctcccacagaagttggactgcaaggtggaaatgacacctggtcaacagttggatggagcatgtttgagaagtggggagacttaaggtgggaagaaagaacctgtccaggagggatgagatctgaggatgggagagagactttgttgtccctgagctgggataaagtttctgttctgtagatgctgtgtgttcttagctgctggcttttgtataggttagacaggaatgggggttttggtagattattgtggggcttagaagcttggtgggatgtgctgatctctcgagtcttagtaggaaagctgagatgtcggttgagacatggatagagaatctgaaaataatccctcaatctgaaaataataatccctcaaatatcactttttagtttataacaaaagggctttcacatgtgttggctcatctgtcctccatagcaactgtgtcaggtagacattttctagataagaaaccttaggccgaattgtgtgtcttgctggaaagtcaga

SEQ ID NO: 41176 - DNA, 812 bp, Artificial sequence
  DNA replication origin
cctcggcgcggtcccttccctcctaccagtgttcccccttcaccgccctcttcataacccccgccctccccaaccaccgcagcctctccctcttgtccccgacttgcaaccttcccgacgcgccaccgaagaggggcggagctcggagcggccaggccggccaaagcgacctatccgagctcctgctcgcgcggcgtgtccaccccccgcgggtcacgtggagccgcagccgagtctggtcgcggggggagggggcagaggaggaaggcgcgggaacagccaatggagggcgggggcggggcccggggcggtgcacgaggcgccgcacgtgcggggctgtggcggggcgggaggggaagggagggacgggtctttttgttctggggactctgcccagggtcgcggggcagggacgctgagcttagcccgcacttctgctcccacgcgacccagaggtcgcctgagggcagggccggggaccgcgacctgccaagtcgtagggatggcctgagcaggcttggccgccctagagcggggtgtcgggttgcccacgcatccagatcaacactagcgtggagggagcattcctgaagctctgacctgagccagggcccgagtacatgtttccgccctcccacttactagcttatgaccttgggaaagtccggttgcttcactggagcttgtttcctcggccataaaattaagaggttgggctagagaatctccacagtcccaaacagatgtgaaattcttttcctttctagaactctcccttcttttacctagaaaacaaaaacctccttgacacc

SEQ ID NO: 41177 - DNA, 1635 bp, Artificial sequence
  DNA replication origin
atcccggctgcccgaccaatcacggcccgaggatctgcgcctgcccctctcgcaggctggaccaatccagagcaacgatccggggaagctggcctggcctcatgaataattaatgtgccagagccggtccgcaggcggggtagcgatggaaggaggcgggggcgccattgggcgcctgcgcagtagctgcccgtgtcggcagctgcagcgggtcgcacggctccggcccatctcggggggcgggcgggggaggcgaggtgcgcgagccgagtccggggcacgatgtccgacgcgggcggcggaaagaagccgcctgtggacccgcaggcaggacccggtccggggccggggcgcgcagctggggaaaggggcctgtcggggtccttccccctggtcctgaagaagctgatggagaaccccccgcgcgaggcgcgcctcggtgagggcgggggggtggtccgcgcgggctgggggcggggcttatacaggggcggggcctcgtgagggcggggccggggaggcagtgggtcagggagcagtggtccagcggagggggatggggcctggatgaccaggagcctggaggacgaggccggggggctgaggacagagggtcaggggcgggctgagacggtgggtctggcgggagagggtggggagaggttttgaggaggcggaaggggatcgggagcagtcacttaaatgacgctccagggcccctcccccggggccacctgcatcggagtcactcgggatgcctgtttaaattgctggttcctgcgccccacccaatctgcggtcactgggacaggggtcttgcattttaaggagcaccccaccgcacccccattattttccaagtacaccaaagtttaggaagcgcaggcctagggtagcgaactgtcatcgtacgtggccttacccctcccggagggacctggcttcctccctgggtgtgagtagcgccagctactaggtccaacgggagcctttctgttgcggggcttctgctgagcgggtggggggggtgtgggcgagtagtgtgaggcgccttgggaggggagttttgggccaagcagagaaacgatgagggtcagatgagtccactgaggcccttcgcctggttggttggggctgacccttagattctggggccacggcggcaggactgagcttcatctttttgcctaggccaggaacgtcactggggcgtatacggaaagcaggtctggccttgtttttcgccctgggagatggggtgcagggagcagcaggagggccgcctgtggtggggttgtgggtgcactgaggtatactttgagtgtgagacctttgcatttccaagagccatcagttattcagggtttgggaaagggataggccttcgagagttgtctggcctggggaatggattttcctttttaaaatgccatttctcttcctttcctgggtgtatgctgaggctcccatccctgtggctgtcactgttgagttataaatagcttcagcacatcaggtgaggccagcctctctcctcctgctttgggacctcatgtgcacaaacccttttgtttgtttttgagacggtgctttgttccaaatctggggctgagacaagctgcagggacaggtgta

SEQ ID NO: 41178 - DNA, 1113 bp, Artificial sequence
  DNA replication origin
ccgacctcacgcggcgaggctgagtgttatttttattgtttttatttttgcgatggagtttcgcttttgttgcccaggctggagggaagtggcgcgatctcggctcactgcaacctctccctcccgagttcaagcgattctcttgcctcagcctgccgagtagctgggaattacaggcatgcgccaccacgcccggctaattttgtatttttagtagaaacggggtttctccatattggtcaggctggtctcgaactcctcacctcaggtgatctgcccacctcggcctcccaaagtgctgggattacaggcgtgagccaccgtgcctggccgaggctgggtgttatttatgtccccgtctgtgtctccgcagacagagctcggcctagaggaggccgcggcccagcggcacacagccggcgcgcaagtgcgaggccaaggcaggaagccgccggcccagccgcctgcttcccaggaccgaggaggcccctggtcgaggctggctcacctcacccttgggaaagcaacagaggacaggaggcagctgccacctaaggtcatggccacccacatcccaccacaccgcgtttgctctccctgtttccccaggttaggacatcatcgggcgcttccatgtcgccccgggaggctcccctaaagcaagggcatggccacggggaggctgctgagcaaagctaattccggagttccacaccaggcctcttgagagtggggcctgggcctctgcatttgaaatgtgctctaccttcaaggctttgagatgatttgagaacagggagggttttagggaagagagctagctgacagcaggcgatggcaggtgcaggtggggactgcggcagactggatttgatggggcaggctggaaagacagggcagacgaggatggactgggagccttggtcagagaatggccggatcatgaccttggagcaccatgcccacccgtacaggtatcccttactgcctgctaagggatacattggaccctgtcctccagcaaccctgcaaaatgggccttattgtccctattttaaaggctcagagagtgaggccgggcgcagtggctcacacctgtaatcccagcactct

SEQ ID NO: 41179 - DNA, 1347 bp, Artificial sequence
  DNA replication origin
agggttgctaagggtgaaacttttcattgactttgctcacttcgggccggggcgcgggaaggtgcgggttgttggctgaggcaagccgtggctcgggcgacgcggggccaggagggcaggaccgtctgccggcgacagcccataccgtctgccgttgcgcgacacgaaccaccctccgatccgccatccccgcgtcgtcgccgctagtccgcccgcccgccctcgggccccccgctgccgagcccgacctcctaagagctgaaagaaattattgagagtcatagtccatagccccctgcttcgtcccccaaccctcaacgacgaaaaggacttcggtcccctggcccggcgacgcccgggaaggaaaggagagcgacctccgccccgcgctcaggccaccctggagggagaagccgccccgcggccggtagagcgccccgccgccgcggagacccgagtgagtgagttggggggcgtgcgggcggggggcccgccccgagacccagccggccggactacctcttccaccccgccccactcccgctttgctggactctccacgttgctgccgctccctccccgcctggccagcattttctttccccatccagcttccctccagaccccactttccccagctcctcttctcacgccatctgtgctcctggggtgcccaagagctcctttttctcccagttccaagagtggccctctcctgggtggggtgcatttcctcccttccccgcctcccccggttctttatatcctagctactcgctagatcttccttgttctccaaagaaacataactccccccaccgttaaataaatccgaggaaggaaggggatccaggccttgtttttctgcttcttttcccgtgtgcagggaaggggggtggtaattgttaatagactctatttctggctctgtggagcctgaagggtggagggtggacaccccctttggcgacgggacaggtcagtggagattgtccttgggccactgagccagagttcaccgtttcggctgagctctttatactcttaagtgttttaatggaaaattgggcagaaaaaagtacccttagagcagtgccagtgagtggattctgcttatcttggtaaggtgcctgcgaggtggggccctacccccaaactccttcccctcctgtccggaggatgaactgtgcccttgaccaccagaaatctgggaggggaaggagggtgcagagaggaggcacagccggcaggccctctccctcccccaggagaaaccagaaccccgcacagcaagcttcagcttggggacgggtggaggccagtctctggtgctactccgtatctaaa

SEQ ID NO: 41180 - DNA, 1041 bp, Artificial sequence
  DNA replication origin
tttcggatctcgccacccaacgtggggatggcggctgctgctgggccggaaccgtctggaatgacaaaaaaggtgtgggcgggaggggagaactgggaaatgggagatctaaggagggaccggggagaagacctcactcacagtcccccgggggctccagactgcatcttccggcactcctgtctgcctgtgaccgcagaacacggccctccctccccctggctctgtgtcccgcacactcacagaggcagagcagcccgcgtggccagagccgggggagggggcctcagcgcgcgggcctggcgcgcccagtcccgggttcgcggagcctcgctccgccgcccgaggggccgtagtgggtgcgagccttgcgcccgttgcacggtcaggggccaccccacgccggcgggactgcgactagaagaaatgtggggctctcccgcgtgccccacactggggtcgctggccagaaagagcaaacaagagttgggagaggggctgcgcccgcgcgcctgcgcagagccagagccggccctccaggctgcaaggaaaggagcgccagaggcggtgaggggaaggtcctttgtggcactcggctagtttcacggccgtcagcctcgtcctcggctcctcttactcccgcacagcgtggcccaggccccagagtctccctcgcctttctttcgacgttgagccccccgaggaatcacaaggcgctcggaagactcatgcctgcccgaaacgggtccgaaatgtttccagagcccgcgtcgtcccctcagttccccctcccgcagaggccgtaacggggcgatgctatcgccgcggacacggccagacgctcggagctggagggaaggccccgggaaacggctcgggcaaacgtccgaaccatgggctccgaggcaggtgcagggcggacgactcagcggggggtttccggcgggcatggtgactccctcccctcccccgcgatactcgtcccccaaacacaactaaagggagagtgcactgtgcccggctcgtgagcaacccggcccc

SEQ ID NO: 41181 - DNA, 1171 bp, Artificial sequence
  DNA replication origin
aagacgtctaccctctaactgcttatatgtactccagctgttcctcctaagatgccgtaggacaactcgcttcagctcaccttcacctttaccattgtcagaagtttcacattggagagtggacaccatactcagcccaggatatgcaggatgtgcagaggcaatttggcccaaacactaatctttaaattaagaatagcaacgatttgagccaggctttacatacagcatcatatttaatccccgacacgagctccattttatagatggggaaactgaggtttggtgatgtcaagcgttttgctgcattaaatcaagatcacacagtcggtagccgaactgggatgtaaacccacctatttacatggctgccttaatcaatgactacaaataccagcatcccttgccgtgcccgctggcgcaaacgcacactcccaagggcccagtcttagcggctggatcctaaacccaatcagacaccgcttctccctttcccccgaccaatgggaaggctgttgctaacacaccggctatatttttagctttcagtgctctgggagcgtgtgggtcggctgagcctctctgcctggtgggaagagctaggggaaaagagagaagggaaggggagggggaaagggagggtgcagcgggcatgtgcgggagggggcgtgtgtgtgacgctgtcactcgctgacgcacaaggcaagtagtccctggaggtgcccccggggttgcgacgctcagagtgtgggggatgggggggcgctcaggctatctcccgcctccctgtcccggtggagtttgccctccagcccggcatttctctgttgcattcagggaaagtgcatttaaaccccccacgctactggtgctctccgcccttgccaaaaaaagcgatcaaggaaaaaaaaaaagcaaactgttcgtagctggaaactttcggatctcgccacccaacgtggggatggcggctgctgctgggccggaaccgtctggaatgacaaaaaaggtgtgggcgggaggggagaactgggaaatgggagatctaaggagggaccggggagaagacctcactcacagtcccccgggggctccagactgcatcttccggcactcctgtctgcctgtgaccgcagaacacggccctccctccccctggctctgtgtcccg

SEQ ID NO: 41182 - DNA, 939 bp, Artificial sequence
  DNA replication origin
ctaataaaaacacaaaataagccgggtgtggtggcacatgcctgtaatcccagccactcgggaggctgaggcaggagaatcacttgaacccaggaggtggaggttgcagtgaaccgagatcacgccattacactccagcctgggcaacaagagtgaaactctgtctcaagaaaaagaaagaaaaagcttaatgtctagcactgcctagcattgttctagacactgggggtgcagtagtgaacaagaatagtggggcttaaattgttgtcctggggaaattacgtagaaaaataagaatattgtattactgagtgttgtggggaagataaggtagagagaataggggtgggaacatggcatttttaactggggtgtttggggaagacctcgtagaagaggtgacatctgaactgggacttaaatgatacgaacgcagctgtttaccatttttggaggagacttcaaatagaaggagcatgtgcagagcacccacctaggtatgagctgagtgtgttgaggataagagctaaggccagtgttgctacagtgtcctgaggagcgaaaggtctgaacaagaggctggggctagggtcaggcaggcttcggtaaggaaatccaagtgtagtgaaaactgggagattttaagccagggagtgatgtgatctgatcatctgggctgctgcgtgcatgatggaccatagagggtcaaaaggaggaggcagggagaccagtgggggactgttggagtcatcccaggaatggcagaggagtctgggactagggatctggggggtggagataatgagatgtattcaaaattgggatatatttggaggcagatgggttggcgcatgggagggatagagaataagggtgactcctgggtttggggtcttagtaactgagggatgggtgagcttgattgaattcagtggtcgt

SEQ ID NO: 41183 - DNA, 1186 bp, Artificial sequence
  DNA replication origin
ggtgacagagcgagactccatctcaaaaagaaaaaaaaaaagttggacatggtgacaagtgcctatagttccatctactggagaggttgagacaggaggattccttgagcccaggaattcactgcactctgctgggcaacagagcaagacctgtcgaaaaaagaaaaaaaagcctaacaaacaaaaatagcttaataaataaataatgtcatgttggaagactaggaatgctagcctaggcaatgccagggaaaattaaacagggaagtgtggggatggtggtgagtggttaaaccagggggtcaaggctgggcttggtagctcacacctgtaatcctggcactttgggaggctgaggcaagaggatcgcttgagctcaggagtttaagaccagcctgggcaacataatgagactttgtctctacaaaataaataaacaaaaataaaacagggggccagggcaagcctcaccaaggtgacgttacagcaaggagctggaggaggtgactggaagggtgttcagcgagaggaaacggcacaggtggaggacctgagtgggggtgggtctggggtgtctgaaaaacagccgccaggcggaggagtggggcatgaggttggaggagtcctggggcagggggaccccaagggctgtgaaggccatcctgaggcctgggctttttcctctagggagatggggtgttgcacagtctgcaggggaagagagaaaattcctgactgacactgaaacagcaattctctggcttctgtgttgcctgtaggcggcagggcgtgaggacaggaacctggaaacctgtactggggctgctgcgatggcccggggaggattgagggtggctgggacccaaaaatggcagtggagttgatggagaaaggttggattctggatgcattttggagacagcaacaacaggatttgctcagggattcacaaagagtgtgagagacaaagagtggagaatgattctgaagcctggacctgagcaacgaagagtggagaagtcattttctaagacagggaagaggctgggcgcagtgggtcacgcctataatcccaacactttgggaggctgaggcaggaggattgcttgagctcagttcaagaccagcttgggcaacacggcaagacctcatctctaaaaaaaatacaaaaatgaggctgggcgca

SEQ ID NO: 41184 - DNA, 1471 bp, Artificial sequence
  DNA replication origin
tcccctatgccacctcatcggtgacctaccccaaaggcccaggcctagtctttgtcccgcctacctacccctctccaaaggttaactccgtgtcttgggttttgcccatgctgtaccatctgcccagaatcgccagctcccttcttcacctgatacatcttccatacccaaccaggacatcatctcctctggtaccccatgctgggtcctcacccctaaccctgctgggtggtaatggatggtgaacaagttccctctggattgtaagcagcttatggatcctgactggtcaggagctcagtaaatctttgtggaatagatggatagatgaatggatgggtggatggatggacggacagacggatggatggacggatggatgggtgggtggatggatggatggatggatggacaggtggatggatggatggatggatggatggatggatggatggatggatgggtgggtgggtgggtgggtgggtgggtgggtgggtgggtgggtggatggatggatggatggatggatggatgggtggatgggtggatggatgaatggatgtatgggacaaacatccatccagttactggaaggtccacacacagttcccctgtcccaggtgaggacaacaggagttggaagaggatggggatggtcagcccctgtcctgacaagggtcaggggcctgggcaaggggcaggtactcacgctgaataggtcctggtccgcttggtgggcagagggctgggtaggtcccgaggtgggacaccaccccgctcccagaccctgctgccctccctgtggaaggggaaggtgggccagactggggacttgggggagtggagcgggggcacaactgggggtgacgtcgactctgaagtcatggtggggccagcaggagagcctggtgggctctggggcccaggggccggtgaggggtttggtcgtccttgcgggcagggcccggcctggccctgctctgcggcctcaccagccacgggctccgtctggaagaggaagaaagaggcacaggtgagcctagtccaggggagcagctcctgaaccctggccacagtgaggagggctggtcccacctgctatcctcacggcgttacttcaagtcacaaacgaccccatcgtggttcagagtcctcaccagaaaaacaaaactaggggtcatatgacccctaagtccttccagtttgcagttcaattctcttaactccaggggcctgggaggtggctgggtagggtggccagtgatggtctagaatatggttcggcataagggtcagttgtttcagagtcacacatctgggttcaaaccttagctttgtcacctacaacttggtgacttcaagcaagccaagccacacatcagctccaacatggcaggtgggagtatgggctccacacccaggcctgggtttgaatcctgcatcctccaccttctggctacatagccttggc

SEQ ID NO: 41185 - DNA, 1067 bp, Artificial sequence
  DNA replication origin
tgtccgtccctcgcggcatccacagcagccgtcagccgggcatggcccagagcatcagtggggcttgtgagtcagggtaaaggaggtctgcagccaagctggagagatggacccccaccctctgcaaacccctgggctcggctcagtacagcccaggggaaggagcccagcgccactgccaggctgaggaggagggactggccggcgaaatgggagccccaaaccccttccgccctcaggcccctcttcctgcctctccatggcactgagagagcagagcaggaaggaaggctggcctcggcagtgagaggcctgtgtgcctccgtgtcagtcctcctcccctgccagaggctgagaggctccccaaaagcacccatcggccaggcttctgagggaagggtccaggctgtggcgggggacctcagccaagggagggagatgtaagtagcacagagagcctggctccgggccagggactgacacgggacagctcaggggcggaggccagggagtgagcccagcgcaggctctcgcagctcagtcaccgtggggacgggtaagcaggagggcgagcgggtcctgcgtgtctgcggcagggaggggaggagagaggcagtggacagcgcgaagccaggtctggtggccttgccctccacctacctcctggccagcttgcacagtagtcacgggtcgtggggtgggtggaggcacacgctcatagccacaagcacagacggacagacagacgtgcacactgaggccaccgaaggactcatcagccagggcagtggggcatggagccggctgctgcccgttcaccctgtgtggctccccaacccccggccagctggcctgtgaaccactcagcctaggagcccacgacctggccagaccacgtctcgtggggagtgtggggggccagctgagtgagcaccacctccacggcctggaacttctggttcttgggagggatagggcacatcttgtaggtcacctcgtcgccctccactggcacgtactccccctcgatgctggcgggcaggaagaggggtattagcccagcagca

SEQ ID NO: 41186 - DNA, 1485 bp, Artificial sequence
  DNA replication origin
tgtaacggggctggtgagcaatggttgttctccaggagccccctaagaggtctgttgtgttgccccatgttctggccttgacctcaggtgatttgcattggagaagccaccagacctggcttctcactgtccactgcgttaggggaaacctggggtgggccacactcacagggctagtctcgttcccaaagaagtggatggtgtcgaagctgtcctggtccaggctatccaggcagtagcgcttgtcccagccctcggggaagacgtcaaagctgatcatgcctcctgtgggcaggggtggggactgttattccctgctgggaggggcagacaaggctaacagaagggctgcttgttcattcattcattcaacaacccttgagtgcctactgagggccaggaataggacacgggacagacttaggatcctcaaggaagttatgacacaggttggagaatgaacaagaccatgaagtgggtgggggaagctcatccggccagggtgatcaggggagacctctgaggaggtggcaatgagctgggacctgagccgagtggggatggctggggcgcaaagtacagcccctgaggcagggaagagaacgagcgtcccagcaacggaggaggccaggagaggtagggggaggacgggcaggccctgggcatcacatggagagggaggaagagcctggggaggactttgggcagaggcatgtcatgactccagctccagcctctctggccactggggaatgggtgaggtggcagaggggagcccagttgtgtcagggtcagttggagcctgggacaagctgctggcagtggaagtgtgagcaccggtgggattccagacagggggccctgtgacttctaggagtttggacttgggaaggggtgggggagagcattcaagggagaggctctggttttttggcctgagaaactgggtgggcatggggcgtttacctctgaggtatgaggtggggaaaactgggggccagtaaacactgaacccctttctgcatcgggctcagccaccctctctgccctgagccggggaggggctactaaagctactgggggccacagcctggtcttggcaggggcagatggtttgaggaggggccctgtaccaggcctcccaggtcctctgcagggtggacgtacctcgagagaacctcagccctttgccagcaaactctgttttcagggcttccacgaacttctcccggatcttctctttctgcagaggggagggagcggatggcagctcagaggacctgctgtgtgccaggccctggctgggcacacagtccacgtgagcgtgctgagcattctaggtgggtaggacccccaactgtgcagatgcgcaaactaaggctcagagaggggttgtgccttggtcaaggtcacctagccctggtggcagagccagggcctaaatccagaagggatggggctgccaatggggctgtgggctgggtc

SEQ ID NO: 41187 - DNA, 1039 bp, Artificial sequence
  DNA replication origin
gtggattgctccatccccgagagggagggaggcggtggggagaaaagcaaaatgcacatcaaggtttagcaggggcagtacaggcagaggtgagaggaccttggtgtgttccaggaatagaaagtggaacttgaagggcatagaaaggagacgcggagagccagagccagacagagccctcagggcttgaggcaccatagcagggggctaggacatcatccagttggcaacgaggagccaaggaaggattgtaaatgagggggtggggctggggggtgaatgcggctgacatgtttgaaaggttctaatgggctgtgcgtggtggctcatgcctgtaatcccagaactttgggaggccgaggcaggcggatcaccttaggtcaggagttcgagaccagcctggccaacgtggtgaaaccctgcctctactaaaaaagtacaaaaattagctgggtgtagtggtgcatgcctgtaattccagctacttgggaggctgaggcaggagaatcgcttgaacacgggaggtgggagttgcagtgagctgagatcatgccactgcactccagcctctatctatttttttggagactctatctccaaaaagaaaaagaaagaaaggttctcagtggcattgctggagagcaggctggcagggctatgcaaggggtagggagggacagagaggaaagttggggcagcctggggctggggaaaggggtaatctagaaagtggggtctcagttctgcagatgaacagatttgacactgactcgagaggctgatgaaataagagttgttggacccgatgtgggtgggaaggtggaaatgatgttcccaggtgttggcctggctcagtgggtggctgcctggtgctggtcacctaggaagggggaccagcagcattgtaaagatgcaggtgtgtctacaacaatggcacacagtaggtgcctgaaagggtatcagttaaatcagaacacatcccccagtctattttactgatgagaaaataaaggctcagataaattgagtgactgaggcc

SEQ ID NO: 41188 - DNA, 1037 bp, Artificial sequence
  DNA replication origin
actggtgtgtcgtagggctgaactagggtgggatccccagctcaggaggcgggggcgtccgtgagccaggccttagcggcgtgtgacagcctccggggagggagggagctaggcccctgctcgcagcctcctccctccagtactggatccaaccccagcactcccaagcagaacacaggcaaggacgctgcggggtcagtgacgtgagggccaggtcccctcactcccggtgggtggccccggatgtcagggggccgggtaccgccgcatcccacactcggtccccgggtgtccacggtcacgctgctgcagaccccacactcagcctcgggggtgtccgcgtgacactcccggtgggagcttccaatcttcagggtcctacctggcgagccggcgtgagggtcccgtccacgtcaaacaggcagaggacgcgctccttcctgcgggctgcctgggcggtgactgccatggctgcaggtccgcgcgcggggcggagtcccgaagatgcaacggcagaagcagctcagggataagtgctgacggggcggggcattagggggcgggggccagtggactgcctgattggccaaatgaagaaggggcgtggtctaggcgggcggaagcgggggcggggcctgagctgattctcattgctcgtggaggaggggagcgcggcatagggcggagcggagccctccaggttcgattggattgctccaaacaaggcggaggaggggcctgagcctgggacccgcaggaagtgagagggtgaacccggaagacaggggcggggccagaattggcgggttgatagtgattgcaacaggccgattaaggggctgggtcgggcggggcctctaccatgcagtgcagtgtctagtgggccaggcgggactaagagagccgaggtcgctccccatccactctcacaaggtttgtggccatctctttgccttacaaattttgagctgtaggaaatctcctgagccgggcgcggtggttcacgcctgtaatcccagcagtttgggacgtcgagg

SEQ ID NO: 41189 - DNA, 2445 bp, Artificial sequence
  DNA replication origin
tgggctcctgagtctggtggggacttggagaacctttatgtctagctaagggattgtaaatacaccaatcggcactctgtatctagctcaaggtttgtaaacacaccaatcagcagcctgtctagctcagggtttgtgaatgcaccagtcgacactctgtgtctagctactctggtggggacttggagaacctttgtgtccacactctgtaactagctaatctagttgggacgtggagaacttttgtgtctagctcagggattgtaaaggcaccaatcagcaccctgtcaaaacggaccaatcagctctctgtaaaacagaccaattggctctctgtaaaatggaccaatcagcaggatgtgggtgggggggtgggggaggcggtgggggggtgggggaggcggtgggggggtgggggtgggggcgggggtggtggcgggggtggggggggcggtgggggcggggggtggcgggggtgggggtggggggccagataagagaataaaagcaggctgccaggagccagcagtagcaaccctctggggtccccttccgcaacgtggaaggtttgttctttcgctctttgggtccacactgcctttataaactgcaacactcactgcgaaggtctgcagcttcactcctgaagccagtgagaccacgaacacaaccagcaggaacgaataactccagactggcagccttaagagctgtaacactcaccgcgaaggtctgcagcttcactcctgatccagcgcgaccacgaagccaccggaaggaagaaactccgaacacatccgaacgtcagaaggaacaaactccggacacgccacctttaagaactgtaacacggccggcgcggtggctcacgcctgtaatcccagcactttgggaggccgaggcggtggatcacgaggtcaggagtccgagaccagcctgaccaacatggtgaaaccccgtctctactaaaaatacaaaaatgagccgggcgtggtggcgcatgcctgtaatcccagctactcaggtgactgaggcaggagcatcgcatgaacccagaggttgcagtgagccgagatcgcaccacggccctccagcctgggtgacagagcaagactctgtgtcaaaaaaaccaaaacaaaacaaaacaaaaaaaccaaactgatgcttattcctttactatgggctgaccaccacacaggacacttgaccaggtatcttcattttcctgttccatgactgaagaattcctagaaacagatgaagtgcgaattcctgggccctacccgtagtgcttggatccagaacatctggaaggtggcccactgggcaggaggggtgtttgtctcctatggactggatctacttttctaaaaacagagataagcacccttggccccttaacaaatgggctgctgcttacaaatccctttcctacagtctctccgtaaattctcataacaaccctttccacatgatgaggccactgaaacccagagagggagagttatttgccctgaggtacagacccaggaggaccaggtaggggggtacctgtggccaccactatgtccctttaagaggaaggcttatccctggcaactggtgctcagatggggaccaggggaggccttggggagaaaagagcaggactggtgggagggaagactggacagaaaggtgacttggagggacccagaagcagccaggactgaaagtggagggcctgagacctgagcctggcaggattctgctatgaagggaagaccctgggctcttctgggccagacgtgtggctgaagtttggaggttagtgactttcatgtttggtttgggtatttcacttatttttcccaacacatctctgaagacagtacccttatactcaatttccagaggtaggtactgacatcagagaggtgcaacggcttttctagggtcacacagcacagtcgagattcctcctcaatcccgtcttgccaaaacccaggcttttccctggctcctggctattggtaggaggccatgtgtcagtatgtccaagtaccggggctgtcaatgctctttttctgtacctggtatgtgacttgttgtgtatgggtggtccaggcccaaggggcagcctctgtgtagtggggtttacaggcaggctgacaattcctggagttctcctcccactagtgactttgggcaggtccgtcccactctgtgaggtggttgttcatttacaaatggggtcaacaccctcctaaaggctgtgtagttaagaagcctaggggcagcaggggaggtgtgctgtgtgctgaggttgggggagactgtggaattcttttttttttttagatctgttgcccaggctggagtgcagtggcaccatctcacaatcttggctcaatccaacctctccctcgtgggttcaagtgattctcctgcctcagcctcccaagt

SEQ ID NO: 41190 - DNA, 1251 bp, Artificial sequence
  DNA replication origin
tgtccaagttggtcgcttccctgcgccaaaggtaagcgggccgttatccatttgtgttgttcgccagctaggcctggcctcgtcccgcttcgctcggtcggtctcgcgcgcccccatagccttgctagagggttagcgttagccttaagtgtgcgaatccgaggagcagcgacagactcgagaccacgctccttcctcgggaaggaggcggcacctcgcgtttgaggcccgcctgcgtttgaggcccgcctgcgcttgcggcccgcctgcgcttgaggcctgtctgcgtttgagatctcattgggcgtgattgaggaatttggggaggtttttgggcggtattgaggacgagggggtccgttagtcagcatagaatcctggagcgggaatccctcaccgtctaaatggcgtcgggggcgggacctccgggatctggcttccgcgggccgccgccggccctgaaacgtgagggatagctgagatgaggcagctactgggatggcccccatgcgcatttacatgcagtccgactgccgagctttcgaggcagcaggatttaccgtccacattcctcactactaaccaagcttttagaacagatctcacaagaacctagaggtcggtattttttcgatttaaatttgcctgttactgacgttaacgtctttcgcctagtgagcagtagccaacatgtcagggtgggagtcatattacaaaaccgagggcgatgaagaagcagaggaagaacaagaagagaaccttgaagcaagtggtaagtgacttcagcatgtagtgccattcggtgtgtggaagaaagaccttccctgcctatctctgctggatggactttgctgtttgatggcctgcccttctcctcccagataattctgaaattcttttcttcctttgaacttcgcagagctaccctaggctcttatatgcagatcttactctagtgtgccctaagttttttttggacactggtagtttgacatcttttggtccctgataaatggccatgaccataggtattttttgtcatcttaagtggttcaggtgagacccttctcatccaggaaagtagtgttaccattccaggacctcagtgtaaaaatgcccccaccctgcaataactacaccaaccaaagaataaacgcaagcaacacagttacaggaaagtgattgattccctcactatagcctccacgtttgggagtgtatgtgcaggcaacacagtaacacataaaacaa

SEQ ID NO: 41191 - DNA, 850 bp, Artificial sequence
  DNA replication origin
gagcgtctctgcccagccgccccatctgagaagggaggagaccctccacccggcaaccgccccgtcggagaagtgaggagcccctctgtccgggagccgccccgtctgagaagtgaggagcccctccgcccggcagccaccccatctgggaagtgaggagcctctccgcccagcagccgacccgtccgggagggaggtggggggtcagccccagccaggccagccgccccatccgggaggtgaggggcgcctctgcccagccgcccctactgggaagtgaggagcccctctgcctggccagccgccccgtccgggagggaggtgggggggtcagccccccgccctgccagccgccccgtccaggagggaggtgggggggtcatccccccacccggccagcagccctgtccgggaggtgaggggcgcctctgcccggccgcccctactgggaagtgaggagcccctctgcccagccaccaccccgtctgggaggtgtgcccaacagctcattgagaacgggccatgatgacaatggtggttttgtggaatagaaagcggggaaaggtggggaaaagattgagaaatcggatggttgccgtgtctgtgtggaaaaaagtagacatgggagacttttcattttgttctgtactaagaaaaattcttctgccttgggatcctgttgatctgtgaccttaccccacaaccctgtgctctctgaaacatgtgctgtgtccactcagggttaaatggattgaaggcagcatgctcgttaagagtcatcaccactccctaatctcaagtacccagggacacaaacactgcggaaggcctcagggtcctctgcctagga

SEQ ID NO: 41192 - DNA, 1329 bp, Artificial sequence
  DNA replication origin
tgaaaagtctcccatgtctacttttttccacacagacacggcaaccatccgatttctcaatcttttccccacctttccccgctttctattccacaaaaccaccattgtcatcatggcccgttctcaatgagctgttgggcacacctcccagacggggtggtggctgggcagaggggctcctcacttcccagtaggggcggccgggcagaggcgcccctcacctcccggacagggctgctggccgggtggggggatgacccccccacctccctcctggacggggcggctggcagggcggggggctgacccccccacctccctcccggacggggcggctggccaggcagaggggctcctcacttcccagtaggggcggctgggcagaggcgcccctcacctcccggatggggcggctggcctggctggggctgaccccccacctccctcccggacgggtcggctgctgggcggagaggctcctcacttcccagatggggtggctgccgggcggaggggctcctcacttctcagacggggcggctcccggacagaggggctcctcacttctccgacggggcggttgccgggtggagggtctcctcccttctcagatggggcggctgggcagagacgctcctcacctcccagacggggtcacggctgggcagaggcgctcctcacatcccagacggggcggcggggcaaaggcgctccccacatctcagacgatgggcggccgggcagagacgctcctcacttcctagatgggatggcggctgggcagagacgctcctcactttccagactgggcagccaggcagaggggctcctcacatcccagacgatgggcggccaggcagagacactcctcacttcccagacggggtggcggccgggcagaggctgcactctgggcactttgggaggccaaggcaggcggctgggaggtggaggttgtagcaagccgagatcacaccactgtactccagcctgggcaccattgagcactgagtgaaccagacaccgtctgcaatcccggcacctccggaggccgaggctggcggatcactcgcggttaggagctggagaccagcctggccaacacagcgaaaccccgtctccaccaaaaaaatacgaaaaccagtcaggcgtggcggcacgcgcctgcaatcgcaggtgctcggcaggctgaggcaggagaatcaggcagggaggttgcagtgagccgagatggcagcagtacagtccagcttcggctcggcatcagagggagaccgtggaaagagagggagagggagaccgtggggagagggagaccgtggggagagg

SEQ ID NO: 41193 - DNA, 1410 bp, Artificial sequence
  DNA replication origin
ggtgggtgggtgggagtgcgggggccgcgcggggaggaaggggttacggcggcgcgcccgggtgcgcgtgcgcccaccccccgacagccccggttcgcgcgggaagaaccccgtgcgcacggtgcccccggcggtcctcaacccttccggcgctgcgagcgtgagcccgacccagctgcgccgctccgggaggccgtgggatctggggcgccgcggggccgaaagcggcgcgagggtcgcgggttccagagcgcggggctagggacgtcgcgggggcgtctcagggagcggcctaaggagagcgcgtggccgccgcctccctcgcgcgcccacacgcggtttccgtggtccgctctcccgccgcccgcgaccgcgcgtcgcacctgtcactcccttcctggccgcggggacgtctttgggattcccggggcccagcccccagtctccgcgccccgaatccctgggcttctcaggattgaccgacggccaggtcgccgggtgctccgcgaaactttgggcagcgactgcagaagcaagttgctgatgaagagagcagtggcggcggagtgtggacacatctctccgggatggagacccgggcgctcctgctgtcacgctgcaaggggaattgagcagaagaaattttgagttgtggcccctcgggtacgggctggggagcgggtggcctttgttccagcgccttaacagcggagtggaagagctggtaggagcccagggatccactcttaaaatactaattttgcgaccacgggaacaacgatttggagagggtcagcggcttgctcaaggtcacccagctggttagagcctagttcttgcagttccttggccagtattggtttttttatacccctcctttcaagaaagagtccagttgactaggctagtaatcttattaactggatagttgcactcttatgtttaggccccaaaatgctttgtattatttcacttcttcctcacaacaatcctgtgagatactcttattacctctattttaatacggtaattaaagaagccgaggccaggagatgttgacttatctaaggccactcaccttagagagcttaggcagaaacacaggtgcattgtacttttcagttttcagaatgctttcatgtccaggatctcactacagccttgcaggcatgtatgatggctacatccccgttgtgcagatgaagaagcagaagcagcagaagattctcttttgggggaagagataaatgcagcagctaattgaaaaggatctgtttgccattttcccattttgcttttgtaatatttctccccttggtttgtccttgatttccattttggtcatgtgggcagtgtgataagacccttaattgaagccccagttctaaccacagactctttgctaagtgc

SEQ ID NO: 41194 - DNA, 1178 bp, Artificial sequence
  DNA replication origin
gagaataaagaagccccagcgtggctgcgaggcaccattggtcactgactgtacagatggcagtgcaggcagagggcacggcgagtgcaaggttggaggactgctccagtgcaccggccagagccagggggaagtggctggagaggggggccagggttgaatgtcagggttaatgcccacccccgtgggagccctgggagagagggaacagttagacttcagccatagaaaggcccgggcacaggagagagggctgttgggtccaaggcccagtggggggtccatgccctgtactgaaggtgagccccctccagccgccactctgcagcttgagttggctgaacctggctgatgctcactgaccactggctgtgggccagcccctggcctgcaggtcgcttggccagattggccccgggctaccccccttaatgggtgtgggccgtgtggacatctggtgctccggatgggggcgcctcctcccaggagcttctctgaaggaaatgggggaaaagctggagcagggtccctggcagtgtccctccgggagggcttcctgcacctggctgtggtccagagcactgctagcagtctgcgtgcatcttccacagagttcctctccgccaggtaacactggggaggctaggggtcagggctgtggctggttgaggtgtgtgatgtggggaggctaggggccagggctgtggctggttgaggtgtgtgatgtggggaggctaggggccagggctgtggctggttgaggtgtgtgacctcagcaaagccacccaggtgggtctgtttccctcctgagtacctgaagtgtggtgtactgttttaagaacaatggccaccatttgttggcctttctcaggaaatccacaagcgcctcaagtgggtgtgtctttacagaggaggaaatttgggttttgaaacctaagtagcttgcccaaggtcacccagcagactcccaggttaggactctcccgaattgctgtgaatcggctggaatggcaagcaacaggcagtttggctgggagggagggttctgagggttggtagggaggggtccctgttcccagggtatatataaacagtctggagctttccttctgctggttgggctgccctgaggccccagaacccaccaggcccggtctccgctcctgccacaaagggtc

SEQ ID NO: 41195 - DNA, 1040 bp, Artificial sequence
  DNA replication origin
cccggtccccgtcccagtccccggccgggaccccttgtccagtcctgagcttgggtgctcggcgcggcgtcactcttccctgccctgtccccgcagaggccgccccgcgggacttctgtcagcgtttccccgccctcgagccgtccccgcggcaacccccggcgcgggctccgcgaccatccccggacttgcctgcgccgctggacgcctgcccctgggccccgccggtctacgcgccccctgccgcgccgggcccctatgccgcctggacctccagtcgcccggcccggcccgccccgctcagccacccgacggctcgggccttccaggtaccccggcgacccgggcacgcggcccggcgccagttcagtgtgaagatgcctgagaccttcaacccgcagctccccggcctttacggcagcgcgggccgcgggtcccggtacctaaggaccaatagcaagaccgaggtcaccgtgtgaagcggggccgcggtgccctcgaggcatgggctggggtcctgtctgcccgtcggagcctcaggccacagggagaggagcgcctgccgtaaggccagctcttctgtctgcctcaacggcagtggtgtcttggagcctgcaggccgcgggttcgtcttgtaaataagcccttttatgtggttcctgcccctgagaataaagaagccccagcgtggctgcgaggcaccattggtcactgactgtacagatggcagtgcaggcagagggcacggcgagtgcaaggttggaggactgctccagtgcaccggccagagccagggggaagtggctggagaggggggccagggttgaatgtcagggttaatgcccacccccgtgggagccctgggagagagggaacagttagacttcagccatagaaaggcccgggcacaggagagagggctgttgggtccaaggcccagtggggggtccatgccctgtactgaaggtgagccccctccagccgccactctgcagcttgagttggctgaacctggctgatgctcactgaccactggctgt

SEQ ID NO: 41196 - DNA, 2244 bp, Artificial sequence
  DNA replication origin
gcattctgagcttggtgtgaagtgggcactacagggtccaggtccccttcctcggttggaacgaggactctaggactctatgtgtcctgaccctggaactcccacccacatgccacacgtggcactcacatgcccccagcaacccccatgccctggggcctgtgccctcctcatccacccggtcccagcaccctttgggcctgtgggctgctgacaccgaatgtgacaggctggtatttaaaagtgaccatagagaagccttcataccctggcaggccagatgtggacacttccccctcctgggcctcagaggcagggggtgagggcttccttggcacttcagcacccctcgctcccgaaaccacgtagcccactttctcccagggagctctaagggaagcccgggctggcaccctggcctccaccctcagcttctgcactgccttcaggaggtggagcctcctggcctggcttctggatgctgcaggggtaggggctgggctgcccaaatttgggggtcccccatgatgggtgagggtagcttggaagaggcctggatatgtctttgacaggggcggggaaaaaggaacttagggctgcgatggtgaggggtggctgcagcagcccagctgacatgttcatcctgaactccctgcacctgctggggatggggcagcaggtttggtgatgccgcaggaaagccatgcccacccttgctgtgctgtgtggtgtaggccagtcccttctcctttctgggcttcaggctcccatggccccaactcccttttctctgctggggagacctggaatgggacgtaggcttgtgtgtgggtgtgtcctgagtccctgtcctcccctcgagtctcacccttcattctgctgtgttggggttgaaggccagggaaggcttctcagagggcttgggcggggcatctggaaagagtttgtgcaaaggcccagaggcgtggtggttactcagctgtcagggagacaggagcttgaggtgcttgcccagagatgaggccacagaggtgagcctctggggagagggcagggcaggaaggtcagcccaggcaggtactaggatggtttcagaccctgccaccaaacctgaagccaaacctcggccatccctggtgtcctgcctcctgaatgaccttcacgaatcagccatttgaggctctagccccggaaggagggtcaggctgagtgggagaaaatcatgggttccgggttctgaaggcagctgggctgcagacactgtcacatcacagctgggtgggggctgggtgttgggtccaaggaggtggctgtccaaggtcacacagcctgtgggtcctgggctgccaccagggggtctcccaacatccccattccgtcacccatctgtccttcatgcccgtgatggcagctttatcccaggtcccagcagaagccgcggctgcaggggcagttaggcaggcaggtaaataaggcatcctgggccgggcgcggtggctcacacctgtcatctcagcactttgggaggccgagaccggcggagttggagaccagcctggccaacatggtgaaaccccgtctctactaaaaatacaaaaattagctaggtgtggtggcaggcaccttataatcccagctactagggaagctgaggctggagaatcacttgaaccggggaggtggaggttgcagtgagccaagattgcgccattgcactccagcctggacaacagagcgagactctgcttcaaaagataaaaaaattaaaaaaaaggattcctggaggaggccgctgatggggtctgaagaatgagtagcagttttttgggagaagaggcaggaaagcagagaaagctcgcattgggaggggaggctcacctggggaaggtccctgagagtgggctccagggaggggaggggagggaaggggagcctcattagagtttcctgacctgctctgggaagcagctgtcttggggccacaggtgaggctggcagatactgcctgggaggggaaactcgtgcgtgatttcgagcaccggagaggacggcctggagaggccgaaagaactgcccagggccacacggtgagacggtggtggccggggctggcttttgatgaggtgggagacagagggccacccctgactgctgtccccgcagggcgctgacagagcttctgaagcagccgggcccccaggagccactgcctcccaccctgggcccacccctgggtggctgtgt

SEQ ID NO: 41197 - DNA, 1052 bp, Artificial sequence
  DNA replication origin
catggctttcctgcggcatcaccaaacctgctgccccatccccagcaggtgcagggagttcaggatgaacatgtcagctgggctgctgcagccacccctcaccatcgcagccctaagttcctttttccccgcccctgtcaaagacatatccaggcctcttccaagctaccctcacccatcatgggggacccccaaatttgggcagcccagcccctacccctgcagcatccagaagccaggccaggaggctccacctcctgaaggcagtgcagaagctgagggtggaggccagggtgccagcccgggcttcccttagagctccctgggagaaagtgggctacgtggtttcgggagcgaggggtgctgaagtgccaaggaagccctcaccccctgcctctgaggcccaggagggggaagtgtccacatctggcctgccagggtatgaaggcttctctatggtcacttttaaataccagcctgtcacattcggtgtcagcagcccacaggcccaaagggtgctgggaccgggtggatgaggagggcacaggccccagggcatgggggttgctgggggcatgtgagtgccacgtgtggcatgtgggtgggagttccagggtcaggacacatagagtcctagagtcctcgttccaaccgaggaaggggacctggaccctgtagtgcccacttcacaccaagctcagaatgcaacaagcacctgtcctggcctcagcaacacacgactgtgttccagagtcccctttctacgcagagggagccctgaccttcacctgggagctgtggcatggggtgagtggggggaggcctttgaaacccaaggagggaagggcagccttgagtcacagctgtgggggcaggggagaggcaggaggtggaagaggggagggaggagtggggagaagcaggagatgggcacccagagaaccaagcgccccttcctttcccgtgcccaagacgcccggtcacctccctggccagcggcgccccttaccctggacagtgacccggtgccctctgtgcaaggctacctgtcc

SEQ ID NO: 41198 - DNA, 1854 bp, Artificial sequence
  DNA replication origin
ggcgccgcggctccctccggctcggctcctccgctcccgcagggatcgcgctggctcccggcgcacgccgcctcggccgtcggcctcctctggggaccccagccccgagtgggctgggtctggagctccgaggccgcacctccggtgggcgcgtcctccgcccgggctcacctcggacccgagctgcccggtccgcgtcctgagatcttccccgggccgggcggcgggtcctcgcctgcgcgcggcccccggcttctccccggcccggcaggtgtgcgggtcttggccctagcggaggccgcgccggggccgcgggccgcccgactgcgctaccttcccgccgcgctctcagtacagcccgcgctctggctccggctccggctccggctcccgctcgggctcggcgcgggctcgggcgggcgggggagggagagaggagggagggcggaagggaggcagagccgggggaggagcgcggctgccgcgaggggcgagaggaggcagcaggccccgcggagccgggaggccccacagggaacccccctccacaaagactgccccgaaacattcatcggaactgggcgctcgaaggggatcagttctagggcccgcgactagagcgtccctgtcttacaggtgcggggacctgtaccttacaggcgcggaggtcaaagcagcccggaattgccccgggacgggcagggccaccctctcacctccttcccgtcccctctgtccgttctgatcataacataaggagggccccttcccctctcggcgcctcgattttcccacctgtcaaatgggaaggacttcccctggcagcgccgcttcagagggccaaggatttaccccacggcgcgagcccagttccagaacccctcgaacgctgggctggggtccagggatgtccccatccctgcgtcgatgggcacggcttggctgacgcacttccgcgatctgctccctccccaggtgtgaggagagggggactgggctcgcccctgccctggaaaaggaaagcctggaaaaggaagacctccgccctgcgcccacccgcaggtcctttcacaaaccgaggggtagggtgtgggggccctaaggagcccggacccggtcccagcacggcccagtggtgttttcggggttgagttgaactggagaaggtcctggtgcttggcttctccctgcctcagtatctcatcttaacatcaaagactcttcctggagggcagactcataatctgccccttccaggagataggggtcgatatggaacctccctctgtccagacggaaacagcaggagggcaaggactgggcgtgcaattcacccagtgtgcagctcaggcctctgtcggcatttgctgaatgaataaatgaatgaaaggactccagcgcctagtttctgtgagatgaaacatttggggctccctagggtccctcctggtcccctttccatccgtccttctctcagcaactgggaccagcttatgaaagtggagaaggtgggggagaagaagaggaaggatttacattttaaggaggatcaagtctgttgcctgacatgaggggctgacagactaatttcaggtattaatgggttcagacaggaagaggaggtgacctccccactcagagcttctccttgtgccctggccaaagacagcctgctccctccacctacacacacacatgtgcacacacatgtacacacacttcccatccagccccgaaaacccaccctcattaaaggaccccttattaccagtttagaagaaaaaacacagatgaacaaaggaattaaatgaaattgctttaatcccatgtccagagacaaccacactaaaatat

SEQ ID NO: 41199 - DNA, 1042 bp, Artificial sequence
  DNA replication origin
gactcggctcctctgcccgccccgcggggcttgctgcagatgccaggggttattttaagcctggatcaatggatgagttttggtgacacaggcttagtggtagtggaggggggcaggcagaagagataaggggtggctgccctggagccttgatggggtgagagaccccggggtccagggcaaaggggtcactcctcggccgggctgctctatctccagatcccctcacccggcacatggccaggcacctggggcagtgtcagctgaatgggcgatcagatcccaggactcagccagtcagggtcagctgggctctgtgttcacagctgccctctcctgctccactcactccccgcggccaggtgttcccatggagagaagagggtatccagtgcctggcacagacccagtagttatggttacctatggctgctggctgaccactgaatcagattgagacggggaggaaggtgtgtgtgtggtggggggtggggggtggtgttgggggttggacatcagtccctgggaggggctggaatccacttccttcattggacaaatggctgtcactatgtatatgtatgtgaaggcctgatggggtcaacatgaggaaagcacccagtgccaggacggtgggggcaggagggtgtccaggaagggggagcactgggagacttgctctgacccctcactctaacttggaagaggccccagttccaagggggcagagacaagcctctttcaacccagtgcccggcaacgggtgggaaaggtgggagaagaggcccccctcagagctcctgcagcctccagggcagtgggcagagggcggtggggacttcaataccagtgatacgggttgtgccacggattccatttctaggaatggccctaaggaaaggaagcaggaaaggacgctccagaaagtagagctcagaagctctgagaagaatcacaaatgagaaggtttttttttgtttttttttttttgtttgtttgtttgtttttttaagacggagtctcaatctgtttcccaggctgg

SEQ ID NO: 41200 - DNA, 953 bp, Artificial sequence
  DNA replication origin
caagcctcaaggtggccggaaaggggcggggccagcggcatgcctaaggggtggagtcaaggccaaggggcgaggaaaaagcttgggaccggataaggggcgggaccaaggccaagggcgcctgcttcgggctcccgacctctgcgccctcgggagtccgggtcctcacgcgcatcccgagccctgggggcctggatgcggcccacggccccgactcaagggcgaggctcaggggggagggcgcaagacgcctccgcacagaactgtgaccgaggagcaggggggctgccggggagggcgcacctgtccccgtgcacgcgctgtggcctccgtggagctctgtcctctcttggttcccgcgctaaggtctcggtgtccgctccggattcgcacgtacactgagggctttggagcctcccagtcccgccgctccctggcgacctcaggagcccgggcgccccctccctcccacgggcagctggagcctgagtcagagttgcctcgcgggagacaaagacagccgtgggccctccctccagaacccctcctggtatcggcatttgcaccagcagggagcccagagtccccaagagcctctgcttcttgggtaactgcatcattgaggaaatggaagtgaaattagcttaggaatgaggccttggaggcttgtgggtggcatccgcggtcacggtcttctcagcctggcttcagtgtctctggggcccactgcttctccctgtaaccctgccgaaatgctggtagcccatcttgcagatgacaaaactgaggcctagaaaggttgaatggccctgaagagcaggaattccaacccggtcagcctggctccaaaataaaggataaaggctgggcgcagtggctcgcacctgtaatcccagcactttgggaagccaaagcgggccgataacttgaagtcaggagttcgagaccagccc

SEQ ID NO: 41201 - DNA, 1427 bp, Artificial sequence
  DNA replication origin
acaccccacccccctcctccaggtgctcttatgaagatcaaatgaggtattgatgtgacggctctgggtctcagtttcctcgtctgttaaatgcatatgagaattatctaaggttccttcctgcccttctctggggaccacaggccaggaggagaaccttgcatacaacccctcatttttcagaagaaaaaactgagaactcaggggaaacttcctaccggctggcggggccagctgggacagagagatgcccaaggtttgcatgtctgagccccagaggggtttcacccaccctcggggttttcacctgctgagctaaccctggctgtagcaaaagatggggtgggagatgggggtgtccaggagaagatggggtgggggagatggggtggccaggagaagatggggtggccaggagaagatggggtgggagatggggtggccaggagaagatggggtgggagatggggtgtcaagagaagatggggtgggagatggggtggccaggagaagatggggtgggagctggggtggccaggaaaagatggggtggggcagatggggtggccaggagcagctcagactcccccaactccagatggaaggggagtggatggctgggcccatgtgggcctgaccccaccaaacctctcccacacctactgcttgtcacttgacctcaccctgtcacctggctccctgggggcaggggcatctgagatgggttcatggagcaaatagccaggcagagacctggatgtgagtggccactgtcttccaagctgggcacacaacaggtccttgggacaggaagcactgagtccagaggcctggcaagggacaggaggggcaggagaagcaggggtctacaggtggctctggtggcagctcagggggaggcaggcagaaaacatctgatgcacagaacagaacatgcccagggcccaagagtgggaaaacagcacccagaactccaccttctgactcctagtccagtgctcccttccaaagatgctaagctgcaacaagttccaaggaagctgcccagggcgaagtccaggtcaggaggttctgaccctgtgcaggagggcaggtaggaggcggctgactgagtgcacagtgtcgtccaggagtggaaagagatggtcttgtccccagaccccagagcaaggaacaccattgtaagaggagggagcagcttccactgtgacggtgggtgaccagggggctggcacaggatggccaaataagcccagcactggggggccagtgcttcaggggaacaagccagagagagaagggagttcaagggacctcatgtccacctggttcaaggtcacacgcctgccctggcctctacacaaaggagcctcctgtaggtcccagcccttccatgtttatggctaaatgtgctgtgtcttggagca

SEQ ID NO: 41202 - DNA, 1557 bp, Artificial sequence
  DNA replication origin
gggcgcgcggcgccggcagctgcggggagaacggggccccgatcgccagggcgcaggcagagccccgacccccgggggcgccgagggctgaaaggaccctgtgggcagggcctggaggggcccgcgatcaccgcgtggccctcaccgccgcctctctccctccccttgtccaccgccccccggctgtccctcccctccccggccagcctcgcccccctccgcccctccccgtccccgctcctccctcccctcggccccctggcctccctccctgtcccctcccgaagcagccggggccagcagccctgcgcccaggacggcgctgcagccgcaggagtcggtgggcgcgggggccggcgaggcggcgctgcccctgcccgggctgctctttggcgcccccgcgctgctgggcctggcactggtcctggcgctggtcctggtgggtctggtgagctggaggcggcgacagcggcggcttcgcggcgcgtcctccgcagaggcccccgacggagacaaggacggtgagttccgtgtgtaggggaaccagtctgagcggggcgcaggggctggggtgtcgggacggtctagggggagatgcatggcccctgagggggagagaagggctttaaggggaaacggagacagagtggaaaagagtttgcgctgaggagctcaggctggggagggagacatagtcctgcccctgagaccctggtcggagccaggaacagctctgccctgacagaccccagtgtgaggaagagacaggttgcaggaagggggccccgtctgagggaggagtctgtcctgccctttgggagtctaacggagcttggttcccccataaatccctgaagagtttgccagactgagccccagctccccaactccctgccctgccagctccccactggccaggcctctggactcagggtcagccaggtgccacccctccccaccctgcattgggcttcatttgacggaggactgcccctccagaggagtcttctaggggagggagggaaggctgtgactgagtacggagcctctaccccctctgcctgcagccccagagcccctggacaaggtcatcattctgtctccgggaatctctgatgccacagctcctgcctggcctcctcctggggaagacccaggaaccaccccacctggccacagtgtccctgtgccagccacagagctgggctccactgaactggtgaccaccaagacggccggccctgagcaacaatagcagggagccggcaggaggtggcccctgccctccctctggacccccagccaggggcttggaaatcaaattcagctcttcactccagcatgcacatgccctctttctgggaccaggctaactctgcagaagcacagacactacagaccacagcattcagcccccatggagtttggtgtgcttgcctttggcttcagacctcaccatctttgacagcccttgaaggtggtagcccagctcctgttcctgtgccttcaaaaggctggggcactatgagtaaaagaccgcttttaaaatggggaagg

SEQ ID NO: 41203 - DNA, 1133 bp, Artificial sequence
  DNA replication origin
gcactccctggacttcctgtttgggcctccaagcctttgctcccctttggccttcacccccatctgctccctagacctcagtccatctggcaaacacttcaccatcgccctctccatgaagccttccggcccaccttccaggatgacgtgagctggtgcccttgctgcgaggctgtcttcccccatcagcacaagtgtgagattccctcagggcagacccacatgctacttgggcctggtacaagtgtctgatgtcaggctgggcactgtggcttcacacctataatcccagcactttgggaggccgaggagggcggatcacctgaggtcaggagttcgagaccagcctggccaaatggtgaaaccccacctctactaaaaatacaaaaattagccgggcatggtggtgcatgcctgtaatcccagttactcgggaggctgaggcaggagaatcgcttgaatctgggaggcagaggttgcagtgagccgagattgcaccactgcacagagccagactctttttcaaaaaaaaaaaaaaaaaaagcaggtgtctgatatccccaaccagctctgtccaggaagggcaggaagagaggaggagacaggtgggttgggggagatggcaggggagcactcggggtcatggagaggctttggctagacggagcagaggaaccactcagggtctgtgtcctggctgcggggtccatccccctccctacccaagaggaggctctggtctgcccccagacacctcccagcacccagcagagggcccacccaggcggtgctggttgaggggctgaattggggaaccacaggtagaaagagaggccaggccgggtgcggtggctcacgcctgtaatcctagcactttgggaggccgaggcaggtggatcacgaggtcaggagttcaaaaccagtctgaccaagatggtgaaaccccgtctctactaaaaatacaaaaattagccgggcgtggcagtgggcgcctacaatctcagctactcgggaggctgaggcagagaattgtttgaacccgggaggcagagcttgcagtgagccgagatagcgccattgcactccagcctgggcgacagagcgagactccgtctcaaaaaaaaaaaaagaaa

SEQ ID NO: 41204 - DNA, 1485 bp, Artificial sequence
  DNA replication origin
cctctcctgctcacctctgtgtctcactgcgggcccctcctgtctatctctgctccccagtgtttggggtccccaactgtctgtcacccgtgtctctctcagactgcgtctcagaaacacacacaagcccctccgccctcctggtcacatgctaccccctccccagggccagggctggagggaactctgggagctcagggctcagcagagagcatggggttaaatgccacacatgccacccagacccctaagcactcagggctggggaagcacagtgagaggagaaactcaggggctggggagggagcctgggggcagagggagaccctgagcagcagcgagggggaggcaaacactccaggcggagggctgcaggggctaaggcttggagagatgaaaggggagcctgagctgctctgggggcaggcatggccactgccacaggggatgctgggagggaggagggagcatccgggctgcggatgggcagggcaccagtcccggggcagtacagaacctgggggtgtctgggtaggagggagattctgagctgtacctgcaagggtccctctctctggcactgtggcccacgtccagggcaggtggcccagggcaggggatgatgcagcggctggccatggagtgaggggagcaaggccgacccccaggtttccagcttgggagaccctgaaggttcacaaagaaccccagtcagccagccctgactggtgggcgctggcccaccctctccatcccctgtacatgggccagcagctcccaggcaggaaggtgtgggcggaggggagctgcaaaggagaagtggggctgggggcaggtgtgggtgagcgtgggtgtatggtgatgtgggggtgggggcaggtgtgggtgagcgtgggtgtacggtacagggatgggggacaggaccctggaggggagccagggcagggaaggcctctctgtgaggcagagaggtggggacaaagccagaagactgagccataaccctgccacccacatacacgtccatccatgttggtgctggtattacccattagtgagggctgcagaggcctgactgagtaccaggcagctcatttagcccttgtgccagccatgtgggcagactgaggcttgtgggaacccaggaacggggaacctgtccctggagagggtggcccagtgaggccagagtcgggagaatttacaggagttaggaggagggggtccgcctgccccaggtctgcgtttcacagcagaagcactggctgctctgacccccagcagagactcgaggagactgctctcaaggccagagagagtgggagggctggagcccactgtcagagttccagggtcccttaccttggccagagagggaggccagctgctaagagcagcagacacaaatgagacacccactcatgtgacacaaatgtttgctgggcgctccctatgtgctgggccaggtgccgggacaaaaggcct

SEQ ID NO: 41205 - DNA, 1153 bp, Artificial sequence
  DNA replication origin
gagggcaggctgcagggaacctccctgcaggtggccgtgagtgccagcctggccgttaccagcctcccatggctcttcaggattccagaggctcagagcagccattcacagccgcccactcctaggaagccagcccctccctgcaccagagcccagcccagcacggtctccggggatgtagctggtgggacagtgagcagagggctgggccctgtgcctggggactgtggcctggaggctgagcaggagctgaggaggggaccagagggacaaggcccctaagctggccaccatggccagactctgagtgcaggggaggtgaggggcctgcgtgtgccttatcttcccagacacactggatccttcttgtcctctgatcaaggtaggtgtgtaggggggtggaagggtgtgggggtttgtgggggtgggagggtggtgggggtggggtggggaaggaccaagcaatccatggaagatgggagtgcagtgaggggatggggagtcgggtgatgccctcggacaccctgtcctctggcctgctctgtgtgtgggtgtgcacactgaggggagctgtttgtggctaagtgcagggtaaacgtgtgtgcccaagtggatgtggctgtgcaggagggggcagaagttcagggctgcagtgataggccaggtgggaaagggttggaggccaggacagtcttggatacaaatatatggctggagagggatgaggggctgggggcaccattgtgaggggtgatgccttccctgtccggtgccctgccttccccgtccctgctgcagacctcaaggacctggctacatgatcactcccctccccatgagccctctggaactgactcctcccaccagccctggccttgtcccccagctgcaggtcccagcctgctgtgttaaaagcaaccaaaccaacttttttctagagggtgagttacttggagtccagagtagcagggagtggcccatctactaagaccacagccagagtcctgagcttcatcctcgacacctctttgtgcccactccctaccctgggcagtcccgccacttctacccctgtgcaatgcagcctcctccagccccagccctagctctgccccttgcacagcccacggagcagagagtttcaactatgtcc

SEQ ID NO: 41206 - DNA, 1800 bp, Artificial sequence
  DNA replication origin
cggcccctgcaaacgggcctcgccccttcgcgctctcctcccacccgcccggcccgcggccccgccgcgccgcccctgcgccccgcgccgccgcgccctccccgggacctcgcctcggctcgctcggcgccgcgccgcccctgtccgcgcgcaccgttgccgccgccgccagccgccgccgctgccacccgcaccacgtgaccgcgcgcccgtcggccccgccgagggcccctccccttcccgcggcgcccgcgcccgcaagcgggaactggtcccgggtccacgctgcgggcggtccaggagccgcccccgcgggctccaggtgccaggcccggaaaggtgcctgcatcccagtcccgtctctccccgctggacctgctccccgccccttacccactgggctgcggcggggacgggcggaggggcgcaggggaccagtggcagctgcgggcggccgtgagcgcgcgtgagtcacgcgggggctggggtgttgcgcgggtgcctgtagagccgagtcaggggcccgggttccaggccctgctccagaatgatgaaccaataaccttgagccagacaggaacttctctgagcctcagtttgcccattagaaaaaaatttcacgcattcagtggatactaatggacagcatattgcctcacaggggtgaggacaaccatccctcccctcgaaggttctgggtctagtggaggagacaggaagatggaatgtcctaatgcaggggccggggtgcacacagggaactgagggtgcaggcaggtgggcaccctggggagagggggcttggaagacttcttggaggagatgagggccagatggaaaggcaaatgggagtggaagggaagaatggaaagggagaggtattctgcaaagagaggacagcagaggtgagggtctccagaggtgagagctgcgtggtgctggtggacagcccagagtccttggtgtcgctgaagcagagaaaattccagacaggtgtgtagagctaaataagaggctggagaagtccgcacgcagccttggaagctggattttaatggaaggtaatggtgagtcactgacgaatattaagccgaaagtgctgccattcaatgtgggagtcgttgcagcagttgtgtgtggacagggaacaagctggtgggtgggaggtggcctcacaggggcagaaggatggagaggaggggacagccagccagatagttgagtactgaggaggtaaaccaacaaggtgggaagtagactggatgagatggcaagagagagatgaggaagaagaggatacccgggtttctaggcacctaataaaaggtaggcaatgcctacagctgagagagtgagatcagggaggcaggagtcagttcaagaagaaaagggctacctctggacatgcccgggagacatccgggtagataagcctagcaggctgctggctgcccacatctgcacttcaggagacagggctgggctgcagatggagggagagctgagatctcgtagggagaagtgaagaccagaatttaggtgaggtgcccagactgagtgtgtggggtggagggaaaggggtctgacaatctaacgactcaattaaggcattagactggatgccttctaggcacctttccagacccaaaaactctgagcccttgaaatgttgggaatgaggctgcccaaagtagagattttaacaatctggattccaatcagcttactgccaccagccagctttggtgtgactttaggcatgtcacaggctttctaagaccaaatgaatgtccagccctt

SEQ ID NO: 41207 - DNA, 790 bp, Artificial sequence
  DNA replication origin
accgcccgcagcgtggacccgggaccagttcccgcttgcgggcgcgggcgccgcgggaaggggaggggccctcggcggggccgacgggcgcgcggtcacgtggtgcgggtggcagcggcggcggctggcggcggcggcaacggtgcgcgcggacaggggcggcgcggcgccgagcgagccgaggcgaggtcccggggagggcgcggcggcgcggggcgcaggggcggcgcggcggggccgcgggccgggcgggtgggaggagagcgcgaaggggcgaggcccgtttgcaggggccgctcggcccggggaagcccgcgccccgctcagccttgcagccccgcgcccggagcatctccctggaggaacggagacaaaggaggattcatgtccaaaggtagggcggccggccaggccaccggcacccgccaggaggaggctgcggccccggccagcgcggctggaggcgctcctgggggagggtttccgcgccgaggagcccacgcgcggtgacagatgcgcggacacacgcacacacggtggcacccacctcgagagagacaatcttggagagaggcagacataggacgcggggagacgcagggacccacggacacgcaagcagggacccagatgcgcacagaaagccccatgctggagtacaccaagacacgcacacacacacacaccacgcacaggtgccagggccatgccagccggatgagagacctgtgcactgatacatacgtcccctcccccgcaacccctacaggcacacgctgagacaggcacc

SEQ ID NO: 41208 - DNA, 1310 bp, Artificial sequence
  DNA replication origin
gggagggtttccgcgccgaggagcccacgcgcggtgacagatgcgcggacacacgcacacacggtggcacccacctcgagagagacaatcttggagagaggcagacataggacgcggggagacgcagggacccacggacacgcaagcagggacccagatgcgcacagaaagccccatgctggagtacaccaagacacgcacacacacacacaccacgcacaggtgccagggccatgccagccggatgagagacctgtgcactgatacatacgtcccctcccccgcaacccctacaggcacacgctgagacaggcaccagctggtggtctccaagggaacccgttggcctccagaggactgggatgggggaacgggtgtcccagggccctctgctcctgcgaatgggaaaggaccgagagagctttcgtgattccttttcccagagcctagggctggaactggggtgggctggaattgcctttgtggggggcggtggggtcctgaaggctgcggggggctgaggaagatccatcttcagggtggaaggaagagggggggcctgcactaagcaggtgctattttggaaaagtaccctcccccagctgctaccttcctaacacaggggtggggtccctgggccagacaaagccaaagccattcatttgcctgtaaaaggaagtgccagggtctttgcttagcatgggaatggaggggctgtttcttggctgcaaccgagtcaggtggatggtgcctctccctggagcactgatggggcaggtagcttctggcagagggtgctgcaggcagatcccccttctccaggggccctaggagagccaggagctgaggggggccccaaggaccatctagccaggatggcagacttgagctgcaccctgctgtgacccgagctcttccccacccttggggagcccccctccaatccttgttgcagaggaaggaggaggtctcaacaattctactcccttgactgtggcggagacaacagccattgctcactggggggtcagctgctctgcatggggagaagcatctgagggaagagaaaggtgatgtgtctgatacctgcctcactctgaagttctcattcactcatcattcattcattcacttattgaggagtgcctgtggtatgctgggtagactggggcacagagatcaataagacacggccccgccctaaagaagggtgagaactagtacgtatttgtgccagataatttacattcttcattctgtataaccttcatagaaacccagcaaggtaggttctatccccagttgtctga

SEQ ID NO: 41209 - DNA, 766 bp, Artificial sequence
  DNA replication origin
ccttgaaaaggcgcattcccacccccacccctcaaacgcgcgaggccacgcgttccggcctccgccacctccacatgccggaacaccagtgaggggcgcgcgctcccaaaggtcgggggcggagctaagagcgccgcgcccaaaaaaggcggcaaagtccctgactcgctgagagtttgcgagccgccatgtctatctcattcgtctcctctcctccgacagcacgccgtgcttcccctcaggcacctttcaccgttagggatgagggctccgcggcggttctcggtgtggctctgattcaccgccatcttgcttcgggcctcctgccgccccgtagatggaaaggggcgggacctgcgccgagctgtggggcgcggttctgaaggggagggcggagattatgacgtaaggaggaggaggaggaggagcgagaccgggtcacgtggtggggcagtgcccggggagcggggcggagtcagggtagaggcccccgccgagaaaggggagaaagaggcgggccctgagaattggctcgagcgcgaaggggtgagtgataggtgagtggcctcccgacctcacctgcccccttagccccctgcctttaggtatggacttgggttggtcctgtcaggaatgatctcagctcactgcacctccaacctcccatgctcaagccatcttcccacctcaacctcccatccattactcactttggttatgaaacactagaaaataatgactgaggcccgacctgacgccaactgaa

SEQ ID NO: 41210 - DNA, 1034 bp, Artificial sequence
  DNA replication origin
ccgcctgggctgcaacgtggccgcgggagccgggagaccccgcccgggaggctggagttaacgcccctccccgcccagtattcgccaggcccgggatctccgaggccgcctcgaggtctgccagggcgggaaactgaggcccgagagggcggtgaactgcccgagccacagcactggtcggtgcgggcggcctcgaacccagaggcccccctcggacggtccgcgggcctcggacccagcccaccgtccggaaaactctgtccatctcttcctctctggtccccctctccctgctcggcccactttcccggcagagccaaaccagggatgtctctgggtacctccctagggtgggctcctacacagcccgcgagggccagccaagctttgttggccacccaccgggccaccggggtcggctgatttctgcctctggaaattacccatttctgcttccctggcctgaaacccaccggcagcccccaggctctgcactagtgggtggaggaggaggcctgcggtgaaggtcgcaggaatgcacaaccaaacccaagagactggaacttctggaaggccctggaagccggaggtgtcctcaaacatctgcccatgaacctggctcccgcctcagagcctttgcccttgcagttcctgcagcctagaatggccttccttcccacccccaaccgcagctccactcctcaggacgcctctggacacagatttgagtctctgctcagtggtctcctctgggaccattgtaaagcaacctgccctgcagtctctgtcccatccctggggtgttatttccatcagagcactcactgctagagtaaactttcctatgctcatgcttttattttcttgtttattgcctgtctcccctactaaattttattcagttaatactgtacaccataataaatgtgttagaagataataagtggcatggaaaaacagaggagggtaagggagatgggaaattgtgggagtagggaggttgcaattgcaaatagagtggtcagggtaggcct

SEQ ID NO: 41211 - DNA, 1643 bp, Artificial sequence
  DNA replication origin
gtgacgagtgggcggggccactgccgagacctggcaggagcccaatgggtgaggctggcgcatttcccagctggaatccggtgtcgaagtggggggcggggaccgcacctgtgctgtaagctcagtgtgggtggcgcggggcccgcggggtcttccctgagtgcaaaggcggtcagggtgggcagagacgaggtggggcaaagccctgccccagccaagggagcaaggtggatgcacaaagagtgggccctgtgaccagctggacagagccagggactgcgggagaccagggggagcatagggttggagtgggtggtggatggtggggctaatgccttcatggccacgcgcacgtgcccgtcccacccccaggggtgttcctggcgcgctatgggcccgcgtggcgcgagcagaggcgcttctccgtgtccaccttgcgcaacttgggcctgggcaagaagtcgctggagcagtgggtgaccgaggaggccgcctgcctttgtgccgccttcgccaaccactccggtgggtgatgggcagaagggcacaaagcgggaactgggaaggcgggggacggggaaggcgaccccttacccgcatctcccacccccaggacgcccctttcgccccaacggtctcttggacaaagccgtgagcaacgtgatcgcctccctcacctgcgggcgccgcttcgagtacgacgaccctcgcttcctcaggctgctggacctagctcaggagggactgaaggaggagtcgggctttctgcgcgaggtgcggagcgagagaccgaggagtctctgcagggcgagctcccgagaggtgccggggctggactggggcctcggaagagcaggatttgcatagatgggtttgggaaaggacattccaggagaccccactgtaagaagggcctggaggaggaggggacatctcagacatggtcgtgggagaggtgtgcccgggtcagggggcaccaggagaggccaaggactctgtacctcctatccacgtcagagatttcgattttaggtttctcctctgggcaaggagagagggtggaggctggcacttggggagggacttggtgaggtcagtggtaaggacaggcaggccctgggtctacctggagatggctggggcctgagacttgtccaggtgaacgcagagcacaggagggattgagaccccgttctgtctggtgtaggtgctgaatgctgtccccgtcctcctgcatatcccagcgctggctggcaaggtcctacgcttccaaaaggctttcctgacccagctggatgagctgctaactgagcacaggatgacctgggacccagcccagcccccccgagacctgactgaggccttcctggcagagatggagaaggtgagagtggctgccacggtggggggcaagggtggtgggttgagcgtcccaggaggaatgaggggaggctgggcaaaaggttggaccagtgcatcacccggcgagccgcatctgggctgacaggtgcagaattggaggtcatttgggggctaccccgttctgtcccgagtatgctctcggccctgctcaggccaaggggaaccctgagagcagcttcaatgatgagaacctgcgcatagtggtggctgacctgttctct

SEQ ID NO: 41212 - DNA, 1047 bp, Artificial sequence
  DNA replication origin
tgggtcctcgggcctcactgctcaccggcatggaccatcatctgggaatgggatgctaactggggcctctcggcaattttggtgactcttgcaaggtcatacctgggtgacgcatccaaactgagttcctccatcacagaaggtgtgacccccacccccgccccacgatcaggaggctgggtctcctccttccacctgctcactcctggtagccccgggggtcgtccaaggttcaaataggactaggacctgtagtctggggtgatcctggcttgacaagaggccctgaccctccctctgcagttgcggcgccgcttcggggacgtgttcagcctgcagctggcctggacgccggtggtcgtgctcaatgggctggcggccgtgcgcgaggcgctggtgacccacggcgaggacaccgccgaccgcccgcctgtgcccatcacccagatcctgggtttcgggccgcgttcccaaggcaagcagcggtggggacagagacagatttccgtgggacccgggtgggtgatgaccgtagtccgagctgggcagagagggcgcggggtcgtggacatgaaacaggccagcgagtggggacagcgggccaagaaaccacctgcactagggaggtgtgagcatggggacgagggcggggcttgtgacgagtgggcggggccactgccgagacctggcaggagcccaatgggtgaggctggcgcatttcccagctggaatccggtgtcgaagtggggggcggggaccgcacctgtgctgtaagctcagtgtgggtggcgcggggcccgcggggtcttccctgagtgcaaaggcggtcagggtgggcagagacgaggtggggcaaagccctgccccagccaagggagcaaggtggatgcacaaagagtgggccctgtgaccagctggacagagccagggactgcgggagaccagggggagcatagggttggagtgggtggtggatggtggggctaatgccttcatggccacgcgcacgtgcccgtcccacccccaggggtgttcctggcgcgctat

SEQ ID NO: 41213 - DNA, 1114 bp, Artificial sequence
  DNA replication origin
gagggggtgacttctccgaccaggcccctccaccggcctaccctgggtaagggcctggagcaggaagcaggggcaagaacctctggagcagcccatacccgccctggcctgactctgccactggcagcacagtcaacacagcaggttcactcacagcagagggcaaaggccatcatcagctccctttataagggaagggtcacgcgctcggtgtgctgagagtgtcctgcctggtcctctgtgcctggtggggtgggggtgccaggtgtgtccagaggagcccatttggtagtgaggcaggtatggggctagaagcactggtgcccctggccgtgatagtggccatcttcctgctcctggtggacctgatgcaccggcgccaacgctgggctgcacgctacccaccaggccccctgccactgcccgggctgggcaacctgctgcatgtggacttccagaacacaccatactgcttcgaccaggtgagggaggaggtcctggagggcggcagaggtgctgaggctcccctaccagaagcaaacatggatggtgggtgaaaccacaggctggaccagaagccaggctgagaaggggaagcaggtttgggggacgtcctggagaagggcatttatacatggcatgaaggactggattttccaaaggccaaggaagagtagggcaagggcctggaggtggagctggacttggcagtgggcatgcaagcccattgggcaacatatgttatggagtacaaagtcccttctgctgacaccagaaggaaaggccttgggaatggaagatgagttagtcctgagtgccgtttaaatcacgaaatcgaggatgaagggggtgcagtgacccggttcaaaccttttgcactgtgggtcctcgggcctcactgctcaccggcatggaccatcatctgggaatgggatgctaactggggcctctcggcaattttggtgactcttgcaaggtcatacctgggtgacgcatccaaactgagttcctccatcacagaaggtgtgacccccacccccgccccacgatcaggaggctgggtctcctccttccacctgctcactcctggtagccccgggggtcgtccaaggtt

SEQ ID NO: 41214 - DNA, 1336 bp, Artificial sequence
  DNA replication origin
tggtgcctgtagtcccagctacttgggaggcagggggtccacttgatgtcgagactgcagtgagccatgatcctgccactgcactccggcctgggcaacagagtgagaccctgtctaaagaaaaaaaaaataaagcaacatatcctgaacaaaggatcctccataacgttcccaccagatttctaatcagaaacatggaggccagaaagcagtggaggaggacgaccctcaggcagcccgggaggatgttgtcacaggctggggcaagggccttccggctaccaactgggagctctgggaacagccctgttgcaaacaagaagccatagcccggccagagcccaggaatgtgggctgggctgggagcagcctctggacaggagtggtcccatccaggaaacctccggcatggctgggaagtggggtacttggtgccgggtctgtatgtgtgtgtgactggtgtgtgtgagagagaatgtgtgccctaagtgtcagtgtgagtctgtgtatgtgtgaatattgtctttgtgtgggtgattttctgcgtgtgtaatcgtgtccctgcaagtgtgaacaagtggacaagtgtctgggagtggacaagagatctgtgcaccatcaggtgtgtgcatagcgtctgtgcatgtcaagagtgcaaggtgaagtgaagggaccaggcccatgatgccactcatcatcaggagctctaaggccccaggtaagtgccagtgacagataagggtgctgaaggtcactctggagtgggcaggtgggggtagggaaagggcaaggccatgttctggaggaggggttgtgactacattagggtgtatgagcctagctgggaggtggatggccgggtccactgaaaccctggttatcccagaaggctttgcaggcttcaggagcttggagtggggagagggggtgacttctccgaccaggcccctccaccggcctaccctgggtaagggcctggagcaggaagcaggggcaagaacctctggagcagcccatacccgccctggcctgactctgccactggcagcacagtcaacacagcaggttcactcacagcagagggcaaaggccatcatcagctccctttataagggaagggtcacgcgctcggtgtgctgagagtgtcctgcctggtcctctgtgcctggtggggtgggggtgccaggtgtgtccagaggagcccatttggtagtgaggcaggtatggggctagaagcactggtgcccctggccgtgatagtggccatcttcctgctcctggtggacctgatgcaccggcgccaacgctgggctgcacgctacccaccaggccccct

SEQ ID NO: 41215 - DNA, 1925 bp, Artificial sequence
  DNA replication origin
ccatcatctgggaatgggatgctaactggggcctctcggcaattttggtgactcttgcaaggtcatacctgggtgacgcatccaaactgagttcctccatcacagaaggtgtgacccccacccccgccccacgatcaggaggctgggtctcctccttccacctgctcactcctggtagccccgggggtcgtccaaggttcaaataggactaggacctgtagtctggggtgatcctggcttgacaagaggccctgaccctccctctgcagttgcggcgccgcttcggggacgtgttcagcctgcagctggcctggacgccggtggtcgtgctcaatgggctggcggccgtgcgcgaggcgatggtgacccgcggcgaggacacggccgaccgcccgcctgcgcccatctaccaggtcctgggcttcgggccgcgttcccaaggcaagcggcggtgggggacagagaccgcgtttccgtgggccccgggtggacagtgaccgtagcccaagcagcgccgacagggcgtggggtcctggacgtgaaacagagataaaggccagcgagtgggctgaggacagtgggccaggaaaccacctgcacgggggaggtgcgagtctgtgggctgggagggggcggggctactgcccagacccgccagaagcccggtgggcgaggctgatgcgtcgaagtggcggtggcggggaccgcgcctatgctgcgggctcagtgtgggcgggacgggcgggatcttccttgagtggaaaggtggtcagggtgggcagagacgaggtggggccaaaccccgccccaggcaggggagcaatgtgggtgagcaaagagtgggccctgtgcccagctggaccgggctagggactgcgggagaccttgtggagcgccagggttggagtgggtggcggagggtggggccaaggccttcatggcaacgcccacgtgcccgtcccgcccccaggggtgatcctgtcgcgctatgggcccgcgtggcgcgagcagaggcgcttctccgtgtccaccttgcgcaacttgggcctgggcaagaagtcgctggagcagtgggtgaccgaggaggccgcctgcctttgtgccgccttcgccgaccaagccggtgggtgatgggcagaagggcacaaagcgggaactgggaaggcgggggacggagaaggcaaccccttacccgcatctcccacccccaggacgcccctttcgccccaacggcctcttggacaaagccgtgagcaacgtgatcgcctccctcacctgcgggcgccgcttcgagtacgacgaccctcgcttcctcaggctgctggacctagctcaggagggactgaaggaggagtcgggcttcctgcgcgaggtgcggagcgagagaccgaggagtctctgcagggcgagctcctgagaggtgccggggctggactggggcctccgaagggcaggatttgcatagatgggtttgggaaaggacattccaggagaccccactgtaagaagggcctggaggaggaggggacatctcagacatggtcgtgggagaggtgtgcccgggtcagggggcaccaggagaggccaaggactctgtacccccgtccacgttggagatttcgattttaggtttctcctctgggcaaggagagagagggtggaggctggcacttggggagggacttggtgaggtcagtggtaaggacaggcaggccctgggtcttcctggagatggctggggcctgagactggtccaggtgaacgcagagcacaggagggattgagaccccgttctgtctggtgtaggtgctgaatgctgtccccgtcctcccgcacatcccagcgctggctggcaaggtcctacgcttccaaaaggctttcctgacccagctggatgagctgctaactgagcacaggatgacctg

SEQ ID NO: 41216 - DNA, 1431 bp, Artificial sequence
  DNA replication origin
ggacaagagatctgtgcaccatcaggtgtgtgcatagcgtctgtgcatgtcaagagtgcaaggtgaagtgaagggaccaggcccatgatgccactcatcatcaggagctctaaggccccaggtaagtgccagtgacagataagggtgctgaaggtcactctggagtgggcaggtgggggtagggaaagggcaaggtcatgttctggaggaggggttgtgactacattagggtgtatgagcctagctgggaggtggatggccgggtccactgagaccctggttatcccagaagcctgtgtgggcttggggagcttggagtggggagagggggtgacttctccgaccaggcctttctaccaccctaccctgggtaagggcctggagcaggaagcagcggcaaggacctctggagcagcccatacctgccctggcctgactctgccactggcagcacagtcaacacagcaggttcactcacagcagagggcgaaggccatcatcagctccctttataagggaagggtcacgcgctcggtgtgccgagagtgtcctgcctggtcctctgtgcctggtggggtgggggtgccaggtgtgtccagaggagcccagttggtagtgaggcagccatggggctagaagcactggtgcccctggccatgatagtggccatcttcctgctcctggtggacctgatgcaccggcaccaacgctgggctgcacgctacccgccaggtcccctgccactgcccgggctgggcaaccttgctgcatgtggacttccagaacacaccatactgcttcgaccaggtgagggaggaggtcctggagggcggcagaggtcctgaggatgccccaccaccagcaaacatgggtggtgggttaaaccacaggctggatcagaagccaggctgagaaggggaagcaggtttgggggacgtcctggggaaggacatttatacatggcatgaaggactggattttccaaaggccaaggaagagtagggcaagggcctggaggtggagctggacttggcagtgggcatgcaagcccattgggcaacatatgttatggagtacaaagtcccttctgctgacaccagaaggaaaggccttgggaatggaagatgagttagtcctgagtgccgtttaaatcacgaaatcgaggatgaagggggtgcagtgacccggttcaaaccttttgcactgtgggtcctcgggcctcactgctcaccggcatggaccatcatctgggaatgggatgctaactggggcctctcggcaattttggtgactcttgcaaggtcatacctgggtgacgcatccaaactgagttcctccatcacagaaggtgtgacccccacccccgccccacgatcaggaggctgggtctcctccttccacctgctcactcctggtagccccgggggtcgt

SEQ ID NO: 41217 - DNA, 897 bp, Artificial sequence
  DNA replication origin
gctcggtggtgcctgtagtcccagctacttgggaggcaggaggtccacttgatgttgagattgcagtgagccatgatcctgccactgcactccggcccgggcaacagagtgagaccctgtctaaagaaaaaataaaaataaaaaagcaacatatcctaaataaaggatcctccataatgtttccaccagatttctaatcagaaacatggaggccaggaagcagtggagaatgacgaccctcaggcagccctggaggatgctgtcacaggctggggcaacggccttcaggctaccaactgggagctctgggaacagccctgttgcaaacaggaagtcatggcccggccagagcccagaatgtgggctgagctgggatccatgtgacagctttgaggctcaccgggagcagcctctggacaggagaggtcccatccaggaaacctcgggcatggctgggaagtggggtacttggtgccgggtctgtatgtgtgtgtgactggtgtgtgtgagagagaatgtgtgccctgagtgtcagtgtgagtctgtgtatgtgtgaatattgtctttgtgtgggtgattttctgcatgtgtaatcgtgtccctgcaagtgtgaacaagtggacaagtgtctgggagtggacaagagatctgtgcaccatcaggtgtgtgcatagcgtctgtgcatgtcaagagtgcaaggtgaagtgaagggaccaggcccatgatgccactcatcatcaggagctctaaggccccaggtaagtgccagtgacagataagggtgctgaaggtcactctggagtgggcaggtgggggtagggaaagggcaaggtcatgttctggaggaggggttgtgactacattagggtgtatgagcctagctgggaggtggatggc

SEQ ID NO: 41218 - DNA, 2332 bp, Artificial sequence
  DNA replication origin
ccatcatctgggaatgggatgctaactggggcctctcggcaattttggtgactcttgcaaggtcatacctgggtgacgcatccaaactgagttcctccatcacagaaggtgtgaccccatccccgccccaggatcgggaggctgggtctcctccttccacctgctcactcctggtagccccgagggtcgtctaaggttcaaataggactaggacctgcagtctggggggaccctggcctgatggaggccctgacccaacggaggccctgaccctccctctacagctgcggcaccgctttggggacgtgttcagcctgcagctggcctggatgccggtggtcgtgctcaatgggctggcggccgtgcgtgaggctctggtgacctgcggcgaggacaccgccgaccgcccgcctgcgcccatctaccaggtcctgggcatcgggccgcgctcccaaggcaagcggcggtgggggacagagactgcgtttccgtgggtcctgggtgggcggtgaccgtagcccaagctgggctgagagggcgcggggttgtgggccagtgagtgggttggggacagcgagccaggaaaccacttccattggggaggtgcgagtctgtgggcgggaggaagaggggcttgtgagtgggcggggcaactgccgagacccaccaggaaccgggtgggcggagctggcgcctttcccagctggaagcgggtgtctagaagccgggatggactctgctgtgggctcagtatgggcggggcgggacgggcgggatcttccctgagtggaaaggcagtcagggtcggaagagccaaggtggggccaagacccaagcaaggtgagtgagcaaagagcaggccctgtgcccagctggacagggccagggactgcgggagaccaggaaaagcacagggttggagtgggcggcggagggcggggccaaggcctccatgaccacgcccatgtgtccgtcccgcccccaggggtgtttctggcacactacggacacgcgtggcgcgagcagaggcgcttctccgtgtccaccttgcgcaacttgggcctgggcaagaagtccctggagcggtgggtgaccgaggaggccgcctgcctctgtgccgccttcgccgaccaagccagtgggtgatgggcagaggggcacaaagcgggaactgggaaggtggaggactgggaaggcgacccctgacccgcatctcccgcccccaggacgcccctttcaccccaacggcctcctgaacaaagcggcgagcaacgtgatcgcctccctcacctgcgggtgccgcttcgagtacgacgaccctcgcttcctcaggctactggacctagctcagaagggattgaaggaggagctgggctttctgtgagagatgtggagcgagggaccgcagggtctctgcagggcgagctcctgagaggtgccgggactgcagccggacctccaaggagcagggtttgcatagagtggtttgggaaaggacattccagaagagctcactgctagaggaagggccttgaggaggaggagacatctcagatacggtcgtgggagaggtgtgcccgggtcagggggcaccaagaaaggccaaggaccctgtgcctcctgtccacattggagattttgatttttaggtttctcctctggcagcccagggcaaggagagagggtggaggctggcacttggggagggacttggggaggtgagtggtggggacaggtaggccctgggtcttccctggaggcagctggggcctgagactggtccaggtgaacgcagagcacaggagggattgagaccccgttctgtgtcagctgtagatgctgaatgttgtccccctcctcctgcgcatcccagggctggctggcaaggtcctacgctcccaaaaggctttcctgacccagctggatgagctgctgaccgagcacagaatgatctgggacccagcctagccaccccgagacctgactgaggccttcctggcagagaaggagaaggtgagagtggctgacacggtagggaccaggggtggtgggttgagcgtccgggaggaatgaggcaggcaaaaggtgggtccattggatcacttggcaagtggcacctgggctgacaggtgcagaatgtggaggtcatttgggggctttcccgttctgtcccctgagtaccctctcagccctgctcaggccaaggggaaccctgagagcagcttcaatgatgagaacctgcgcatggtggtggctgacctgttctttgccgggatggtgaccacctcgatcacgctggcctggggcctcctgctcatgatcctacgcccgg

SEQ ID NO: 41219 - DNA, 1220 bp, Artificial sequence
  DNA replication origin
actagagcgagcaggggcaaggacctctgcagcagcccatacccgccctggcctgaccctgcacccactggcagcacagtcaacacagcaggttggctcacagcagaaggcaaaggccatcatcagctccctttataagggaacggtcatgcactgggtgtgctgagagtgtcctgcctggtcctctgtgcctggtggggtggaggtgccaggtgtgtccagaggagcccaatgggcagtgaggcagccatggggctggatgcactggtgcccctggcagtgacagtggccatcttcctgctcctggtggacctgatgcagcagcaccaacgctggactgcacgctacccgccaggccccctgccactgcccgggctgggcaacttgctgcatgtggacttccagaacatatacaccttcaaccaggtgagggaggaggtcctgaggatcccccaccaccagcaaacatgggtggtgggtggagccacagtctggacaagaagccaggctgagaaggggaagcagatttgagggacttcctgggggagggcatttatgcatggcatgaaagatgggattttccaaaggccaaggaagagtagggcaagggcctggaggtggagctggacttggcagtgggcgtgcaagcccattgggcagcatatgttaggagcacaaagtcccctctgctgacaccagaaggaaaggccttgggaatggaagacgagtcagggtcctgtgtgccgtttaaatcaggaaatcaggctgtgcgtggtggctcacgcctataatcccagcacttaaggaagccaaggtgggcggatcacctgaggtcaggggttccagatgagtctggccaacatggcaaaaaccggtctctactaaacatacaaaaaatgagctgggcacagtggtgcacgcctgcaatcccagctacttgggaggctgaggcaggagaattgcttgaacttaggaggcagaggttgtagtgagtggagattgtgccattgccttgcaacctcggtgacacagccagacaatgtctaaataaacgaataagaaatcaggccgggcgcggtggctcacgcctgtaatcccggccctttgggaggctaaggcgggcggatcatgaggttaggagatcgagaccatcctggctaacacaatgaaacccgtctctactaaagatacaaaccaattagccaggcgaggtggtgggc

SEQ ID NO: 41220 - DNA, 1473 bp, Artificial sequence
  DNA replication origin
ggtaaccgcctcccgggcctgaggggcagggagagggttgggcctgaaggactggggccgggccggggtgtccggcctcgggggctgggagcagaggtcccggccggacccaacctgggagtgcggagcctcctggactccgagtcagggcttggggtgctgaggggagtgttgctgcccggcccgacccaagagtgcgggcaggggcccgggccaggcctggcatcagagggctaaggtgtcttgggccggcccggggttccggcggggcttgggtgccggtgctggcccgagggtgcggagggaaggtctacctgctggtcgcgcgaggccttgggtgcaaaggcggcgggtgtgagcgggcggcgtccgggagtcagcgccgcctgcttcggggcccctggcagccccgggggcaccggccgcgctcgcctcttggctacgggctggaggcgaggccagcggggctgggccgggatgtgggcgggagggcgccgcgctggggcgcccaggagagcaggggcccgtttactgccatgtgaacacctgaagccatgtggacgcggctgcttctcgcctgttgggggcggagggcaggtaccggcgggttgggcgcaaggtcccggcgcaggacacacttcctgtgtggggcggcctctcctcccgcgccgcggggaacagggcggggtgtgcaagccggggtctctgggcgagggagcgctcgtttggggacctgaggctttcgtccctttttcgggggaaagtggtggtttgaaggagcgtggccaatcgggccgatccctctcaggctacggcgggaggtgcactgtcctctggacgccggaatgggagtggaatttagtgagttggggggcggtgccgaggagcggccgtcttcctctgcttgtgggtgggattattgtctgtttttgtggttgcggataccaatacggtctgctggtctgtattcaatcctttagtttgaccttaggggtcaggtcaaaattaggatttcccccttttcctttttgcttttttttcctcgaagattagatgtctctggtaactgctgtaaaatggatggaattttcgagctattatctaacaggctgatctttgaatgataattggacccttatgttaacagcctcagtgaagagtgaagagttttatacagcatcttccgtggggtggcagttaggtggatggggaagctacactgaattccgacctgggagaccaggaatctgcttacagctttgacgccaaataaactgcagcccagggcaagttactttccctggtaattttctcatctgttaagtgaggactcccgggtcagacggtacaggggtttgtggttttgcttttttatctctcattttgtgctctgttttagccataggcaacttttctgagaaatgcagactgtaccttagctggcttttaaaagcctgtctttaagcttccagc

SEQ ID NO: 41221 - DNA, 1930 bp, Artificial sequence
  DNA replication origin
gggcggggcgctgggggcggggccgggcgcgcgcgtgcccacccgcgtgcggcggcgtcgaggctggcgcgcgccgggtagggatcgcgaagacccccacctcgcggcagggtcgcacggggttctcctctgcggccgctgggcgccgcgcgccacccgcccagtgccatcttggcctgcgcctcagggccgtcttgggggtggacgcgagccaactttctgggggagttggtggcccggaatctctctgggatttctggagttccctggagcctccaactccagaatcgcgcctcttgcggcccgggaggtccgcgggcgaggacccggtctcctctcggtgacctgtttagtggggtcgggcgtgggggcggctcctgcccgccaagagccctctgggccgggggcagcccaagacctagctggtcccgcctgggtccctggcagcccccgcccatgggttccaggtgtccgtggaggaacgacttgggtcctctcagagcctcagtttccaccgcggaaaacgcgaggagggaggcccacctacctcacctgtaaaacggacgctccagctgccttctgctgcggcattaagaagctgcaatgccaggctgactgcgcccagggtcccgaattaatttgccgataaggcggaggatttgcggtgccaaggcctcagcttgttcccagccttcctttgcaaacctgatgtttctaaagcaaaggaagggcttgacttctttataaagaaaatcgcaattgtagagcaactaatatgtagatgttggtgcccccacggccatcaaaagtgacaaggccagcaagagtaggatgcgttgagaatttgtgatcctgcccctgacctttgacctggccaaattctcctcccactttgggcctcagtttcctgtgggtgaggagagtttggattagatgtccctaatgttggctaaaattgccgattctaaattaggctcccatctgtcctagatgttaggggagtatgtggcttcctctcctgaagcaacccaacttaaaagttgggattggaaaagtgcttccggcagcaggtggggattgtcaggaaccaggtgtggtctggaacccagatttccatatatttgaggtacacagcttcccggggcctgcttttactttttgacctttcaccccacctagccattgccttttctcaggctacccaaggagggtctcagggtcccaggcagagccccaggtggtcctgggccccttggcaggagcatgtacttggggaaggcagtgatttctcctggcttctgtccaatctcacaaagtgggggctggctccaaagcaggtcaggactattcctggggacttgattccccaacacctcctgcatgccaggctcttccggggcagagctgaacaagccacggggccctgccctctgattattcccattgttcttctgagtttcattttcaaattctcaggcctcaagacttttaaaagaccagtacctggcttctcctgggatcagggctgtaaagggaaagctggaagaggcactcagcacaaatcaatgttttctggacaaaaataggagaatgcagggcctcctgaagactggtgttgggggcacccttaatttcttgagagaattcatgaagaaagatgaatcctttttccttagagtcccctgccccatcattcttccattctttcccttcttcataacctcacttgcgtctcagatgcagggcccgggggatgctgacaatctgtcgcagagcctcattcaaaagggaaagaataaagaatgcagacagataactggagtccaggcgcctgtcagctcctgcctcttataaccatgcagccccctccccgccctttcagaccctgccagaacattgccccaatgccctccacctggaaacttcccca

SEQ ID NO: 41222 - DNA, 1524 bp, Artificial sequence
  DNA replication origin
gagacagacaggccggcgaggcaggaggagccggccccctcctcccaggcatggcagcccctcctcagctcaccccggaggaggcctgggcagctctcccaacccccaggcgctgtcccagctctccggcctccctcccaggtctctgcccccagccagggtcaccgttccatcattctcttagcctgggcagcctgaggtctctgaaggctacttctgcccgcagctgcttcccaagcgtgaccagagaccgagaacctgggaccgaggctgggatggggctttgcagaacgaaggccagggctgggcgctcccccggctacagtgctggcctggctggcctggaggttggcaaacagctctgcagccaggggctgttagcacagcctcctggaccttgactcctctgacgggcccatgagggcaagggagcttgagcctgccctgggccaggaagcggccatggtacaagtctctgggctgccacagggctcaggcaggtgcagtgacatgggcgcaggtggtcagtgtgtttacagcaggcctccagagagggcatggtggagtgagttttaccagggccaggccgtagctcaggccctagcagagactgtgagttctaagctgagaagccagggcaggaaccatctacaggcagaaggtcaggggaaggctgtggctctccttccagtctcccttcccctggagctggtccctaacctgacgtcaccacctcctcttttctggtcaagtcttctggtctcaattcacttcctccaggaagccttccctgtccttctctcaggtggacttgggtcctgtgcctggcccaccttctttgccctctcacagtcctgaccacacagacgtgggtctgtctccctgttaggcctttgggtgcagagcctgggtgaccatccttggttacagggacacttaaggcctcccctctgcactcctggcacctgcccagagctgggcatagaggagccctgttcctagagctcagaggaacacacccagactcagaccccccaggaagtgggaccaccaggatggaacagctgccctctccccatgtcctagacggtgtgatgggctcacttcctttgggcaaactcaccccaaggggttttttccccacagaaatcttttccctgagtacccctgtgaggtctgacagggaaatcaagagaggcttcacagaggaggtggcatttgaaggccttgaagagtgagtaggagtttgccgtgctaaggcaggagagggtgtaccatcagagggaagtgcaagaacagcgcatccaaggtgtaagaggcgggttgcactctgtggctgaagccgttggaagggaagagtggggagaggcggcgacagtggaagtggggcccttgtttcactggctgggggagccacttgtggaggaagggagaacctgacctgatgacagactgggcggtgccacatggacaccgcagtcattgcaaactcgccttctttggacccgttttcaggatcttgca

SEQ ID NO: 41223 - DNA, 888 bp, Artificial sequence
  DNA replication origin
aaaggtaacggtgtgcgcggtgcctctcccgcggtcgtgaaagtttgctctggcgtgcgaggcgtgcccgccgggtgctccgccgcgccgcgctgccctggcccgaggctccccgggggcgggcaggggccgcgccgggccagggcagggctgggcaggggcctcccgggcggcctttactgccttgtccccatcaaaggccgcagctgctcgagtggcggctgtagctttgaaactgccataaagagcgatggagggcggggaggcgggggatgttcagagcagtgcccaggagggtggccgggagaggaggggcccgagggggctgctcggggagcgcggcagcagcaggggcgtgaagggcagggccccgggtcacagtcccaggggccgagtgcccgcccccgtcccctccggtccagatccagccgcgcccccgtcccctccggtccagatccagccgccgtgcgcagccagcccgggtgtgagggtgcagagcggcggggggttggggctggctgctccctctccccccctccactatttccaggcatgttcttccacctccagcaggccatttgtcagtggtgatgcgggacaaaggaggggcagtgggtggtctgctgcgagttgggcgatgggcacggagcgagggccgagagaaacgccaacaatgaagaggcagatcgagggctttgctcattcaggctgtcgagggagccgtcattttgtgttagcgtgtgtgtgtctgaggtgggaggaggaagagagcggagaatgacaggagaaggattatgacattgtgttgtctctgtttgtggtaaatgcaaatttggcaccagtggtttcccgggaaaaggagcagcaagtaacccaggccgaggccct

SEQ ID NO: 41224 - DNA, 1245 bp, Artificial sequence
  DNA replication origin
tggattctgtaccatgttaggtcctaaatgcagacgcagcccttggtaggggcagggactggtgcgctgctcggagggggtcccaaggaccgaggcgggaatactagctccaggattagggaagggccaggaggaatggaagtactttatagtcggtgggagctgccttgtgtccttgcctgtaaccctgacatcctagatatgggaaggatgaaatgagataaccaggacctggcgcttagtaggccctcaccaggtgccaggcacagaagctcagtggcaggcgtgtgccaagtttggggcagccagtggtcagcagcccagctgccccgtggcaccagggaagaggggaagggccctgccgtggagtaggcagagcagggcctggaggggccctgggccaggggcctcaggctgaagcgagcatggccgagtgaagtgcatggcctctcactggagggcagaggctggaacactggacagggaagtccccaccaggccaaggatggcttgaacagctacggagtaggcggctcaggtcaaggatctggccacggcccagagtccaggcactggacacttgggtctctgttgtgtcccaatgcttcctgggccttggtttccccatcttgacacggggcgttggtgcttacctctcaggcattgccatggggtaggaagggggtgtgaagcgcctgtgctgggcttgcaggtagtaggtgctcagcccctcggaacggacgctgctgttgtacacagagaaacagagccaggaccccaggccaggcctcctcttgctgtggcctccctgagatgggacttgggacaaaaggtggtcgggactgccatgccctgccctttccaagcccacctttgtagggggcagccagggctcactccagtggcccatgaaggctttagccctggagctgcccagctagcccttcaggctctgggccactttgctggcctcacatcccagctcaccttcctgctctgcagcctcagagatgcccttccctttctgagccttgccaggtaaaatgcagccctctctggtcctcgtgacgaccacctaaggtgctgggtgcaaatccccagcacacagtaggtgctctatgaacggtcacacttgcctttaccccacagtctccaagcacagcagtgagctgcgattctcacctgtggtgggcgttggccccttttaagccatttactctggggccaattataaatagacacata

SEQ ID NO: 41225 - DNA, 1331 bp, Artificial sequence
  DNA replication origin
ggctttctgcgaggcggggagctggcagcggcgcgcacagcggctccgtctccggcttagccatgcgctcagcttgaggcgggggtggcgaggccgcagcagccactcagtccacgctgcctgcggtgccccctcgcagaggcaggaggtttttcccatgttcagatgggctcaccaagcctcaccagatctgggagattgctcagtggggagggggaggcaaggaggctcagccaatgccagcctttgctggaccatgaagggagcagaggtctccgagcccccaggagcacccctgccctccacggctgccagtgcctccctcctgaggggcttttcctgccctccagctttgagagcatctgagggccaggcctgcatgaggatggagatggggtgggggagggccagatctggggtgggaggtccagggatctcccagccacgggggaggcaggtggcacactgatgatgacacccatccaggggccactgtcaggccaggggtgtggagaccagggaaggcagtctggggaggccagggtctggaaggacgaatgggaggtggctgggaaagtggtcccccatcctggaacagcacagtgcatttccaggaacagcaccttcatccatccatttgtcctgtagatgttgacttagcagctgttcgggagataacacagcaggttctggtggggtgagccaggtgtccagggccaggggtctggtctcccctggggactgggagagacttggtcagatgtgcagtttagagagacccatggagtggcaagtgtggagtgtttgggaggcagtcataggaggaccaagaaggatgctgggggttaaggggtgggatggccccatgtttctggccccaggtggatggcagtgccatgccctgaggggggcagggagctggtcctcattaataggaagtagtcaatcactgcctagtatgaattaggggattgggccagctcttgaactgattcttaccagcagccttgggggccaggaggcagtgctggagctggagcgtgggtctgacatttgctcaggttgtgtttgcagtgctgtacgactgcatggggaggggctccagggggttatttagttcaggtcctgctttctctctcccatgggcgaccagggagagggtctgctgtgtgctcaaacaccccacaggctgtgcattccctgggcatctctgagcctatttcctggtttggaaagagcacaagctgtagagacaaacccccaagagtacggggcccctggtagaaactggggccaggttaagctggaggtcacgggactccagtcttcag

SEQ ID NO: 41226 - DNA, 946 bp, Artificial sequence
  DNA replication origin
cccccagcccccagcgggaatgcaggagcagagccctcctctgagggtgctgccttgggccagtcacttggcctctccgagcctcagtttccaccttggtgagatgggggtatttttctttgcccatgtaccaggtagtgagtgggtaatgaggtgacactggggaagggcctaggtgggcttggtgggccagacatagtgggaggaaaaggagattttccgtcatctgtgtttaaatcgaagctccgtcacccagcgccgcccctccttccccaccacacacataaacacgcactctagggagacttgagaacttgcagtaaatttctgggcgaggtgaaatattgccaccttcagtgtggtgatttccacgctagggctcttggctgaacctccgacattcaagctgggagtgctctgtggctaaatgagataatttattcatttcagcaaatgttgagggtgtgccgagtgagggcgggcggggaaggtggggtgagtcagacgtggccaagcacacagagcgctcagtctgcaggggaggcagacggatagtgttgccagtgctctttgggggatttggggtgtctgggaagagtgttgaggacatgggaccattgaagatgccttacggccatgccagagtccacttggcagcaaaggggtaaggaagggcattccaggaagagaaaagcagtgggcacagacgggaaaagacgcctggcacttggggaaagggcgacgcttggctggagtgaagtggtggagatgagaccagaaagttctgccagtgtcagcttcagaggggctggaggccaaagagtttgactgtgatccaggaggtggtgggagctatcgatggcccttgagcagggaagtgatgtgttcggatcctggcttcagcaagaaaaggtgggccagcagggcgcagtggctcacgcgtgta

SEQ ID NO: 41227 - DNA, 1570 bp, Artificial sequence
  DNA replication origin
gagtttcactctcgttgcccaggctggagtgcaatggtgcgatctcagctcactgcaacctctgcctcccaggttcaagtgattctcctgcctcagcctcccgagtagcttgggttataggcacctgccaccacgactggctgattttgtatttttagtagaaacggggtttctccatgttggtcaggctggtctcaaactcccaacctcaggtggcccacctcagcctcccaaagtgttgagattacaggcgtgagccaccacgcccagcccacctggctgttttctttggcctcttgttcagaggccaaagcccccactggataacccactccagaacccaagcccggaagggtctgagcctcgtggaagggtgggtgggatggcagggtggcagtggcagccaggggcagccagggccagcatggaggggccattcagacagcagcgactggattctgaggacattgcagcaggaatgccctcagaggtcattagcatcacagggaagggggcacctgtcagctgagggaacaggaggacggtggaagagatgggagtgctactctcggtcatccaggggtggtctctaggaggaggtggcagctgacccgagccatgcagggctccaaagtgagagctttcaggaggggatatagcaaatgcaaaggctggaagcaggaagtgcacataggagggaggagaagcgggaagcaggcttggagagcaggaaccagactctggccatggatagctgaatgcacccacaccttcttcccagaggcagaaatgcaggaaaagccgagaagcctctgcttcctcatctgtaaaacggggatgacaactgtacctactttccaaggctgtgaggattaaatgggagagtgagctgttgcggtggtcgcggtggtggtagtggtgatggaggttatggtggtggtggtggtggtggtgatggaggttatggtggtggaggtggtggtggtgatggaggttatggtggtggtggtggtgatggaggttatggtggtggtggtgatggtggtggtggaggttatggtggtggaggtggtggcggaggttatggtggtggtggtggtgatggaggttatggtggtggtggtggtggtgatggaggttatggtggtggtggtggtggtgatggaggttatggtggtggtggtggtggtggttatggtggtggtggtggtggtggtgatagaggttatggtgatggtggtggtgatggaggttatggtggtggtggtggaggttatggtggaggtggtgatgatggtggtgatggtggtggccattattattggaaggggaagggaacaaaggaaagagggtgtgggagggaggagagacgaataaaccagtgagggtaaaaggtaaacattaattaatttcactaggcctgataagacttgagagaaatggaaactgggagacaaacagaagtagtgatagaagaaaataacctccaccattccagaaaataatctccaccatctgagaaaataatctccaccattccagaaaataatctccaccatctgagaaaata

SEQ ID NO: 41228 - DNA, 862 bp, Artificial sequence
  DNA replication origin
aggaaggtggggaatgggaagctgatgccaggctgtgaatgcaagggtgagcagggatgggagctgaaggtactgaagactgggggagggacaggcaggagggggaggtatgggcttgggcaggtcagaggaggtgccagggagaggataagggggagaggagtggcagggagggcatgatggcagcgtgggtttgggaatcagtgacaggaggcaccccagtgtcagggctagaccacaggggccttggacatgaggcagcagcatctggagggcccaggagcccctgatgtggtcagatctgactgcgccatggagaccaggactccatgcactcattcagtgaacagatgtgtggagtgctgtgtgccaggcccgagggcacagcagtgactcttcacgcacagccactgtgttgtgcaactcccaggctgatggggagacagacagtgagcaaggaagaagatacgtggctatgggaagcagttctgtgctgtgtggtgatgatcagggtggggtgcacatgtggataccgctggccagggtcctctggagaggtctctgcaagaggaaatgtttgagttgaggcctgaagagcgaggagtaccagtcgtgagggaggtcagggggaagagcaccctagtcaggggcccgtgcaaaggccctgtggcaggtctgagtttgtctgggtgtggggcagaaaggaggccattgtggctggagtatggtggataggtgtgtgtgtggagggggtttaggggccagactgtgccatgtgggccagtagggccaggagatgcctgggattttattctaaaggtggcgggcaccctttagagggtctcagtagcaggtttggagg

SEQ ID NO: 41229 - DNA, 1182 bp, Artificial sequence
  DNA replication origin
gttccccgggaggacatcaggggtgggctagatggggcaagggaggctggagacacccgagacaggacagggagggaccctctgcctgagcacccaccattaccgtcccagcgaatccaggtgggtaaggacctgggcccctgaactcaaaggcagagggtcaatcctcggcttctcaatcaagggcatcctgctcacaggcagaagacccccaaggaagcaggaggcttctgacacctgctccttgtcagcctcaaggggattccgagagccctgtaagggacccttccgcttctgccagcctccccagtgttcattcctcaaagacctgtgagctggccacacaggggctggccctgtgctggaccctggggacacaccaacccgggccccagctctcccagtctggatcagcggggtgggcggggggggcaagatggaagcgtcctaccacattgagagcaataatggaaggatttgccaggagctgggggcacccatggaaaaaggccttcacttcacccacctgagaaggagatgggagtctgggaggaccacagggaggaggggatgtagctgggccttgaggatgagcagttcaggaggctggaagacttgggggaggggatgtgtggggaagagaccatctcaggcagggaagacccagtgcttagggggtctaagaccagggtacatccacttccctggggtgaggccagagaggtgggcaggggagacggctcagaggagaggtccagcctcgaaaagtggctcaggaggttggcctagtttaggtttgtggacagctgaagagtttggaagctcagagctgcatttaaaatgatagctttggcaatggcgtcccaatggacagtcatggatggggaggaggggccggtacgtccagggcagatggggaatgggggagaaacgacgggagggctgactggatggacaggcaggtaggaaggccacaggcctggagtctccagggtgggtactgggtggaagtgatgccacagtcctggggtaggataaagactgggacctgatgctaagcttgtgagccggggaaggccccaaagcccagggctgagagaggccaggacccaaatgttggcccgggttcaaaactctgagcagcactagactacctcctggaggtagttcatctcattgggc

SEQ ID NO: 41230 - DNA, 1259 bp, Artificial sequence
  DNA replication origin
cagaggagaggtccagcctcgaaaagtggctcaggaggttggcctagtttaggtttgtggacagctgaagagtttggaagctcagagctgcatttaaaatgatagctttggcaatggcgtcccaatggacagtcatggatggggaggaggggccggtacgtccagggcagatggggaatgggggagaaacgacgggagggctgactggatggacaggcaggtaggaaggccacaggcctggagtctccagggtgggtactgggtggaagtgatgccacagtcctggggtaggataaagactgggacctgatgctaagcttgtgagccggggaaggccccaaagcccagggctgagagaggccaggacccaaatgttggcccgggttcaaaactctgagcagcactagactacctcctggaggtagttcatctcattgggcagaggtgaagccagggggctgtccccttgccagacactaggagaggaggcaggggcctgccaagggccgggtgtgtggctaggcagccccaccatgctggacagagccctcgggtcagaagcaggtggacaaggctgcccccatctcacccagttccagagcccgaccctacttccgcattaaattggtgctcccagaatcccagctgaatggatgaccctccctctaggccctggaccctccccatttcctccccctccttcagggctacctaccaggtctcatctaatcccctcgggcaccgtgggggtgtctccttttccctaggctggacacccaaggccagggagctaaggggccttgtttaaaacctttcagcttctaggcgctagtcaggagggaaccagggtccaactgaccccaaagcacacactcttaaggaaaggaggaaaaagagcaaggctgaaataaaaaacgcaagcgcttacagtggctgcattatggtggtgggacaatggatgatttttttttcttcttttctacaatgaaatattcatagcctcactctgtcgctgtgagtgtcctggaggggtgagctcccactgtagagtcaagcggccccaggggcaaatcccggctggccacttgctagccggggaccttgagcgagccatttgcccactcttagcctccgttttctcatctgtacaatggggacaaacaccccctacttcagaggaacggtcaccgctggcgcacagcaggcgcgcgataagtgccagcctttgagcctcacacccccgcgtcctcgccacctgt

SEQ ID NO: 41231 - DNA, 2280 bp, Artificial sequence
  DNA replication origin
gcggccggaaccagcgcgccccgcccctgccccgaccacgccccgcccgccccggtccggcccctccccagaccacgccccgctgcagccagcttcgcccgcccagagccccgtggccagcggccggccgcggggcctttttgtcctgagggccagagaaagggagaagggggtggggggacagccacgtggccgcaggaggatttacaacattttctttcgccatcgatgttatcgcaaaatgtgtgagagaagcggctgcgcagcccggacgggagcgtgagggtgcgggccaggtaagcagccccggcggtttcgccgcatacgggactgcggggcgaccgcgggcaccagccacgcgcagcggctccgcggggtctcggccgggtccgcgctctgaaggatctcgagagccatggatggtgcaggcgggaccctcgagctgcagcatctccggtgacccggggttgccgaggaggtggagaccagcacaggtggtccggcccgggcgcctccgaatccgggggtggtcaagacggatccccaaggctgaggtcggcagtcccggggactcgcagctgttgagcctgtggagacgcggccccgtgaccgaggcacccttcagcaacccgggggcaggtgagaccgtgtagacttgcgcttgcggttgaaccgcgagcaggtgtagacgcgggcgggttctggacgcggaaagtttgccagagcgcgctgagcgggctggcggggaggaagggtctgggcgtaggcggagccgcgcctccgaggggccaggcgcacatctggggcggggacgggacccacctgtcgggtctcagccgcatcccagggcggaagctccttgggcgaactccaaactccagcctcagcggctggaattcgggtgccccccttcctcgggagctggagaaactgcagctgaggcgggagagggatttggggcgacagagcgagaccaaagggggctcattttgagacttttagacgggatcatcaagcgctcactctgtccctggctccggggaagcctggggagtctccacctcacttgtgaggaagctgagggacgaagaggccaatttggcacccgtcccacgctcgtaatcagacccagggactcaaaccccatttgtcctggctcctcttcttccacctccgcctcagtgaggagaaagggtgctagccatgggggtagtgcaggtgagacctggggctgggatgcagggaagccctggattgagaccttcggatctgctgggggtggatcccactccctctctgtagctccaggtggccccgcagcactgggtgagagaatgaacgcaggagggaagctggtggcagagtactgggcagggggtgctagtgcccacctgctttgtgtccggggtgctgtgcctggagcgcttcgggtggggcagcgtatttatgcgacactctctcctctagggtaagaaagacaccctaccacagtctctgccacaggggaagggcagaagggtttcccttggctggaggagatacccgcatttctagggaggttcttagggaggcacagcctcatctcccatcaccttctgtccctttgcccccgttcctactcccacatcctcctgtcctgggatttcccctactacaaagccttttgcacatgttgtttattcttttgatcagcaaatagttacaaataggcagtgtagaccaccacaggtggtccggcacacctactaagtgccgggcatgcgcaattcagcagtgactaagacaggcccggcctctgccctcatagggcttccagaccagggcagggatatagatgaacaacagacagtcaagaaggggaccagggtatggggaggggaggcgaccttaggaggatatcagagagggactctgcaaggatgacagtgagtcagagcaattaacactcctcatcctttgggccccagcacaaatgtcacctcctccaggaagcctgccctgacctccctgacttgatgattccactatgatggactctcatagcatgggaccaccccctccatggacacttttatgccattaattggtcaatgtttagctccccctgtcgattgtaagtgccatgagggcaggacccaaatcttttctgggtggatggtaggcaaagcaaataaaagatgggtaggatttccccagaaaaacaggagtggctcagcaaggtcaggcatccagatggcagaaacttttctttccccttccctggcccgagtcctgggctcc

SEQ ID NO: 41232 - DNA, 1164 bp, Artificial sequence
  DNA replication origin
tcggcaaccccgggtcaccggagatgctgcagctcgagggtcccgcctgcaccatccatggctctcgagatccttcagagcgcggacccggccgagaccccgcggagccgctgcgcgtggctggtgcccgcggtcgccccgcagtcccgtatgcggcgaaaccgccggggctgcttacctggcccgcaccctcacgctcccgtccgggctgcgcagccgcttctctcacacattttgcgataacatcgatggcgaaagaaaatgttgtaaatcctcctgcggccacgtggctgtccccccacccccttctccctttctctggccctcaggacaaaaaggccccgcggccggccgctggccacggggctctgggcgggcgaagctggctgcagcggggcgtggtctggggaggggccggaccggggcgggcggggcgtggtcggggcaggggcggggcgcgctggttccggccgccctccccgcggaaaccgggcctgagactagggctcctgttccagctcttgattggtcggtcggccagcactgctgacgtctgattggctgagacaaagaagggactaaggccgtaggggtgggggtttgtggatttcattctttgccttttcgctccggcggtggccgctgctctttcggaccttcctgaactctgcggccttttcctctctgcttccgtggtccctatcataacgctacctgcatttccttgtccttctctaccaaacagcacctggagatagggacatggggttcgtgctgctcaccactgtctccccagggcctagcacacagtacgtgctcaaaacggttagttgaatgaattcgtggaaaatatgcatacaggtgtttagagctatctttaatgttggcaacatccctaggagatattactattctctcccgaggatgaggaaaccgaggtgcagcgaaattcggtcacgtggggatgaatggctgagctgatgctgggacatgcttacattactggatctcggatcctctacacagtgatgccctgtgcagtgtcagagctcagtttcccgtctatcaagagtgttgtgttagagcacaagataggttagaagatgggttattactgccaggtcctgtggctcacgcctataattctagcactttgggaggcca

SEQ ID NO: 41233 - DNA, 1282 bp, Artificial sequence
  DNA replication origin
ggagcagctgcggggctgagaacaggggaggctgcggaggtggccaccaattagcagctgctgagtgaggccttgacaagtcctgacccgctgggtgcatttatatgcagggtatgacctgcatcaccaggctgtgaaatgcagggtgcagccttggcaacaggacaccctttgagctcctgaaccatcccctcctggccctcccttaggtatgcctgctgggagattgcacaggccttggaatgggccacttgtggggctggggctgggctgggctgggggttgggggctggggtctgggagggtgctgggctgtggctgggctgggtgttgggggctggggggctgggctgggctgggctgggggctgggctgggctgcggctgtttgtctgggatccaggccccccaggccctttgcctcctgctgcccagtgggcaatggtgctgaccccagtgatcatccaactggcagaggtgtgaagtcaatgctgaggccttctccaggcaggctgaggccagagctgaagttagtgtccctgggcctggacctagtctgagagtcctgggcattgggggtgatgggtgagatctgggggtgttgttcgggaaggaacacactccgtggagaagcaattcagctctagaccaggcagtggaaatggggagcccctgaaggctttcctcaccatgcatcagagtcgtgtgttagaaaggtccctccggcagcagctcagagcaggaacgggagcaggagggcctggaggctgagagtaagatcgaggatgctgggccaggctgggctgggacagagccgccgggtgggtgggggttctgagtactgctgctgaatgaggacgcagatcacatcctgacgcctcacatttgctactgagtgtccccacttccctgtgctgggccccgtggaaacccggacaccctgggaggtaagaacaggcttctgcccatcatatagtaggtgacccctgagcacttactgtgtgctgggtgccaggaggctctagattgacaataatcacagtaaaaggtagccatgaaggcactggagagactcaaagaaggaagatagggaggttgggatgggacaggaaagggaagagggggcaattttgaaagggaagtcaggaaaatgctgcactgaaaggtcccatgagggtagagagctgaaagaatgagggagcgggctgggtgtggtggctcacccctgtaatcccagcactttgggaggctgaggagggcaggtcacctgaggtcaggagttc

SEQ ID NO: 41234 - DNA, 753 bp, Artificial sequence
  DNA replication origin
tttgcttctttctacactgctccctgggtctggagggtatcctctcacttgcccacctggtgacatccaaactctctgtcaaggtcaaactcataggctcttctgtagtaccccctctggccccttccccaccctgaacaaacccagttcccctccctctcccccaaggtgttcatctgtgatcccgagcacacaggcgctcagaggcatgtggggcatgactgagctcgcctgaggcacgtgaggctgtgggcagagccaaggaacaagcatccaactttaagaggcaggctgtgtgagaaaagccagggacagtgcagagagagtacgcgggctcaggaaggctgggcgtggaggggaagaggagggaaggtcaaagagagagggtctgcagggtcatggtcaaggccagaagcctcaggacccaccagcatctttgctgacctccttggtggcagcggagccagccagctgaaagcatcctgtggcgggcaggaggcggcagacagggagggaaggagggagctggcagggtggaggaagtggaagggtaaggaggggaggacagagggaaggatggaggcctggagaggttgtgtgcctggagggcgagggatcttgtgggaggtagagatttaagagaagtcaggataaaagtgagctagccaagttgtccaggggaaggagttagtgtgttaacagccagaagcatatatattttaaaaggaggccgagagcaagagtgcaacagat

SEQ ID NO: 41235 - DNA, 930 bp, Artificial sequence
  DNA replication origin
cagaatagtggcagccacacacacaccctctgctcacgggagactgaggctctggtctcacagaacctgagaactgtgggtgaggaagcatgaatagcctcaggggaggctaattgcttccttaattagctgaacccgcgctggggagccctgcccggaaagtcccagttgctgggaaggatgggactggcttgcctggcggccaataaccgtttccgctggcggctgcccccgaggagactgtgcggcgtttccagcagaaacagcacgaggggaaagggccgggccaccgcggtgcccaggaagggatttaaagaggcaagctgaggtcctgcagccgccacgccctgcaccctgtaccgacagccctccgccggcacactcttggttctgcctgcaccggacccccccggaacccccactgccctatcccactgccgctcaagccctatcttgatcttgctaggcggtggcctcagggcagcccaggacccctagagggggaagaagggtcacggagaggaaatctcaggtgagggcgttcccatgtctaccaccaggtggcaccatcagcacaggccaaccctggggccgtcctgcgtggccaggaggggaagtgggtggcaccgttagtgggggacttggtggctctggcgtctgttgtctgagggcctcctggttctgtgctcgtctctttcagggacatggttgtgtcaagggcccgagcctcccagaaccttggcacatggtggacgtggaataaatgttgaaaattgtggccgggtatggtaggtcacacctgtaatcccagcactttgggagaccgaggcgggcagatcacttgaggccaggagttcgagaccagcctggccaacatggtaaaaccccgtctctactaaaaaatacaaacatagccgggtgtggtggtgg

SEQ ID NO: 41236 - DNA, 1049 bp, Artificial sequence
  DNA replication origin
ggccctcgggatgggtcctgccagggcgcagagatggcggtggaaaggcggggcgaaggcggggcgtgaggcgtggaggtgtggcctgactggggcggggcggggcggggcggaacagcctagaagcagggcctggaactgcaggatacactcccctcctgctacctaggcaggcgtgagggtgtgacggccgcgcattcgccagacgagagcgatggctgagaacgccgcaccaggtcgccttagactcaccaggtcgccttagacttagatgggacggggaggcctcgcgcgagcgccccattgcccacccacctggttgggactgtggaggagggcggatggagtggagggttcaccgaccgcgtcgcccttctgggtgtcgcagctccttcctcggcagtcccggggcgtgagagcgcgaccggccgggagttgggggacccgggacacggccgcacgtggcctcccagggttctaggagaccctgagttagccgggcgtgcgcgtgggtgtcgggggcgcgcaggtctccagccttgcagagacggaggaggctgccagctgtggggggcggcggtgggtcctggagtcccaccgcctgccctaaatttccactccgcccctgtcgcccagtgtgaccttgggcatgtactgcagctcccagtgcctcagtttcctgctctgtggagggagagtgacagtgctcccacctgctgcgtgtgtgagggtttggcacccctctggcctttgtgaaaggcttaggaaacgggctgtttctttactccggttttacaggaaaggaaactgaggctcaagacgttttagtaacttctccaaggttacccagccagcaagtgatggggtccaggcctgaccagcgcccccgccccagcacattctagaaggttctgccccagtttaaatggggtgcatgctctgaggcctgtcacagctttttccggcttagcttctctgtccctcctctgggagtctccactcccatgtctgactctctccccataaccttctggggcagctaagggtct

SEQ ID NO: 41237 - DNA, 1165 bp, Artificial sequence
  DNA replication origin
aaattgacaatcattatgtattatgtcacctatgtaatttctttttttttttttttcttgagatggagtctcgctctgtcgcccaggctgcagtgcagtggtgctctctcggctcacggcaacctctgcctcccattcaagcgattctcctgcctcagcctcctgagtagctgggattacaggcgtgagccaccgtgcccggcccttgttttccttttgaaacagggtctcactgtcacccaaactggagtgcagtggcatgatcatggctgtctgcagcctcgacctcctggggctaagcactcctcccaactaaggctgctgagtagctgggaccacaggcgtgtgccaccacgaccagctaatttttttttttttttttttttaaatacagggtctcgctatctcgctcaggctggtctctaactcctgggctcaagctatcttcccacctcagcttcccaatgtgctgggattacaggtgtgagccactgcgcctggcctgtgtcccgtgtttcgattgcatgtttacagcggcagggtgtgtgtgtgtgggtgtgtgtgcgcgtgcgtgtggtggggcagtggggggcttctcctccttcagacaacaaatatgtgtggagctctgacctaccaggcccactgccagatgcaggaggcacaaagatgaccaaatcagccatagtgggggttgcggagttcacatgcctcgggaaacagaggaatcaataggctcttattggacagtgtggttacctgcagggcagggacagcttgcctgggggtgtcagggcagggttcccagctgaggccccaaggagtggggaagccagtgagcaagcacaggggagaattccaggtaagggagcccaggctggagtcccagaggggagagaaggcgtggaagcagcatgtgcttgggagagaggcgggtgcgtgagaggtgtggggagggtattggaagtaaggggcatggctggagcaggggcagagggaaagagagaacgtccctgaagaccctgggaagcctggtgctcagcgtgaccccagggagaaacaggcttgttgggtgagagggagaaagaagcttctccacgtctcacgggatgtcctcccctggaccccaccagctccccgtccacaccgggcacccacctctgca

SEQ ID NO: 41238 - DNA, 1710 bp, Artificial sequence
  DNA replication origin
ttcaacgtgtgaatgcatgagtggaaagctgagttcgcactcgtgactggccggggtcaactctgacattcgctcccactttcgcgcgctgatttatctctgagcggatgaaggttgggccatggcgggcggggccggggaggcgggcttggagtgagggggcggggcaggcgccacgaaaacgcgctcgcgccggcgccgaaccgcaactcccggcggcccccgcgctcccgggtggcaagatggtggcgcgcaggaggaagtgcgccgcgcgggacccggaggaccgtatccccagcccactgggctacgcaggtgaggggctccgggacgcgagaccgggggcggtcaggcatcgccgggaggtgtttgggggttggcgacggccgggggtccccaggagcggccgcacggttgggtgtgagccccggtggcccgtggccccaggctccgcaggtcttgaggctccggggtcccgaggacccaggcggcgcccttctgcctgctcactctcccggggcgagcccaacttggtccacgcttcccttgggtgagcccgcctctgtccacactctcacccaggacaaacccatttccgtccacacccgctcgtccaggtgagcccatccccttctcatcgcctctgctcctagtccatcccccatcagctcttacctgggctgttataggccctcctactcggttgccctccttctcctcttgcccctgcttctgttctccacccacgtgccagaatgttcttttaaggacatttagattcgatcatgtctgccgcgcccacgataggcgccacacctactgcattccctccagtggctttatcaggtagcttctaaaacaaaaaccagacttcttaacctgtgtgggccacgtggtctggctggtgccgacctaaagctctttctgttcctctgagggaacatgctttttcccccctctgggtttttgcacgtgctgtgccggtttgttgcacagtggcgttctggcctgagctttaatgttgcttcctcaaagaggccatccgtgatggcctatggaaagaagacctctgccaccccatcaccctgtaatgtttctttcacaattgatacaagtttgctgtatgcttgttaattgtcttctccgttattgcaactgagcttcctgagttcagggaccgcagctctacgccaaccggtactgtgacggaggtgtgagaaaaatagaagcagttcctagctttatgaggattacagtcatgggtgtgccagcgattaaccaaagaatctcatcaatatagcctccagactgttaagagaagctgtgaaggcacaggcagtgggatctgagctggcaggaggggcggaggtgatgctaaggctctcctgaggaagcgaggtttgagctaaacctgaggtgagcgggagggaagagggtgacacgccaggtagagaggccagcatgtgtgaggccctggtgtacccgggggaacagagaatccaaggtgctgggggaagatggtacgagaagaggtcacagtgacaggcagggtctcacggggcttccagccatggttaggattttggcgttgactccaagagccgcagggttcgagcttccctctcattgcgcccccatctgtaatcattgcccatttatcttctctctccctgcaccgccttgggaggccctcctgggcagactcttaga

SEQ ID NO: 41239 - DNA, 974 bp, Artificial sequence
  DNA replication origin
gctcacccaagggaagcgtggaccaagttgggctcgccccgggagagtgagcaggcagaagggcgccgcctgggtcctcgggaccccggagcctcaagacctgcggagcctggggccacgggccaccggggctcacacccaaccgtgcggccgctcctggggacccccggccgtcgccaacccccaaacacctcccggcgatgcctgaccgcccccggtctcgcgtcccggagcccctcacctgcgtagcccagtgggctggggatacggtcctccgggtcccgcgcggcgcacttcctcctgcgcgccaccatcttgccacccgggagcgcgggggccgccgggagttgcggttcggcgccggcgcgagcgcgttttcgtggcgcctgccccgccccctcactccaagcccgcctccccggccccgcccgccatggcccaaccttcatccgctcagagataaatcagcgcgcgaaagtgggagcgaatgtcagagttgaccccggccagtcacgagtgcgaactcagctttccactcatgcattcacacgttgaataggcagtgtgagagaaatccaggatggctgctaggttttcagtctgagcaactaagaggatggtgttgccattgactgagatgggaagactgcaggagaggggcctgcttgggggtgaaaatggagtagatcagttctctgtgagccgtggtgagatgcccattaggccactcaggggacatgtcaggtgggcacttagatatgagactgaacagactgaacatcagagatgtcaggcctggagcaatacacacgggactggccatggataggttattgacagttacgagaggagccgggtgcggtgattcatgcctgtaatcccagcaatttgggaggccgaggggggcggatcacttgaggtcaggagttccagaccagcctggccaacatggtgaaaccccgtgtctactaggt

SEQ ID NO: 41240 - DNA, 805 bp, Artificial sequence
  DNA replication origin
agagagaggggctccagagaaggctttccatgctggggcaggaatccacctccctccagcaggcggtgagaagcagcggagactcccacacagggaagtaagatcggagctacagctgagctccaggggggtgctggtggcatggcacaaagtgatttctcttgtcttcttggggtgacgacgagctagccagcccagggggtgggaggtggggagggtcacaggaatgaaagtgaagagaggcaggtggggaaaggctgaggtgtgataacaggatgtgagtgtgaagatgaggatgggggcgggggggggcggtggaagtgggggactgaggccgcgaatctgctggacagagggggtgggtgcctctgtgttgaaggggctggtagagccacagcaggttgagatggaggtcaggtccccacccctgagtcaggctggagcctggcgcccaggcataaatttggtgtcatcagtgaagagggtctgccaatgggtcctcagggcagaagaggaaagagaccaacccacctcataggggtcatgtcctcaatgcctctgttactccaggatctttgaccccttgtataacttgtaaaagggtccaggcccatagaaagccaaactgtttactgagctgatggactgtaccgtgcatggacctttctagaagcagttttgtcatctcccagcccctagcctccccagggccccaccactcagaataagggccaagctcctcggccccacatgcaaggcctgttgtaacctaatgccacaccaagctccagtccatcatccgccc

SEQ ID NO: 41241 - DNA, 1451 bp, Artificial sequence
  DNA replication origin
tggtctcgatctcctgaccttgtgatccgcccaccttggcctcccaaaatgctgggattacaggcgtgagccaccgcgcccggcctgtacaacaattattaagactggcttgtgccaggctctgctgagaatcccaggacacggtggggacacggtggacgcaggctgtccgtcaagggggctagtaagccactaaacaaagggtagccttcagccctgcggcgcgggccagcgagcattcagaggcccaactcgctgtggttgctccccgggtctggtcccgcgcggacgtgggggcggccatcaggactgcccgggggttggcgccctgctgggttccaagccggtgggcgcggacagtgtggcgggaaggccgggcctggcgggtgggggcgcggcctggcggtgggggtggaccttcctggggtggagcccgcggctgtgggagcagggcccgccggggctcgggcagggcggtgggaaggcggggccttctgagtgggggcggggactgctggagttgcggggcctgcctggggtagggcggggcaggacagcttggagatagggcccggaattgcgggcgtcactctgctcctgcgacctagccaggcgtgagggagtgacagcagcgcattcgcgggacgagagcgatgagtgagaacgccgcaccaggtctgacggggaggccttgtgcgagcgtcccactgcccacccacctggttgggacagtagaagagggcgggatggagtggagggttcgccgaccgcgtcgccctcctgggtgtcgcagctccttcctcggcagtcccggggcatgagagcgcgaccggccaggagttgggggacccgggacacggccgcacgtggcctcccagggttccaggagcccctgagttagccgagcgtgcgcgtgggtgtcgggggtgcgcaagtctccagccttgcagagacggaggaggctgccagatgtgggggcggtgggggttcctggagtcccaccgcctgccctaaatttccactccgcccttgtcgcccagtgtgaccttgggcatgtactgcagctcccagtgcctcagtttcctgctctgtggagggagagtgacagtggtcccacctgctgcgtgtatgagggtttggcacccctctggcctttgggaaaggcttaggaaacgggctgtttctttactccggttttacaggaaaggaaacaggctcaagacgttttagtaacttctccaaggttacccagccagcaagtgatggggtccaggcctgaccagcgcccccgccccagcacattctagaaggttctgccccagtttaaatggggtgcatgctctgaggcctgtcacagctttttccggcttaacttctctgtccctcctctgggagtctccactcccatgtctgactctctccccataaccttctggggcagctaagggtct

SEQ ID NO: 41242 - DNA, 1028 bp, Artificial sequence
  DNA replication origin
aggaaacaggctcaagacgttttagtaacttctccaaggttacccagccagcaagtgatggggtccaggcctgaccagcgcccccgccccagcacattctagaaggttctgccccagtttaaatggggtgcatgctctgaggcctgtcacagctttttccggcttaacttctctgtccctcctctgggagtctccactcccatgtctgactctctccccataaccttctggggcagctaagggtctgagtccctctggacatgagcccctggctcaagcacatcaggcagagataaggggctcagggagcaccagcttcatgggtgaatgaatgaaggaatgaaagacccggctgtgtctttcaggtctgatctcagagctgaagctggctgtgccctggggccacatcgcagccaaagcctggggctccctgcagggccctccagttctctgcctgcacggctggctggacaatgccagctccttcgacagactcatccctcttctcccgcaaggtgtgaggctggggctgaagggaaggccagggggaaagtgggcaggaaggtgaggggggaggtctgcaggggaatgaggagggcggggagacagctggcatagacacctcttcctaccctccaacccgcttctctctgtttcagacttttattacgttgccatggatttcggaggtcatgggctctcgtcccattacagcccaggtgtcccatattacctccagacttttgtgagtgagatccgaagagttgtggcaggtaagaaacagagtgtgtattttcggcggtgtggggggtgctctagggcaccccctcttatcactggaggcggggtaggatccaggaagcagcgctggcctgagagtggggcctgggctctggccccaggtctgccagcaattcacgggagatcttgggaaagttgaagagttcgcttcctccagtgggtcccccaagctagtgtcctgggtggacaccccagatgctgggaagggatttcctgagcctggggac

SEQ ID NO: 41243 - DNA, 891 bp, Artificial sequence
  DNA replication origin
tggcatgatcatggctgtctgcagcctcgacctcctggggctaagcactcctcccaactaaggctgctgagtagctgggaccacaggcgtgtgccaccacgaccagctaatttttttttttttttttttttttttttaaatacagggtctcgctatctcgctcaggctggtctctaactcctgggctcaagctatcttcccacctcagcttcccaatgtgctgggattacaggtgtgagccactgcgcctggcctgtgtcccgtgtttcgattgcatgtttacagcggcagggtgtgtgtgtgtgggtgtgtgtgcgcgtgcgtgtggtggggcagtggggggcttctcctccttcagacaacaaatatgtgtggagctctgacctaccaggcccactgccagatgcaggaggcacaaagatgaccaaatcagccatagtgggggttgcggagttcacatgcctcgggaaacagaggaatcaataggctcttattggacagtgtggttacctgcagggcagggacagcttgcctgggggtgtcagggcagggttcccagctgaggccccaaggagtggggaagccagtgagcaagcacaggggagaattccaggtaagggagcccaggctggagtcccagaggggagagaaggcgtggaagcagcatgtgcttgggagagaggcgggtgcgtgagaggtgtggggagggtattggaagtaaggggcatggctggagcaggggcagagggaaagagagaacgtccctgaagaccctgggaagcctggtgctcagcgtgaccccagggagaaacaggcttgttgggtgagagggagaaagaagcttctccacgtctcacgggatgtcctcccctggaccccaccagctccccg

SEQ ID NO: 41244 - DNA, 1806 bp, Artificial sequence
  DNA replication origin
ctattcaacgtgtgaatgcatgagtggaaagctgagttcgcactcgtgactggccggggtcgactctgacattcactcccactttggcgcgctgatttgcctctgagcggatgaaggttgagccatggcgggcggggccggggaggcgggcttggagcgagggggcggggcaggcgccacaaaaacgcgctcgcgccggcgccgaaccgcaactcccggcgacccccgcgctcccgggtggcaagatggtggcgcgcaggacgaagctcgcggcgcgggacccggaggacggtatcccgagcccaccgtgctacgcaggtgaggggatccggaacgcgagaccgggggcggccagcatcgccgggaggtgtttgggggctggcggcggccgggggtccccaggagcggccgcacggttgggtgtgagccccggtggcccgtggccccaggctccgcaggtcttgaggctccggggtcccgaggacccacgcggcgcccttctgcctgctcactctcccggggcgagcccaacttggtccacgcttcccttgggtgagcccgcctctgtccacactctcacccaggacaaacccatttccgtccacacctgcttgtccaggtgagctcatccccttctcatcgcctctgctcctagtccatcccccatcagctcttacctgggctgttataggccctcctactcggttgccctccttctcctcttgcccctgcttctgttctccacccacgtgccagaatgttcttttaaggacatttagattcgatcatgtctgccgcgcccacgataggcgccacacctactgcattccctccagtggctttatcaggtagcttctaaaacaaaaaccagacttcttaacctgtgtgggccacgtggtctggctggtgccgacctaaagctctttctgttcctctgagggaacatgctttttcccccctctgggtttttgcacgtgctgtgccggtttgttgcacagtggcgttctggcctgagctttaatgttgcttcctcaaagaggccatccgtgatggcctatggaaggaagacctctgccaccccatcaccctgtaatgtttccttcacgattgatacaagtttgctgtatgcttacttgttaattgtcttctccgttattgcaactgagcttcctgagttcagggaccgcagctctatgccaaccggtactgtgacggaggtgtgagaaaaatagaagcagttcctagctttatgaggattacagtcatgggtgtgccagcgattaaccaaagaatctcatcaatatagcccccagactgttaagagaagctgtgaaggcacaggcagtgggatctgagctggcaggaggggcggaggtgatgctaaggctctcctgaggaagcgaggtttgagctaaacctgaggtgagcgggagggaagagggtgacacgccaggtagagaggccagcatgtgtgaggccctggtgtacccgggggaacagagaatccaaggtgctgggggaagatggtacaagaagaggtcacagtgacaggcagggtctcacggggcttccagccatggttaggattttggcgttgactccaagagccgcagggttcgagcttccctctcattgcgcccccatctgtaatcattgcccatttatcttctctctccctgcaccgccttgggaggccctcctgggcagactcttagagcccgcacaggctttgccaaagagtagggtaaggggggttggtgaagggatggatggatcgatgaacagataggactagacagggatgtg

SEQ ID NO: 41245 - DNA, 1100 bp, Artificial sequence
  DNA replication origin
tgtgcatcatcacttgcagctaatttttttttgggggggggggtaaggttatagattaacagcatcccaaggcagaagaatttttcttagtacagaacaaaatgaagtctcccacgtctacttctttctacacagacacagtaacaatctgatctctcttttccccacatttcccccttttctattcgacaaaaccgccatcgtcttcatggcccgttctcaatgagctgttgggtacacctcccagacggggtggcggccgggcagaggggctcctcacttcccagacggggtggtggctgggtggaggcgccccccacctcccgaacagggcggctggctgtgcgggggctgccccccacctccctcccagacggggcggctgccgggcggagacgctcctcacttcccagacggggcggctgctgggcggaggggctcctcacttcccagacggggtggccgggcagagaagctcctcacctcccagacggggtggcggtcgggcagagacactcctcagttcccagatggggtcgcggccgggcagaggcgctcctcacatcccagacggggcagcggggcagaggctctccccacatctcagacgatggacggccgggccgagacgctcctcacttcctagatgggatggcggccgggaagaggcgctcctcacttcccagactggacggccgggcagaggggctcctcacatcccagacgatgggcggccaggcagagacgctcctcacttcccagacggggtggcagccgggcagaggctgcaatctcggcactttgggaggccaaggcaggcggctgggaggtggaggttgtagcgagccgagatcactccactgcattccagcctgggcaacgagcactgattgagcgagactccgtctgcaatcccggcacctcgggaggccgaggcaggcagatcacttgcggtcgggagctggagaccagcccggccaacacagcgaaaccccgtctccaccaaaaaatacaaaaaccagtcaggcatggcggtgcgcgcctgcaatcccaggcactcggcaggctgaggcaggagaatcaggcagggaggctgcagt

SEQ ID NO: 41246 - DNA, 1211 bp, Artificial sequence
  DNA replication origin
gtctccctttgtcacccaggctggagtggcatgatctcagctcactacaacctccacctctcgggttcaagcgattctcctgcctcagcctcccgagtagctgggactaaaagtgcccaccaccacacccagctagtttttgtatttttttttttttttttttgagacggagtctcgctctgtcgcccaggctggagtgcagtggcgggatctcggctcactgcaagctccgcctcccgggttcacgccattctcctgcctcagcctcccaagtagctgggactacaggcgcccgccactacgcccggctaattttttgtatttttagtagagacggggtttcaccgttttagccgggatggtctcgatctcctgacctcgtgatccgcccgcctcggcctcccaaagtgctgggattacaggcgtgagccactgcgcccggctccagcatttatttctgatgtatctttgtggtagaaaatttggaaagtgcagagaagtatacacaggaagaaaaattcccaacccccagaggcaaaccagctgaaaccacgcaaccccagtcaccccaatgcaccgcgaggctgctgcctcctgtcagggtcagatgagcctcgaggctcaggaaagtcagaggatgccatctgcatggtggtaaattacagaggtgatgaggcaaggtgggtgtggggctgttcttaaaacggggcagcaggaaggccccaaggagatggatttgggctgggacgggaagagagagctggccatgctggggtgggtgggtgttcaaatggtggaaacagcagacgcaaaggccctgccgttggaaccagcttgtggaataaactttcagaaacagatcgaagaagataggtggctggaaggggcagcaacgatgaggctggagagggaggcggggctaggctggtgctccggagacttgctgggtggccctaggagcacagtgaggccagtgtggctggaggggagtggggaagaagaggggacggggcaggttcacaggaaggagggcccaagaccaacctaggggactaggagagccctgtctcctctcacttcgcattttccattctgtctctggccacctcactacctacagtggcaggaaaaggaatctcagacccaaaatggccttcacactgtggcgggggactgctagcaatggacacgcgttaggtttcatcctcatt

SEQ ID NO: 41247 - DNA, 685 bp, Artificial sequence
  DNA replication origin
caaggagctggtgattcccgtattcaggcacccttgggctacgcggagggtgggtgcagttccccagccctgggaacagaggagtcacgtctgtggctgcctcctggggagagtccaccccgcccttgcccagcctgggagctcagtagcgatttgttagtgggcagccctttctgggtggcagcgctctttggcccctggtttctttgagttccctgaggtcagggacactgcacactgacctaaggagccccttctgtccctgtgtgacctgcaaacgctgggcagcagcctgtgatgtgatcagaggtggaacgggggtggggggcggggagtcgggtgggggattcagggggagatccctgatagcccctggagggtccaggaagctttcctggaagggatgacgctggactgagttctgtagggctctgtgacagccgggtgggggtgggggagccgcaggccagccaggaggatgggtgtgggcaaggcccgagggggccaggttgggtggggagtggtgtctgtacttcctggtttctggaggtacaacctgaatgagatcccagaacgcaaaaagacttgccggagggctgagggtgcaaatcctgagccttctcacggggccattgcttattgtatgtgttacacccgctcccgggctgaccccctggagtatctt

SEQ ID NO: 41248 - DNA, 1773 bp, Artificial sequence
  DNA replication origin
ccccagttcccagtctccatccccggcagaagcaggcggagcgacccggtccccgcccccgcgcccgccccgccccgcgcgcccgcctggcccctcggccccgcccctgctccggagtgacgcgggcccgggcgcgacggtctcggcggcggcggcggcggcgacagagcgagcgcggcgcggggccaccatgggggcccagctcagcacggtaggcggggagggggcgccggggccgcggggcgtcgcgagggactgggacccggcggcgagggggcgggctggcctgcgggaggtgacgcgggacccgggccgcacccggccgcacccacttcgcccgcccagcccgccgcgccccaccccaccccacaagggcctgggcgagctacgtggtgaccgctacttacgccctggcagtctgcagcggggacccagccctcctgcccggggggcgcgccagagcccagcacccgggggcacctgggccctgccctggccgccgtggggccttggctgctggagggacccgtggttgtgagcgtgtgtgccgctgagtgtgagtgtgtgagcgagcgtgtgaatggcttgagagtgaatgtgtgtgtgagtgtgaccgtgggtgtgaagggcgggcatggaaacgtgtgatggggtgtgtgtgtgtgtacgggagtatgtgaatgggcgatgtcactgactgcgactgaacgtgtgtgtgtgtgcgatgtcactatgtcagagggttttgcacgtttagcaacaaggaacagaacccggatgacacgggggcatcctcccaatgctcagtgggccaggctcccatcaaggccaggctcccactgaccctgcaagctgtgctggggacctcacactttgcggtgtcagtgctgtttgccccatttcacagatggggaaatgcaaactagtcttggccaccgtcccacaacgctgccgccggaaggagcctgctccatggggtttcaaagtccactctgctgctgtcactcctgggctggcctagagccaccttcccttccccccaggccacctcctctccccagtttctcaaaagttgaccatggtgaggctggaggcttgagtctgtgtggacatgtggaggctgcggctgcagagggcagctctcctgtcaactgtgacccgctaggcgtggggaggctggcacaggaggaatcagcccagtgctcctccacctccacctctacctctatgcctggcatctgccacttggagggcacctgggtcctccctccttggggaggacctggagtctcctccttggggatccaggcaaaaggcctcttggcttgggtggttgctaaggaaagtgtggcccaacccagaacttcgggatgttcagaccccaggcaaccttggccagggtgaacctgtgggcatcaccccaacctccatgcaacacccggcccatttttccccagaaagcatctgcctcctttattgttgaaatgtcctgcctgtgtctctaaagcttcccctggtctccacccaacccttccctgctgtttttggtggtgttccataccttccagctggtggttggatttatggccacgtcccctgcacctggctgctccatacatttcttttttcttttttcttttttgagaagagtctctcacccagacagtagtgcagtggcgcgatcatagctcactgcagcctcaacctcttgggcacaagtgatccttctacctcagtgtcctgagtacaggcacgtgccaatatgcctggcta

SEQ ID NO: 41249 - DNA, 1218 bp, Artificial sequence
  DNA replication origin
cacatctgggtccaagaccctaccaggagagcaaggcaagagaatgacgctaaggcccagcatgagcctacacagagaaggtgcccactgtctgtcaaattcatccattcaacaagtatttaggctgctcatcgtggctcacgcttataatcccagcactttgggaggccaaggtgggaggatggcttgaacccaggagttccggaccagcctgggcaacatagtgaaacccgtctctacaaaaaaatgcaaaaatggccgggcgcggtagttcccacctgtaatcccggcactttgggaagccgaggcaggtggatcacctgaggtcggaagttcgagaccagcctcaccaacatgttgaaacaccgtctctactaaaaatacaaaattaggccgggcgcggtggctcacgcctgtaatcccagcactttgggaggccgaggcgggcggatcacgaggtcaggagatcgagaccatcctcgctaacacggtgaaaccccgtccctactgaaaatacaaaaaattagccgggcgcggtggggtgcctgtagtgccagctactcgggaggctgagaatggcgtgaaccctggaggcggagcttgcattgagccgaaatggcgccactgcattccagcctgggggacagggcgagactctgtctcaaaaaaaaaaaaaaaaaaaaaaaaaaaaagattagctggttagccagatgtggtggcacatgcctgtaatttcgggaggctgaggcaggaggatctgttgaaccctggaggcggagtttgcggtgagccgagatcgcgtcaatgcataccagcctgggcaacaagagcgaaactgcgtctcaaaaaaaaaaacaattagccggacgtggtggcatgtgcccagctactcaggaggttgaggcaggaggaacacttgagcctgggaggttgaggctaaagtgagctgtgatcaggctcctgcattccagtctgggcaagagtgagaccctgctttaccaaaaaaaaaaaaaaaaaaaaaggtatttattgagcacctactatatgctaggctctgtgtggctaggctctggggatgtacgggacttcaaaccagatagggccttgccctccgggagcgcacagtccactgggatggggtgggagtgggggaaacacgcaggaggccttcagctaagtgggacaaagatcactccacagtgggacaatggcgtgggg

SEQ ID NO: 41250 - DNA, 1388 bp, Artificial sequence
  DNA replication origin
tcggacccagcccgtgcccaccttgggtcccggcagcctgggaggggtgcgcctcttggggctcatcccccacaacctccacgctctggaggtgttcaggttccttcgagtccgtgtccccgagccccgcgccgctacggggagccctgcagacgcctcggtggggaagagaggccgctgtcccgggataggtgctgccccttgggctgcggggctccgcggagagcggccgagagagcgggagcccgggccgggcgggccggggtggacggtcgtgggggctgccggggaggcccgggagcgggaggaggtgacggtcggagacgggtgattcttgtgagggcacgcggagccggggcgggatgggggccctaccttgtccaggcgccctctggatccgggtctgcctcgaggcggcggaagccccacggggcgctgggcggcgccctcccctgccttgccctcgtggggttactccccgcagagctcccagctggccccccaggactcgtgggggtgaggggagggggatgtgaagctcccgaatggaggccgagagggcagcggggcaggggatgctcaggagttcaagtccagcctgggcaacatggcagggcccatcccagggtgtccagggcaaaaacagttcccgctcatgggctcagagaggtcacgcctgcccctgccgaggacagagcctgtcacaaagaaaacggcacgctctggaagtttcttccatccctttccacctcctccttcaaaacagagtctgcgtccttttggccgggctcggtggctcacgcctgtaatcccagcactttgggaggctggggcaggcagatcacgaggtcaagagatcgagaccatcctggccaacatggtgaaaccctggctctactaaaactacaaaaattaactgggcgtggtggcgcatgcctgtagtcccagctacttgggaggctgaggcaggagaatcgcttgaaccctgaaggcggaggttgcagtcgacagagatcatgccactgcacttcagccaggtgacagagcgagactctgagactccgtctcaaaaaacaaaacaaaacaaaacaaaacaaaagaaagacaggagctcctccccttctataattacaaacttttaacagttttccctcaggttatcatttttatttcatgagaaagttctggctaatgagaacccaaaacccaaaggaggtgttgatttcaggcacagtgccaggtgcctctaatccagccaggagctaggggctgctctgggagctgctgggtgaggaaggggtgttgggggtctacgcgtttaaatccctattaatgccaggcgcagtggctcatgcctgtaatcccagcactctgggaggccaaggtgg

SEQ ID NO: 41251 - DNA, 1225 bp, Artificial sequence
  DNA replication origin
cgctgtccgccgcccgccgccgctggagctagaggtacgaggggccgcgccgatgttgcgggggacgggggctccagggggatcctgcggctcgcagtggggaggaggcgcctcgggaaggcaggggcaggggcggaggggctgggccgccgccctagcccgggccacctgttctggaggcgacatttgtgcgcgcacgaaccccgcgcggcggtcccggccaccgcctccaccccaactgcgccccgaagtggagcgcggcggcgggacccggagccccggccctcgcgggcaggacgcgcctggctccggagccctcgagggcagccccacccggttgggtcccggggctggagagagggcgtcggggagaagccgggttcgaggcaggctctgcccggccaccgtgggtgagtcgcgctcctccgtccgggggaagcctgggcgtcgggcggtgctcgccccggagcggatgcgaccggggacggggatggagagcggccggcaggagggggctctgccgggctggcagcgtcggcgccggccttagggagggtgaggatttggacctgcccagaagcgggaagggccctccccgtgcgggaaacggcctgggtacgagctgggcacggggcgagccggttggagtcgcccggcctccgcgctcgcctcggatccgcaggcgcccctccctcctctccagctggggaaggttgaggactgagcgggagcggaactgggcttgggagaggatctgccggggcacctggtcccagcgcccatcccgtttcactgccagggcgagtccccttccctcagtttcatcacctgtcatccggagggacaagttcccacctggatagtctcggctgagcctctggccctgagtgggttaaagcgccatttcccctgcacccacctttccctcacgacaccctctctgcggcttcctcccctccgccaacgtcgagtgattgttccgcgaaggccccttggggtcacgtaccctgcactcagcaaataaccccgagcacctggtgggtctcaggccaggtctggccttcccgttcccgccaccagctgcccaaagacttcccctttgtcacctcctcccaaagaatgagggagccaccctgcccagggtcccatagcagagtgcggatggagccaggcctccctcaagatttcccacagccctcttccagcctcaaaccttctccaggac

SEQ ID NO: 41252 - DNA, 1438 bp, Artificial sequence
  DNA replication origin
tcacatctgtaatcaccacactgtgggaggctgaggcgggtgaatcacttgaggtcaggagttcaagaccagcctggccaacatggtgaaaccctgtctctactaaaaatacaaaaattagccatggttgtgcatgcctgtagtcccagctactcaggaggctgaggcaggagaatcacttgaaaccaggagacagaggtttcagtgagccgagatggtgtcactgcactccagcctaggtaacagagtgagtctcttctcaaaaaaaaaaaaaaaaaaaaaaaaaaatgagtattaccagtggagaaagggtccgcattcattctttttttttttttttttttttttttttttgagacagagtctggctcttgtcacccaggctggagtgcagtggcatgatctaggctcactgcaacctccacctcctgggttcaagtgagcatgtccagctaatttttgtattttgtagagatggagtttcaccatgttggccaggctggtcttgaacttctgatctcaggtgacctgcttgctttggcctcccaaagtgctgggattacaggcgtgagtgcttgcctggcctcttgtttccgttttaagatgggagaagtaacagcctgtgatgggaatgacccagggagaatggagagagggcagggtttcgggatcagtgttggcgtgaagggtcgggatcttctggagggggtggtcgtggccaggagctggacgggttcagcccggtcccaagagggaagggactgggtgctacctcagcgggtgggtgggggagctggtgggaattttctactgattccttcattcgaagtgtatttattgggcacccattgagtgccaggctctttctcagggctaggatagaggttccattttctcagtggcttgggcactgggtcatcagctgagtgagaggatgggcgtcagcactcaagaagtcacccaatggtttcattttttgcagtctttgttgtcccagaggagtaagaactaaaagcaccaggactgtgacatgctggaaacatggcatgttccaaagagaataaaatacagttttatgatacacgaattgtgtgtgatacattccaatttctcacattgaacaaattaccaatagcaatatgtgtgaagatggggcgaggtgagagtgaggaggaggagtagagaaaggacggggcggcgttaaggatacagcaaataactggaattccgcaaacactggggtgatgcaggcaatgcccttagcacggtcccggcaggaggcggtgggatcaggccgacccgggtcccaggggtgacagcgtcccttctccactgcagaatatcgaggtactcaaccctctgaacctcagttttctcatcagttcaatggggaaaacgggatggtaacccgtaatactggcggcgcggaggccgggga

SEQ ID NO: 41253 - DNA, 1693 bp, Artificial sequence
  DNA replication origin
gcaggagaatcacttgaacctgggaggcacaggttgcagtgagccgagtttgtgccactgcactccagcctgggtgacagagtgagactccataaaaaaaaaaaaaaaaaacaactctgtgaggcccacactgtaaggaagcacagaagtagcaaaggctttgctgagtattgggaacctaccctgggcaacaagctcagacctgcctgggaaggagctgtgcccagcaatgatgcaatgatgaaatgatgctttttttttttttgaaaggcatgtgccaccatgcctggctaattttgtatttttagtagagacgtggtttcaccatgttggccaggctggtctcgaactcctaacctcaagtgatccacctgcctcggcctcccaaaatgctgttattacaggcatgagccaccgcgcccaaccagtgatgcttattttttctgccagtggtgaggctgcgaacacagggaccatgggagtgggagcagccagcctgaggacggacagtagtgcaggggcacccccacctggcatgggaggttaagagccagccaccaggcctacatggctggggagggtggatccctagctgccaggagagggtggtgccactggggaggccacagaatgtcctcttcgagtccctgagcctgcatcctgcaggctgcaaagcgcagttgcctggagtagctggtgccgactgggataataaccaagcgcttctcattgctgtgggggcatctctctttcccatcccaacaaagaggccaggccttcggctcgcttgtctctgggaaagcagacagagcgggcaaccagatcacagcctccctggccagcacccacacaccctggagtggcagaaactggggctccctcagaggattaggctggggcaagcaggagggcagtgggttagaggcaggtgcaggcggaggggagggattggcagcctccccacctaagcctcggaagggatgaggcccctcctagcctcagatgggaggaccctgggaatgtagctgcaggggagcccaggatagccaaaccctggagataggggtcccagggaaactccttataaaatttataaaattaatcaggggctcggtgcaatggctcatacctgtcatcccagcactttgggaggctgaggcaggcaaatcacttgaggttaggagtttgagaccagcctggtcaacatggcaaaaccctgtctctactaaaaacacaaaaattagctgggtgtggtgatgggcgcctgtaattgcagctactcgggaggctgaggaaggagaatcgctggaaccaagaggcagaggttgcagtgagctgagattgcggcactgcactccagcctgggcgacaagagccagattccatctcaaaaaaaaaaaaaaaaagtaatcagggaagaggagggaaaaacggaaacaagccaagcttgcaagctactcagcatgagctctgagagcagcctgctctctgaccagctgcctcacagccatgcagtgcctgtggcggcctcagaatcacacagaccctgtcgcaggatgctaacaccccttaactgctctgtagacagccacttgtatgtcatgaaacgttcacttttgcatttgagatattctttcagggcctgcatccggatgaaactactgacgccagctagtctgaaagatcccacaaa

SEQ ID NO: 41254 - DNA, 900 bp, Artificial sequence
  DNA replication origin
ctggagtacagtggcgtgatctcggctcgctacaacctccacctcccagccgcctgccttggcctcccaaagtgccgagattgcagcctctgcccggccgccaccccgtctgggaagtgaggagcgtctctgcctggccgcccatcgtctgggatgtgaggagcccctctgcctggctgcccagtctggaaagtgaggagcgtctctgcccagccgccatcccatctaggaagtgaggagcgcctcttcccggccgccgtcacatctaggaagtgaggagcgtctctgcccggccgccccgtctgagaagtgaggagcccctccgcccggcagccgccccgtccgggagggaggtgggggggtcagccccccgcccggccagccgccccgtctgggaggtgaggggcgcctctgcccggccgcccctgctgggaggtgaggagcccctctgcccggccaccaccccgtctgggaggtgtgcccaacagctcattgagagcgggccaggatgacaatggcggctttgtggaatggagcggggggaaaggtggggaaaagattgaggaatcggatggttgccgtgtctgtgtagagggaggtagacatgggagacttttcattttgttctgtactaagaaaaattcttctgccttgggatcctgttgatctgtgaccttacccccgaccctgtgctctctgaaacatgtgctgtgtccactcagagttaaatggattaagggcggtgcaagatgtgctttgttaaacagatgcttgaaggcagcatgctcgttaggagtcatcaccactccctaatctcaagtacccagggacacaaacactgcggaaggccgcagggtcctctgcctaggaaaaccagagacctttgttcacttgtttatc

SEQ ID NO: 41255 - DNA, 1560 bp, Artificial sequence
  DNA replication origin
gagcatgctgccttcaagcatctgtttaacaaagcacatcttgcaccgcccttaatccatttaactctgagtggacacagcacatgtttcagagagcacagggtcgggggtaaggtcacagatcaacaggatcccaaggcagaagaatttttcttagtacagaacaaaatgaaaagtctcccatgtctacctccctctacacagacacggcaaccatccgattcctcaatcttttccccacctttccccccgctccattccacaaagccgccattgtcatcctggcccgctctcaatgagctgttgggcacacctcccagacggggtggtggccgggcagaggggctcctcacctcccagcaggggcggccgggcagaggcgcccctcacctcccagacggggcggctggccgggcggggggctgacccccccacctccctcccggacggggcggctgccgggcggaggggctcctcacttctcagacggggcggccgggcagagacgctcctcacttcctagatgtgacggcggccgggaagaggcgctcctcacttcctagatgggatggcggctgggcagagacgctcctcactttccagactgggcagccaggcagaggggctcctcacatcccagacgatgggcggccaggcagagacgctcctcacttcccagacggggtggcggccgggcagaggctgcaatctcggcactttgggaggccaaggcaggcggctgggaggtggaggttgtagcgagccgagatcacgccactgtactccagcctgggcgccactgagcactgagtgaaccagactccgtctgcaaacccggcacctcgggaggccgaggctggcagatcactcgcggttaggagctggagaccagcccggccaacacagcgaaaccccgtctccaccaaaaaaatacgaaaaccagtcaggcgtggtggcgcgcgcctgcaattgcaggcactccgcaggctgaggcaggagaatcaggcagggaggttgcagtgagccgagatggcagcagtatagtccagcttcggctcggcatgagagggagaccgtggaaagagagggagagggagaccatggggagagggagaccatgaggagagggagagggacagggacagggacagggagagggagagctactccctgtgtttgattcccctccaagagccctaattttcatcttttaatagaaacggggtttcaccatgttggccaggctggtctcgaactcctgaactcaggtgatctgcccgcctaggcctcccaaagtgctgggattacaggcgcatgacaccatgcccagctaatttttgtatttttagtagagtcagtttcaccatgttggccaggctggtctcgaacccctgacctcaagtgatccacccgcctcggcttcccaaagtgctgggattacaggcgtgagccaccgtgcccggctacgccctgctgatttttgtatttttaacagagatggggtttcaccatgttggccgtgctggtcttgaactcctgaccttgtgatccgcctgcctc

SEQ ID NO: 41256 - DNA, 1356 bp, Artificial sequence
  DNA replication origin
tgctaaggctgggccctggctgacagccagccagggaacagggacttcagtcctatagccacagaaaccagatcccaccaaccacctgcgcggactcagaaggcaactcacttgcagagcctccggaagggacacccacccagcaggcactgggccccctccagccaccctcaggcatgcggggctgcagccagagaggggcacagggtcgggcttgggcctgtcagaccctcccctccacagtctgagtgacctggccagtggcaggatggaggcctgagaggtggcgccgttcacggaactgggagggccatgggaccggctggggcgctggctgacggtgacgggcgtgtgtgtgagaacctgaatggatgagggtgggtgggtgggtggtggggtggaggcagctccctccccgtttactggggtgtgacttgagcacctcgcaagcacaggcagtgcctcagccgcttactctgtgaggggccgaccgtgcccacctgcaggcccactgtgtgccgggcaccctgagccccgcgtttccagtggctccaactctcccacaggtgacccggtggatgctgctctcctctgtgtgagggaggaagcgaggggactgtcatggcccacgagcctgttcgcctccacaagcggctcccaaccccaggctccttccagcaaacccttggaaaggtcatagagcctggatgccccaggccttgaggggcagagggtggggggcagcagggtggacaggcgccccttgggccattctgaagggttcagggcttcacctgggagggtctgcgctgtggagaggcaggagaccccgtggcaggaggaagggaccctcagggctcccagccagggagggggtggctcgagtcacgtggagaccgtgggcttgggaggctcaggagtccgggatcgggagggtctgcaggcccaccggctgcgggtggaaggtgagggcctccagagtggcctgaatggcttggtgggggccgcaggggctggctgggcctggggtgaggtgaggaggtgacgggggaggcggctggagtgtggagctgcaggggcccctttgagggacacgggtcccacaggagcgtccactggacttaggtgtccaggcagtgatgccttgtgcctggctccggccctgggtgcctggacaaacaggggccttcccaagcagggcgtcgtggtgtagacaagggcagccaaccgtgcgacaaggaggacagccacagggcagcggagaggaagtgagagcttgtgggagaggtcatgtccggtgcgggggcgaacggggcccccacagcccaggagcaggcctcagggcacagggcacag

SEQ ID NO: 41257 - DNA, 1213 bp, Artificial sequence
  DNA replication origin
cgggtggaaggtgagggcctccagagtggcctgaatggcttggtgggggccgcaggggctggctgggcctggggtgaggtgaggaggtgacgggggaggcggctggagtgtggagctgcaggggcccctttgagggacacgggtcccacaggagcgtccactggacttaggtgtccaggcagtgatgccttgtgcctggctccggccctgggtgcctggacaaacaggggccttcccaagcagggcgtcgtggtgtagacaagggcagccaaccgtgcgacaaggaggacagccacagggcagcggagaggaagtgagagcttgtgggagaggtcatgtccggtgcgggggcgaacggggcccccacagcccaggagcaggcctcagggcacagggcacagggcacaggtgggttctcagcccggctgggcggcaccctctctgcccagcgcccctgcaggaccccgccgacccggcgggaccagcacaggtgtcgggcagagggaagccgaggagcccctgatgtctggctgccgccatccgtctgtccgtgctgggctgcagctggcgtgacctccgctgtgctcctgttttcggcgagaccaatgactcacgcgagcaaaatgataagaaccacaaacagggaacgcggacgggagtgggagggagcagaaggcacgtggtcctgtgtaaatccatcccgggacgcagtgcaaacaatggtctctgagcccacgtaaccacgcagagcgggacgttccgggatcagtggggagagtcagctccttcccgagccaagcagcagctgcgtgggggagggtcgcaattatttatttttgagacagggtctcgccctcttgcctaggctggagtgcagagttacgatcacagctcactgcagtctcgacctaccaggctcaagcgatcctctggcttcagcctcccgagtagttgggactataggtgcatactttcatgcccagctaatttttttttccccagttttttgtagagatggggtcttactatgttgcccaggctggtcttagacttctgggcttaagagatcctcttgccttggcttcccaaagtgctgggattacagacatgagttaccatgctcagctggggaggggtgcaatttttatttttatctttatttttttgagacggagtttcactccgtcacccacgctagagtatgatctcggct

SEQ ID NO: 41258 - DNA, 1226 bp, Artificial sequence
  DNA replication origin
agccagttggagtacccaggagatgagatgagaggggcaggtgggcctctgctgatgggctgggggtggaggatcggctcagccaagcggggagcctggagttctcctacaattgtagggccctgtgcctactcccacctctgctcctctttcagccccaccaaggcctctccaggggatctcacaggctgctcccactcaccccatcctcctgtcccatctctagccttgggttgcctgtgcctggagaggggaggagaggggaggggaggggaagagagatgaggggaggggaggagaagagaaggaaggggagaggagagtagaggggaggggaggaaaagagaggggaggggaggagaagggaggggaggggaagggagatgagaggaggggaaggaagggaaggggaggagaggggagtggaggggaggggacatgagaggaggggagaggaagggaagggaggggaggggaggggaagatgtgtaggtcagtctccgggagggtaggctgctgtgacaagatcccacagactggggcttcagcaacagacttttattttctcacagttccagaggctgaagtccaagatgaaggcgccatcgcggttggtttctggtgaggcctcttttcctggcttgtaggtggcccccctcgcacatggccttcctctgtgtgtgcagaggggaagggagagctctccggtacctgttcctcttcctgtggaagggccctcccctgtgtccttctaacaccttatcgccaatacagtcactcaggggataggaatattgaagatggggttggtgatgtcacagttccatctgtagcagtgtccgtaggaaattcccacactggggccgggcacggtggctcacacctgtaatcccagcactttaggaggctggggcaggcgaatcgcttgagcccaggagttcaagaacagcctgggcaacatagcgagaccttgtctctacaaaaaatgcaaacattagctgggcgtggtggcacatgcctgtggtcccagttacgtgggaggccgaggtgggagaatcacttgagcccaggaaggcagaggttgcagtgagctgtgattgtgccactgcactccagcctgggcaacagagcgagaccctgtctcagaaaaagacatcaacaaacttcccacactgggagagcctgctccaggctggggcctggactcgaccggttgctgtgtggtc

SEQ ID NO: 41259 - DNA, 893 bp, Artificial sequence
  DNA replication origin
gtttgattcccagccgagggacagcaggactggtagagaccgtcaggccacacggctgcctgcacagcactccaatacttggcagggggcaggaggggtggcaggagctggctgtccaaaggctgggcacggcagggaggctcactggaggcggcgcattttggaggggggatgtcaagggacagcgttctcttgtagttggaccacaagactccacaaggacagcatggtgactgatgcccagcgctagaggcgaggcggtcggccatgtgtaggtgtgtctatatatgagtattgatagatatttatagaacagggcagggtgtacaacagaggcacaagttttcaccagtggtcacacctggatgtgtcagctcaccacgacagcagactaagtcacagatgaagggggctggctttggggctgggggagccactgttaagtcacagaacaaccgtccaggcaggctgggaaagggaggtcaccgagaagaggagggatctgtttagaggtcgaagggcttggggctctcttgcctgactcgatctatcagctggcagctggagagaaagcggagagaaaacgggagagagaaaagtgaggagagctggtaaggcaagtgcagcacatggtgggagggcccgggacgggagggagagggaagggtgcacgtgcaggtgcaggtacaggtgggggtgtggcaaggttcctggaaaggaggggctggaagagaaaggggaggatgatggaggattcggagcttcacaggtagcacctgggggctgtggcggccctcccgaccccacacacgctggcctttcccacggcacccaggcagtgcacccacagttcagaccgatctcagccccctcgggcttccctcttctctggt

SEQ ID NO: 41260 - DNA, 1245 bp, Artificial sequence
  DNA replication origin
cagctgcgccgcggctcacagctgacgatgggggaccccagcaagcaggacatcttgaccatcttcaagcgcctccgctcggtgcccactaacaaggtagcggccgcgggcgagtgcgggcctgcctggcatccctgcgggaaccggcgggaggccccgcgggcgccagtgcccgtggcttgggaggcggggccggcgcggcctgtgacacgtcgcactgtggggccgcggcagcctggccgggccggggcgggcggggccgggcagctgagaggcccgggcgggaggccgcagcgcgggggtcctcacgcgagccggggagcgttcccgggggcggcggcgcgggcacaccccccggcgagctcttggggcggggggcgagcaccggcggctctgagcggaggcgggggcgggggcatcctcgggggcgctgcgaggagggagctcccggctcggaaaccccggctgctggcgccggatgcggggaaagcgcggctcccccagcgccaccctggagctcgaccccgcctgttggagccggcttggctcctcgggccttgcggtgcctgcctcagtttctcttctgataaagttgccgagtagtctacgctttggcttccagcttttgtcgctttggccagggaggctcaccacagcctcctccctctcctcggttctctttggagatggaggtttcctttttttttttgtctccagaggctgttctctccctggaacttttacagctttgcgcagctggctggaggcgttggggtgacgcagggggctaaggtgacacgtcgggtcggagagggacttggagagtgcaaagggctgtcgcgtcagcgtgggctctccccgcccctcctgtgacacgagtgttgtctggttcccactgtcacttcccgaagggaacagctgttattgaacctcgatatgctggcatagaaagttcccgagtgttacaaaataggtgtttctgttggttttaagtcttgatggtacaggggagcccatattttttccagcctaggtgaggaaggaaacagtttattggaggtgatgtctgatggatgtgggaaagttaagagaaaggctccaggaattctccagtgcccgtttctttactgttctcttgattttcacatttttatttatttatttttttagagacagggtctcaccccgtcacccaggctgaagtgtagtgccttgatcctagctcactgcagccttgacctaccc

SEQ ID NO: 41261 - DNA, 1324 bp, Artificial sequence
  DNA replication origin
cctgcttgctggggtcccccatcgtcagctgtgagccgcggcgcagctggcccagccaaccggtaagagtcgacgaaaagcggctaccgcctcagcaggagcgacgaggccgcgggggcggggctgcgcgtaacggtcaggctccgccccaatccccgcccacgaccgggcccgtccaccgccggggcgcaggcgccgctcgctttccctccccgccctcgcttcagccgcgccgctggcccgaccccaggcgctgcacgcgcgtgcgcaggaggctcgcgcgccatttgcggcgcggctccacgcccttagcgctgggcgaagccgggcccgggtgtggctgcctgccacgcgcgctgccataggatccaccaacgtttcgcctggtcgatcgccatttcgcctaacgggctgcttccatggaaaggtcagaggcaggggaaggggcgcacgcgccctccttcggcacgagacggacggagggcccgtgccttgacgccggaccttagctggtggccttccctttttttttttttttttttgagacggagcctcgctctgtcccccaggctggagtgtaatggcgcgattgcggctccttgcaacctccctggttcaagcgattctcctgcctcagcctcccgagtaggtgggattacaggcgtacatcaccacgcccggctaatttttgtatttttagtagagaccagggtttcaccatgttgcccaggctggtctcgaactcctgacttcaggtgatccacccacttcggccttccaaattgctgggattacagacgtgagccgccgcgcccgactctttttaattcttgccctcagctcacgccaggccctgggtggaaagctttctttgcccggaaactggctttctgaaaccaagggcttttgtgtcacgttcatggagagatggcagtgcgggttgaggcagaagtgctcagtcagaactgatgagtccagatgagaagcttgacttttaaccccggccctcggggctgcaccctaccctctgggaaacaattccagccagaagagtttacactcagcagaaggtgcctctgtcaccacaatgggtgtggagccactggaaagaggttgggtgatagtgaggaaggacagcaggttttggcatcaaaggcactaccttggcctcaatcccagttcagccagctgcttcctagctctgtggccttggtcaagacacttaccttctctaaagcatggtttatttgcagtctcaggggctcatgcctgtgatcccagcactttgggaggctgaggcgggaggatcacttgagctcaggag

SEQ ID NO: 41262 - DNA, 930 bp, Artificial sequence
  DNA replication origin
catgcgccaccacacacagctaatttttgtatttttagtagaaatggggtttcaccatgttggccaggctggtcttaaactcctgacctcaagtgatccgccagcctcggccgcccaaagtgctgggattacagacgtgagccaccgccccggccctagagctgactttctagagggtcagacagacaagaaataaaacatttaagtaaattatgtagctcgttaggaggtggtaagtgcttgggagagaaaaataaagcagggagggggtctgagggggctggggcagggttagaaaagttctcactggggccggacgcagtggctcacgcctgtgatcccagcactttgggccgatcacgaggtcaggagatcgagatcatcctggctaacacaggtgaaaccccgtctctaccaaaaatataaaaaattagctgggcgtagtggcaggcacctgtagtcccagctacttgggaggctgaggcaggagaatggcgtgtacccgggaggcagagcttgcagtgatctgagatcgtgccactgcgcttcagcctgggcgacagagctagacactgtgtcgaaaaaaaaaaaaaagaaaaaaaacctcactggggtgggggctgatacaggcctgtggggcaggagggagaccatttcagggaggagacgagcacattcactgtgcctggcagtgcccagaccagcggaggagccaagtggagcttggtgtagggtggacagcagtggtggcgggttggagagcagggtctgaggacaaagtagctcggtggaggtgagcagatgcgggctgggaggacctgggcttttactctgcatggggggcttaagagcagcaatgtggtctgccttgcattttgagagggtcacactgttcagagtggactgaagtcagattgttaaatatatcat

SEQ ID NO: 41263 - DNA, 1303 bp, Artificial sequence
  DNA replication origin
tggagtctcctatgtctacttctttccacacagacacagtaacaatccgacttctctttcttttccccacatttcccccccccattggacaaaaccgccattgtcatcatggcccgttctcaatgagctgctgggtacacctcccagacggggtggcggccgggcagaggggctcctcacctcccagacggggcggccgggcagaggcaccccccaccttccagacggggcggcggccgggtggaggctgccccccacctcccgaacggggctgctggctgggcgggggctgccccccacctccctcccggacggggctgctggccgggcgggggctgccccccacctccctcccggatggggcggctggccgggcgggggctaccccccacctcccggacggggcggctgccggacagagatgctcctcacttcccagacagggcggctgcccggcggaggggctcctcacttctcagacgatgggcggccgggcagagacgctcctcacttcccagacatggtggcggttgggcagagacactcctcacttcccagactgggtggccgggcagaggggctcctcacatcccagacgatgggctgccaggcagagacgctcctcacttcccagatggggtggcggccgggcagaggctgcactcttggcactttgggaggccaaggcaggcggctgggaggtgggggttgtagcgagccgagatcacgccactgcactccagcctgggcaacatagagcactgagtgagcgagactccgtctgcagtcctggcacctcgggaggctgaggcgggcagatcacttgcggtcgggagctggagaccagcccggccaacacggcgaaaccccgtctccaccaaaaaatacaaaaaccagtcaggcgtggcggcgcgcgcctgcaatcccaggcgcttggcaggctgaggcaggagaatcaggcagggaggctgcagtgagccgagatggcggcagtacagtccagctttggctcggcatcagagggagaccgtggagggagagggagagggagaatatttttatcatggtggtttgtaatgccacctcctttcattgtttttagcttagcgttagcctgcagaccctcagaaactgctgagtggtgagaggtggtgcaggggtaggctgtagcagagagggctgtggagaggctgggggcagggcagggtggtgcagggagcctgggtcgctgtctgaccgcacagctgtgggtggcgtggggaggcgctgcaggccagcctcccatctcatggtcagcactgct

SEQ ID NO: 41264 - DNA, 849 bp, Artificial sequence
  DNA replication origin
agcccatcgtctgggatgtgaggagcccctctgcccggccacccagtctgggaagtgaggagtgtctctgcccaaccgccaccatgtctgggaagtgaggagcgtctctgcccggccgcccatcgtctgagaagtgaggagcccctccgccgggcagccgccctgtctgggaagtgaggagcatctctgtccggcagccgccccgtccgggaggtggggggtagcccccgcccggccagccgccccatccgggagggaggtggggggcagcccccgcccggccagcagccccgtccgggagggaggtggggggcagcccccgcccagccagcagccccgttcgggaggtggggggcagcctccacccggccgccgccccgtctggaaggtggggggtgcctctgcccggccgccccgtctgggaggtgaggagcccctctgcccggccgccaccccgtctgggaggtgtacccagcagctcattgagaacgggccatgatgacaatggcggttttgtccaatgggggggggaaatgtggggaaaagaaagagaagtcggattgttactgtgtctgtgtggaaagaagtagacataggagactccattttgttctgtgctaggaaagattcttctgccttgggacgctgttgatctatggccttgcccccaatcccgtgctctctgaaacatgtgctgtgtccactcagggttaaatggattaagggcggtgcacgatgtgctttgttaaacagatgcttgaaggcagcatgctctttaagagtcatcaccactccctaagctccagtacccagggacataaacattgcggaaggccgcagggtcctctg

SEQ ID NO: 41265 - DNA, 1575 bp, Artificial sequence
  DNA replication origin
tgaccccccacctccctcccggactgggcggctggccgggcggggggctgacccacccacctccctcctggacggggcgactggccgggcagaggggctcctcacttcccagtaggggcggccgggcagaggagcccctcacctcccggacggggcggctggccgggcggggggctgacccccccacctccctcccggacggggcggctggccgggcagaggggtcctcacttcccagtaggggcagccgggcagaggcgcccctcacctcccggacggggcggccggccgggcggggggctgacccccccacctccctcccggacggggcggctggccgaccccccccgccgcctccctcccggacggggcggctggccgggcagaggggctcctcacttcccagtaggggcggccgggcagaggcgcccctcacctcccggacggggcggctggtcgggcggggggctgaccccccccacctccctcccggacggggtggctgccgggcggagacgctcctcacttcccagacggggtggttgccggacggaggggctcctcacttctcagacggggcggttgccaggcagagggtttcctcacttctcagacggagcggccgggcagagacgctcctcacctcccagacagggttgcggcccagcagaggcgctcctcacatcccagacagggcggtggggcagaggtgctccccacatctcagacgatgggcggccgggcagagacgttcctcacttcctagatgggatggcggcggggaagaggcgctcctcgcttcctagatgggatggcggccgggcagagacgctcctcactttccagactgggcagccaggcagaggggctcctcatatcccagacgatgggtggccaagcagagacgctcctcacttcccagacggggtggcggccgggcagaggctgcaatctcggctctttgggaggccaaggcaggcggctgggaggtggttgtagcgagccgagatcacgccactgcactccagcctgggcaccattgagcactgagtgaacgagactccatctgcaatcccggcacctcgggaggccgaggctggcggatcactcgcggttaggagctggagaccagcccggccaacacagcgaaaccccgtctccaccaaaaaaaaacgaaaaccagtcaggcgtggcggcgcgcgcctgcaatcgcaggcactcggcaggctgaggcaggagaatcaggcagggaggttgcagtgagccgagatggcagcagtaccgtccagctttggctcggcatcagagggagaccgtggagggagagggagagggggagggggagggggagagggagagggagagggttgtttgtttttttgagggagggtctctctctgtcgcccaggctggagtgtcgtggtgtgatcatgcagccttgacctcctaatgaccatgacaagctagtgtttttgatttttagtagagacaaggtcctgccatgttgttcaggctgttcttgaactcttgggctcaagcagtcctcatgccttggcctctcaaagtgctgggatt

SEQ ID NO: 41266 - DNA, 1440 bp, Artificial sequence
  DNA replication origin
ccgtccgggagggaggtggggggatcagccccccgcctggccagccgccccgtccgggaggtgaggggcgcctctgcccggccgcccctactgggaagtgaggagcccctctgcccggccagccgccccgtccgggagggaggtgggggggtcagccccccttccggccggccgccccgtccgggaggtgaggggcgcctctgcccggccgcccctactgggaagtgaggacccctctgcccggccagccgccccgtccgggagggaggtggggggacagccccccgcccggccagccgccctatccaggaggtgaggggcgcctctgcccggccgcccctactgggaagtgaggagcccctctgcctggccagccgccccgtccgggagggtggtgggggggtcagccccccgcccggccagccgccccatccgggaggtgaggggcgcttctgcccggccgcccctactgggaagtgaggagcccctctgcccggccacgaccccgtctgggaggtgtgcccagcggctcattggggatgggccatgatgacaatggcggttttgtggaatagaaaggcgggaagggtggggaaaaaattgagaaatcggatggttgccgggtctgtgtggatagaagtagacatgggagacttttcattttgttctgtactaagaaaaattcttctgccttgggatctgttgatctgtgaccttatccccaaccctgtgctctctgaaacatgtgctgtgtcactcagggttaaatggattaagggcggtgcaagatgtgctttgttaaacagatgcttgaaggcagcatgctcgttaagagtcatcaccactccctaatcttaagtacccagggacacaaacactgcggaaggctgcagggtcctctgcctaggaaaaccagagacctttgttcacttgtttatctgctgaccttccctccactattgtcctatgaccctgccaaatccccctctgcgagaaacaccaaagaatgatcaataaaaaaaaaaaaaaaaaaaaacaacaacaaggctaggagcagtggctcacacctgtaatcccagcacttgggagacttaggcaggcagatcacttgaggtcacgagttcaagaccagcgtggccaacatggtgaaaccccatctctactaaaaatacaaaaattaggccgggcacagtggcttacaactgtaattccagcactttgggaagctgaggcgggtggattacctgaagtcacgagttcgagaccagcctggccaacatggtaaaaccccgtctctactgaaaatacaaaaattagccggctgtggtgacgcacacctgtagtctcagctactcaggaggctgaggcaagagaactgctcaaatccaggaggtggaggctgcagtgagtcgacaatgtgccactgcactccagcccagg

SEQ ID NO: 41267 - DNA, 1724 bp, Artificial sequence
  DNA replication origin
cctctctactcatctggcccaatcgggggcgccggggaggctgtggggcggggctcggtgtccggtagccaatggacagagcccagcgggagcggcgggggcggtgcggtcgcggctggcggcagaagcggccgcaggggtctgggcagggctgggcagtgctgccggagcaaaagcggtagcgggagcccggccggagctgggtctggagacgccgtggcagcctgaacggagtgtgcgacggattgggaggtgagtggccgccgaggtcaggggtcgccgcgacggttggggcgccgcgggcgggacgcgggggcgctggtccgcggccgggcccgcgccccgtcagggccgccgcgccgagctccgcgccctgagggaagcgggtcgggccgcgcggaacttcctgtctctgtgggagggggcgagtgctcggggccccggggggcgcctggagaagacatcttggggaggacgagggcgagtggggtcggctcggggaaggggcgggggcccatgggggcggcgctgtgggagcggggcagttttccggggtccggggcctgctggagagggaagtgcaggagcagggccgtcgggggttaagagctgctaatgagtgggggaggtgtagacagctgcagaagggggagctggggcgacttttggagggacgcgatttaggagaaagctgggaatccgagacgtgcagaggttaggcgagggtgccggagcaacgctggagggaaggcgtggctgggacgcgccggtgagagggcagggcttagtcctggggtggcctggggggcgacgcaggacacacgcgggtgcgctgatttcgggcgctttgatgagcggcctccatttccttccttcccaccctccgtgtcccgggggggggggggtggtgtgtgtgtgtctgtgtgtgtgtgtgtgtgtgtgtgtgtgtgtagggcggggggagcaaagcccttaccgcagcacgtcctagggctggggccaagcaggagaggccggggaggtttgcccttgtgaccctcctcagagtttccccagactcactgaatcagaaatccgaactccttactcctctagggctttcaagcctggccaggcatcctgagaggtccgcaattggagaggtagtgattgctgctgctgttgaatttcattgattcattgggtttcggctccatcagagaaggtcgattttcttttcagaaggagttggttggtcaggggagcaagctgtgctattgctttggggcccacacggctgcagcctttgacgtataacaggacctggggatgccactcttggcttgggtgcctgagggaaggtggcctttggctgggtgtgtgcaccattcctggatcctgtcttctctttttccctccgcctgtccggtgtttttgtggttaagggggtaggctgctcagagtctccagggctacttggtacactgtttaccaaatactgcctggctgtcttgatgaaaatcaggaaaccagctcaaagagtttgaacctcagctgcagatggtgagctcacaccttcttccttccctccttttcggtgccttcctctgcggttattcccgtgtgctgaagttctgttttaaccctcctgggattgccaggttggagcccagggcaagggaaccgaccaggcaggcagtgttgaatgccagccctcctgttcttgcccaagatgttgtcgttcc

SEQ ID NO: 41268 - DNA, 995 bp, Artificial sequence
  DNA replication origin
tgggaccgggcatggtggctcacgcctgtaatcccagcactttgggaggctgagggcaggtggagcacctgaggtcaggagttcgagaccagcctgaccaacatggtaaaaccccgtttctactagaaatactaaaattagtcaggcatggtggtgagtgcctgtaatcccagctactcaggaggctgaaacaggagaattgcttgaacccggcaggcagaggttgcagtgagccaagatcatgtcactgcactccagcctgggtgacagaatgagactcagtctcaaaaaaaaaaaaaaggagagcctctctgggaaggtggcagacaggataggctgctccaagtgatgaaaagagccaggcctgcagagatgggggaggagaattctagtagaggggcctgccatgcaaaggccctgaggcagggaggggcatgacgcttgaagattgctgtgtctccagcaaaaccagcaagggcagaagggagggggtggagggggaggccagagaggcgaggaacttgattttatttatgttccaggggaggcttttggagggcattagggctctgatagaatctgatttatgctttaaaatgcaagagaggctgggcgtggtgactcatgcctgtaatcccagcacttcaggaggctgagatgggaggatccctggagcccaggagttccagaccaccctatgcaacataacaagacccccatctctaatattttttaaaataataataaaatgtaagagaaaggagagaccattggagactagagtcaccaggaaaggctttatagaagaggcaatgatgccttctaccacagaattagagaggagtcatgatttcctatgagcagtacaaaaatcacccctttaaaaatgcggctgggcatagtggcccctgcctgtaatcctttggggggccaaggtgggcggatcatgtgagcccaggagtttttcttttttttttttttttttgagatggagt

SEQ ID NO: 41269 - DNA, 881 bp, Artificial sequence
  DNA replication origin
ggtcaggagatcaagactatcctggctaacacgtcaggatgtagacatgtttagtagagaaaccccgtctctactaaaaatacaaaaaattagccgggcgtggtggcgggcgcctgtagtcccagctactcgggaggctgaggcaggagaatggcatgaacctgggaggcggagcttgcagtgagctgagctcacgccactgcactccagcctgggtgtcagagtgagactccgtctcaaaacaaaacaaaacaaaactagccgggcatggtggcgcatgcctgtaatcccagctacttcttgggaggttgaggcatgagaatgacttgaacccaggaggcaaaggttgctgtgagccgagattgtgccactagcctgggcaacagagtgagactctgtctaaaaaaaaaaaaaaaaaaaaaaaaaaaggaaagaaaggggggaggggaggggggaggggaggggtgggaaggggaggggagattaggtgagttaaactggaattgtgggggaatgttggccaagtggcaggcagggtgggcctgggcctgagggaacgccatgggcccctagacttgttcctgctgacagagcgccagcggccgggcaggagcataagcaaggtgggtttgcatctgtcactggaggagcgctccgaatgcttctcaggacaaaagcaggaggccgccattgttcacaggatgtgagatctaatatggttcaggctggggcaaatcagtgaagatcaaaatccctcgtcttccacaatgagagactggaatcaaaagtggatgtgctcccacctgctcacaaagggtcctcacgtgccccagggccctccactggggcacagttcacattaggggacacacaaacagcct

SEQ ID NO: 41270 - DNA, 970 bp, Artificial sequence
  DNA replication origin
ttggccaagtggcaggcagggtgggcctgggcctgagggaacgccatgggcccctagacttgttcctgctgacagagcgccagcggccgggcaggagcataagcaaggtgggtttgcatctgtcactggaggagcgctccgaatgcttctcaggacaaaagcaggaggccgccattgttcacaggatgtgagatctaatatggttcaggctggggcaaatcagtgaagatcaaaatccctcgtcttccacaatgagagactggaatcaaaagtggatgtgctcccacctgctcacaaagggtcctcacgtgccccagggccctccactggggcacagttcacattaggggacacacaaacagcctgagggtgcccagtcgctgagcagccccagtcgctgtgccgttaccagcaggcagggccctgcaggagaccttggcctccccagaccacaggggctgcagggctgctgcggggagagggccaggcggccgcagcacagctgggaatggctccagaggggagggtggagagtgcgctggcccctgggggcactcagagaggagctgcgtgtgtttggcactggtggacatggtgtgtggcagtgtgagccaacaggccaatgggtggcaagcataggaggctttatggagcaccctgaagaaccactgtgtggaggggaaatggccccctgtgaggaaagtcctagcagctggtggagcgcaaccagatgcgggtccagactgatggggtctccatggcagcccaggtgggaggcggaggaggagaagggagacagtgagaaggttgtcaccaggccctcactaatacccggggagcagcccgtgtgcaaaggaggtgaaggatggtggttttcttttgtttgagatggagtcttgctcagttgtccaggctggagtgcaatggtgcgatctcggctcactgcaacctccgcctcctgggttcaagt

SEQ ID NO: 41271 - DNA, 1466 bp, Artificial sequence
  DNA replication origin
gggaaacatggaaggacacacatcatgttgttggcatcgatactgcagtcgagtgggcgtggagaagagagggaagcagacggcagtaaaaggcggaggagtaggtgtgttaggatcacagttacatgcttctgtcacagcaaaaatgtgcatttcatgtaaatttttaaaaaacaaaggaagaaatatttagtgaaatttacacacacacacagagacgtcaggcttgtagctggtaggcgctgctggtgggaggactctgaagcccatgcttagctgcctcctgcccctgctgtgggtgatgtgtggtgtggatgtgcgtgttacagctcattgtctggaacaggaggagcaggtgcaaggggagtttagatggaagtatactgggcttgccggcaacctcggggcctctacagggtagtggctgtgaacttcaggggtgaccagtcagtgtgtggttggttgttctctccctccatgatcagctgcccaggctaggtacagagaaggcagagggttgggagggaccaggattgggagcttgcgatggcaagacagagggcagcggggacagggagaagatgggggtgggtggcagtctctcggggaggagggttgttggagtcgggcactagggaagtgggctgggaggagaaggggcagtggtcagggagtgagcacttgccatggagataatgcaaggggtgacgaggcttggggactccctggggatgggactgagatggagtagaggacagggtcaccagaggtcagggagttgggggtttcatctgtttggtcattgccatcacccaccaccatgaactaggagcctggctctccaagggatctggggtggtgacctggaggactggaggtgactgcacaaggaggaaggtaactgtggtgaccaggcctggaaagagctgggggctttagagaggaggccccctccaaccaggagtatggggggtgggagagaaagcagtctccacaccaggggctgcaggggaagcagcgtctcgcaggagcccattagagcaggaaggggaagtggagattaaaggataagcagagggcatggtgggtgcgatgatgggcagagagttccggagcccacagagggtgagtctggggatggggtcagactgggattggcagcctggaaggtgaagggtgagatcagggttggggatggcaactgcgatggcggccttcggggctgggtcctgatggcccctgtgctggaggactgagggggtctgtgagtgtgtacagggtggggaccattgcggggagacttgtcagtagcatgaggaccttggggggttctcttcagtccagttgagggtggtggagaggctggcttgttgggagcgtgtagagcctctgccgcgtccagcctgtggacttcttgagggagtgggccagactcgccatttcccggccaagaagcagaggccagg

SEQ ID NO: 41272 - DNA, 1121 bp, Artificial sequence
  DNA replication origin
taggtttggggtctcacacctgaaagcgttgaggcctggggaagcactgtgtgagaatcgcgcacagccttcctggtctccagtcactactcttctgtcacctccaggtagatgtcagtggctggtgtgaggtcacccactaagatgcttgctttaagtacaacatgtgaaccatgcagcctggacggcggtggttggggggtggtccccaggccgcaagcaggattcatcaggaaatcacagctgtggaggctgaaatcacatagtgaaaatgaaaagttccctgagccattggcgtggccccgtgtctgcgggtgtgaggggtgtggaatcggctcacgctctgggatgcagctcccgtggtccccatgtcttcgggtgtgaggggtgtgggatgggctcacacctggggtgtggctcctgtggcccccgtgtctgcagatgtgaggggtgtgggatgggctcacgctctggggtgcggctcccttggcccccatgtctgtgggtgtgaggggtgtgggatgggctcacgctctggggtgcggctcccgtggtccccgtgtctgtgggtgtgaggggtgtaggatgggctcacgctctggggtgcggctcccatggtccccgtgtctgcgggtgtgaggggtgtgggatggactcacgctctggggtgtggctcccgtggtccccttgtctgcgggtgtgaggggtgtgggatggactcacgctctggggtgcggctcccgtggtccccgtgtctgtgggtgtgaggggtgtgggatgggctcacgctctggggtgcggctcccgtggtccccgtgtctgtgggtgtgaggggtgtgggatgggctcacgctctggggtgcggctcccgtggtccccgtgtctgtgggtgtgaggggtgtgggatgggctcacgctctggggtgcggctcctgtgcttttattgtcatcttggtgtgactgctgaggttccacgtgcaccatatcggatcacctaacagcagtcctttatacagcaccttgtagcttgcagagagcggttctgtttattgctcattgaccctgtgacctgggtgttgtcatcatcctgccaaaggccaggttcacagagggaagtgatg

SEQ ID NO: 41273 - DNA, 956 bp, Artificial sequence
  DNA replication origin
tcaagttagccaggctgatctcaaactcttggcctcaggtaatccacctgtctcagcatcccacagtgctgggattacaggtgtgagccactgcacccggctggctttcttattgttctctgagcccccagggactccaccctttggccctaggccaggaggcctgcgctctgggcctcagccccttggggctagaaaagggcctgacaaagccagagcctgaggcccagctgtctggcctctccctaatccttctaggtgctcaggtaaatgggcaaggaggataaggagagatcccgagagcacctggttctttcacctggagaagaggcagccttcccacctccatgctgcaagggggagggaggaggggacagagaccctgggaagtcagggcctgtggtgggaagtgggggagaagggggcaaggctgctagaggctgagggtggggcagcatggggaggagcatggccaggtctaggcaggttcgggtccagctggctggccagggggctgcagtggcatggggcgtgcctgagggctcctgttggcctcagggagcatcagactggagcgaaggtgaagtacttgtgtgtgctattggctggcactgtgacagcggcgagctggcctcctggtggcagtgtgagtggggctgatgtgttgagacatctgcccagtgacgatgactgctgtagtgattgctgcctggccttgggcaagttactcaccaccttcaagcttcagttcccatatttacaaggcagggaggatgtcacacccgttagaataactgctatcaaaaaatagaagataacaggtattgtccaggatgtggaggaattggaactctggcactgttggtgggaatgtgaaatggtgcagctgctgtggaaaaccttatggagagtcctcggaaagttcaatatagaattcctacatgatccagcagtct

SEQ ID NO: 41274 - DNA, 1036 bp, Artificial sequence
  DNA replication origin
gggggatcgatccattgacagaatctggccctttacacggatggcctccgttcgagctcaaagtactcctcggtgctttttttcacgatcattttacccacgtggaaaccgaggctccaagaggacgaaatgacttaaatgacagcgtgaagccagcgttcaaagacgtgtgctccttaggctggcagctttgggatttaggtgttttaaagcctatttcacaaatatgaaaaccgaggttcacatttggttagcagcagcatccagtgatccatacccgaagccagggggctgcccctccactgccgcccgtccgcagccttccagctgcatgacacacccactgccttccccctcccgtcggggctccgggtccgcgagaggcgggcgggactgggagggattgggggcagggggctcacgtgcagacctggtgagacggaccccacagcgcctggcggggcgaacagagaaatcagaaagcttccaggcggggtgggcgggtgggcagcctgctacgcggggatgggtaggacctaactccagccctggggtatattgggggtgggagaaggcagagcgctcctggaataacaaagtaacaattgtcctgggcacggcaaagcttgtttacttctgtcttgatcccctcagagattaggggaggggcagggacaggggttcccctcccccagctctgtcgtttgctacctgttgggtaccctcactctgttcttcccacctctagggtaattacttccccttcaatgttctcatctgtgaaatggacaacagcacctaccaagagctgggctgttgggaggaacagaggaggtaaagtgtgataaagtcttcagagcccctcccgccttccgggctctggaccttctttgcttttgtggggtttttttgtttgtttttgtttttgtttttttgagacagagtctagccctgttgcccaggctggagtgcagtggcacaatcttggctcactgcaacgtctgtctcccaggttgaagcaatcctcccgcctcag

SEQ ID NO: 41275 - DNA, 1207 bp, Artificial sequence
  DNA replication origin
tgcaatggggtggtccctctgcgtctcgccgcgacggctggacgccccatcgccgccgcacagtcctccagtgcggcttccgggcacccggctccgaactctggggtcgtgcggacccggccagaccgtagcgcggcaacgccagcccacggccgcggccgcacagccccggtgcccttaaaagagggaagatggcgtcgtgcccggtgccgccgggaccggctcccggaggcgctgcgcacctgaggaagggccgaggaaaggcttcgtaacgggacgcccagaaagtccggaacaggaacgtgcacacggagcggcgcgcagccgcccgccctcgcttgcccacgcgccctgcacaggtgcgccccagactgggcggggactagagcccggctggggcatgcgaccttgtttggtaaattggaggtgcgcccctgcgggtgacccgcgagggggccccccgcctgcggggcgcggtcacgacaaggcttgtggggttcggagctggtcgtcgtctgggctctggcctcctaaatgcgatcgctttcaagcccttcattgtcaattttgctagaatgagccactcgtggggtaggacgtggttgttgatgttactgttgtagctcttactattgtaacatttttgttgctgttttaacgcagtgtttactgtggtctgggagcccgagcttcccagggagcattggtgtcagcctcatgtccccgcattaggaggagcgcagtctggtgggcactagcgccgggaagttcttaacatctgtctgcccctgggagcaggaggcctcatcttccaggtggagaaacagagatttcagtcccaggaggcacagaaatgccagggttgtctagctagaagccaagggccctttatggaacccaagccaaaacctctttccactctccagccctgtggcctcggaagggccactccatctctctgaacctcagtttgttctgttcactctgcaaaatgtatccctgaggtttctggccaggtgaaagcccctctcaagttagtagcctccctggagttaagactcaccccgatttctacttaatttgggcacgcctttggaataagttctcaggaatggcacagtttgggtgttttttgtttctttttgtttttttttgaaacagagcttcgctcttgttgcccaggctggagtgcaatggcgccgtctcg

SEQ ID NO: 41276 - DNA, 1086 bp, Artificial sequence
  DNA replication origin
acatggtgaaaccccatctctactaaaaatacaaaaattagccgggcatggtggcaggcgcctgtaatcccagctaccgggaggctgagggaggagagaatcacttgaacccaggaggcagaggttgcagtgagccgagattgtgccattgtactctagcctaggagacaagagcgaaactccgtctcaaaaaaaaaaaaaaagaaacccagaagaaaaagatgaatgaagaatggaaccaagcctgggttatccttgtcttcaggccaacacagtaaaaaatagatttatgtatgtttgttttttaatagaggaagaggctcacaaaggcaaaaatgccaggtcctaggaaagccatactgcagcctggctggtccccaaggaggctcctggcttctgtgtctgggtagaagtagccacagttctccttggaccctgcaggatcagtttgggccaacgtggctggttcaggctgatggggcgttgccaggctgagttgtctggagggagctgggacagccttgaactgcagcaagacagccatagtgccaagggcctggggctggacacaccctgcatgggagtggacctgggcagctggaggccacctctgggctgtgatgatggcagcctcccctcactgagcgccgagcatctgaggggtgtcctgcctgcatcaccgcgttgcggcctcatcagtcccacgactttgtgcccattttacagatgaggagatggaggcccagagagccagtcagaaagtggctgggccaggactaagagtgcagcgcgctgcctccgtgccctgcgtcaacagctcaaggaactggggtgctccggaaatggggccaaggctgctgggcagcaggacgctcagggccttggcctcaggagaggtaattccccactcggagatcggtcttgttgctgcattttatagatgggaaaagtgaggctagaagagacgacaaacgacacgccgttggacacacggcaacgttttagatgttgggtctggccgggcggccgtcaccggtcaccatggggaggaggaggagccgagagacttgctcgcggccgggggga

SEQ ID NO: 41277 - DNA, 907 bp, Artificial sequence
  DNA replication origin
gaggagccgagagacttgctcgcggccggggggaggcagaagcgcgtcccgcgggagaggtggctttgaggagtgagctcccggtcccgcggggacgcgagtgggcccagtgcccgggctgccaggcggggcggggcggggccgggcgactgagaggggcggggcctggcggctgggaggggcggggcggatgcggggacagcggcctggctaactcctgccaggcagtgcccttcccggagcgtgccctcgccgctggtgagtgaggacgggacgcggagggggcagcgggaagtgggggcccgcatggctgcgactcttggcagcgccgcgggacagagggaaactgaggccggagccgcagactggacacccgagggggcgacccggggcagcacttggggctcggctaccgggtcagggggcggcgggcagcagagtctgggcctccgcggccggggttccagcgcgggccgcctccggctgggggttcgggagggaaaacttggacaaccctgccacgcccagcccttggccgcgtggcttctcctgcaggaagcgcggtcccaggagtggccgacgctccctctcctgcccattccgcggatgggcaatcccaggcggaactcccttgagggtctcagaatatctgggagacctcgggctcttgatctccgagacaccccgtttcgtagtggagaacagtccagatcggggaagtttattttgcccaaagccggttagaggccccctggccctcgattcccagtgcggggctcaggtgcgttgcagcctagacgggtcttactgtgagccgagcagcctctgggacctgtctgcttcccctaccccttgcaaagaagccggagcccaggtaggagaagcgggggcttcctgctgtgaacgc

SEQ ID NO: 41278 - DNA, 1181 bp, Artificial sequence
  DNA replication origin
caaccctgccacgcccagcccttggccgcgtggcttctcctgcaggaagcgcggtcccaggagtggccgacgctccctctcctgcccattccgcggatgggcaatcccaggcggaactcccttgagggtctcagaatatctgggagacctcgggctcttgatctccgagacaccccgtttcgtagtggagaacagtccagatcggggaagtttattttgcccaaagccggttagaggccccctggccctcgattcccagtgcggggctcaggtgcgttgcagcctagacgggtcttactgtgagccgagcagcctctgggacctgtctgcttcccctaccccttgcaaagaagccggagcccaggtaggagaagcgggggcttcctgctgtgaacgcgctgctggccagggcagctgccagaggccatggcctggcgtgggcctggagcccctctggccagcctgccaggggccagggctacgggataccagcagcgtgccctgggctggatggcaggagagacaggacttgaggctgtcccagaatgggctcaggcagggcgaggatatcaggggaggtggtgtacaggaagcagccgcccagcttgcctggcacacagcaagccctgcccatgaaggcctactgccagaacagtgggcgaggcccggcgtctctgtggagtcggtggggcccgggacagggcagcctgaggcaggtttccactggcggtgaaaggggccgtgtggcaaggacaggagagccagcctcagcccagcaggggaaggcggcccctgagtctccacctggctgctggcagccccacagggaggttcggcgaaactgaggcttgccaaagaagcctttgtccagagtcacgcagctggcgcggtggagccagggccagaacccgtgcaggctgatcccagcctgccttctccactgtgccccgaggaccactttctttcctgggagtgtgtgtgtgcacatgtgctgtgtcctgtcgtctgtacacacttgtgcctggcgtgaggcaggatgtctggctggatctaccagaaagtattcacagcgggttctccagctggggtgaggggcttgggctcgcagggagggagcctacttttcactttagcttgctttcttcctttcttccgtccttccttcctccctccctcccctc

SEQ ID NO: 41279 - DNA, 721 bp, Artificial sequence
  DNA replication origin
cagaactggcttcagaccctgctctcttgctgtggccttgggaaagccaccatgcctctgtgacttttattcgttccatacaacgggggacctggatggtggtctctaaggccctgtcagtgggaacactgggtgagtcccattgtgatttcctggggaccgagtgtgtgcctggccctggctgggtgctggagccaggtgacagaatcgtggggagttctgccacgtgctacaaggtgaggacctctagaacatggcgctcagtgaaggaagccagacacgagggccacacactgcgtgattccattgataccaaatgtccaggatgggcaagtccccagagagaagtcagattgctggcggccaggggtgggagggagggggaggggaaccactgctgatggatacggggtttcttttaggggttgaaaatgctttggaacttgatacagagggtggttgcacaacattgggaatatacaaatgctgctgaatggtgcactttaaaacggttaattttaggctgggcacggtggctcacgcctgcactgggggtttccatttgtggcatgaacatcactgaaagcgcaccagcttccatgtcgtatcaaggggttcgggatgtccacgtgtcttatgctggtggtattaaccttgctcgcctggacagggacacctgtgagtgagagcaggccattagtgtggggcaggtgggcctcaa

SEQ ID NO: 41280 - DNA, 1005 bp, Artificial sequence
  DNA replication origin
cggggcgggggggggctgggaggagggcggggcgggggggggggcgctgggaggagggcggggcggggcagggggcggaggcgggagggcagggccgacggacggcgggcggcggcggcggtggcggcgctggagtcggcgcgggtgctggcgccatggaggccgagcggggtcccgagcgccggcctgcggagcgtagcagcccgggccagacgccggaggagggcgcgcaggccttggccgagttcgcggcgctgcacggcccggcgctgcgcgcttcgggggtccccgaacgttactggggccgcctcctgcacaagctggagcacgaggtgcggggaagggcggcgggcacgtgcggcggccggggtgggagcgcggcgggagcccgcggcgcgggacagggaagagcgctcccgggcggcgggagccgcggtgagccacccagagcgcgtcctgggcagctctggagcggcgtggagttgggggccgaagagtgacagcaggagaccggggtacctgcggccctgatctgcccgggcccgagaccggctgagggctgcgttgggaactttaggtcctccacacacccgagcctgacacagccctgcgaggagtgaaactcatcacccccacttcacagatgagaacactgcggctccgagagtcccttcagagggattctttcagccgctgcctcacagggacaacgggaaccccgtgaatttgtgtagctgtaactgttgggttcacagaattcggtgttttttcatttgatttgagcctcggggtcccctcatcttgcaggttaaagaaaacaggctgtgagaggtggaggagaaatctaaagaaaaatggaaaagattgagaagcctctaggttctctccctttttgtgaggacggcccatccggctcacctgcctcctccactccaaagcgttccccactgtcctggctggggatgagccctggatttttattgcgtgcccagaggctgaggccac

SEQ ID NO: 41281 - DNA, 1495 bp, Artificial sequence
  DNA replication origin
ctgccagtcacgtgctgccgccctcggctcctgatttcctcctcaagctgcttaggcagaaaccagggatgcgtcctgggctctctccccgcaatctctgtccccccagctccgccctgggagcatcgctcccaaactggaagcatcctgacactgctctggggacacaaacctcagccggagggccatcctcctccacagcagctcccagctcctcacacgcaccagagcctctcggccccttctttcccccacctctttccccccatccttccgccctcagctgggacatcctgtcgtactctgggcggcctgcccggaccccctgacctgggcacaccctttgcagccccttaggtcccgcgtgcccctccttcctggcgcccaccagcactcactttaggtttgttctgtgaatatttagtccctgcccccacagcacagaggagggcaggagcatctgtctccagggtgtgggttcagggcacgcgtgtgtgtgtgcggggggtgggggagtgtgctgtgtggtgtgtttgtggaggcatgtgtggtgagtttggaggtgttcagtgtgtgtggtgactgtggtgtgtgtgtaggggtgtgtgttgagtgggtgtgtatagtgtgtatgtaggggtatgtaggggtgtgtgtgctgggtgtgtaggggtgtgtgttgagtgggtgtgtgtggggtgtagtgagtgggggtgtggtgggtgtgtggtgtgtttgggggggtgtgtggtgaatggaggcggtgtgtgtagtgggtgggggtgtggtggatgtgtggtgtgtatgggggtgtgtatggtcgatggaggtgagggtgtgtggtgtgtgtgggggtgagtgtgtggtgagtgggtgtgtggtatgtatatagggtgtgtgatgagtgggggtggaggtgtgaatagaggtggggtgagtgtggtgagtgggtgtgtggtgtgtatataggggtgtgtgtggtgagtgggggtgggggtgtttgtggtgaggggtgtgtggtgggtgtggtgtgtgtgggggtgagtggtgagtgggtgtgtggtgtgtgtgggggtgagtggtgagtgggtgtgtggtgtgtgtgggggtgagtgtgtggtgagtgggtggtgtgtgtgtgggtgagtggtgagtgggcgtgtggtgtgtgtgggggtgagtgtgtggtgagtgggtggtgtgtgtgggggtgagtgagtggtgagtgggtgtgtggtgtgtgtgggggtgagtgtgtggtgagtgggtgtatggtatggggtgtggtgggtgtgtggtgagtgggtgtgtggtgtggggtgtggtgggtgtgtacacagagatgagtgtgtgccaggacaggtccaccccagacacagcagatgcagtcacagtcaacagggcgaggagctctcacgcgccagcaggtggtggtcgccatttgctgaacaccttccctgggccaggctctggggactctgtcaggaaccagacc

SEQ ID NO: 41282 - DNA, 1612 bp, Artificial sequence
  DNA replication origin
tcactgtcatttgaagagcactcctctgtgctgggcctcgggcatgtgatcacagtctgaggagggacaaggagtggacaggacagcaaggccacagtcgaggggcgcgagggggcacgggaaccagaacaggccctctctagtctgggatgtggttcagggaagcttcctggaggagaagtcacgttagctaagacctcagggctccaggagttggggagcctgagtcagggtcgggggacagagcagggatgtcgtgaggcctagggccgcccaggagggcagcgtcgtgctgcagggaagcaggtgaggccggcccccagcgggcgggtgtgcgctggaggggagagcctggacgcaggacaggcagaaccagcacacgagacagtcctagttctagtggagctcacatgcccgtgcggaagatggacagtgggccagtgaacatgcccacaggtacagtgaggccagaggtgatggggcctggcagacaccactcttgagttggatggggagccataggaatgcttagagcaaggacgcaggctcatgcgcgctcttacgggaaggctgagtagcgggggcggagcaaggacggggaggagcatgagatggagggggctcctagggagagacagacttcaaggacgactccaagggtttggccaattgggcagaggtggtatcgcttcctgacgccggccaaatccccaaggatttgaggaagagtgggctggggggagggaaacttgatgaagagtgggctgcggggatggggtgcgcaggctggacatgttcagtctgagacgctcacaagtcatccacatggagatgttggatgggcagttgcagccacaagtccgaagcctcaaacaatagggttggccaggggtgtaaactgggaagccggaggagaagaaatgatacctggcgggggaggagggaagctgttggagaagaggtgacacctggcggatggggggtgggggttgggggaagctgttggtaaagaggtgacacctggcagggtggggaagctgttggtaaagaggtgacacctggcggggtggggaagctgttggtaaagaggtgacacctggcggggtggggggaagctgttagagaagaggtgacggcagtgttgggggaagctgttggaaaagaggtgacacctggcagtgggggtgggagggaagctgttggtaaagagatgacacctggcggggggtgggtggggggaagttgttgataaagaggtgacacctggagagggcggggaagctgttggtaaagagatgacacctggcaggggaagggccaggttggggaagctgggactctggctcagacagtggagggggacagccgtactgacaaggggggacaaagggagcttggtgatgtcatcttctactttctttttttgtttgtttgtttttatttttgagacagagtctcgctctgtagccaggctgcagtgcaatggtgtaatctcagctcaccgcaactctgcctcccaggttcaacctattctactgcctcagcctcccaagtagctaggactacaggtgcgcgccaccgtgtccggctaatttttgtatttttagtagag

SEQ ID NO: 41283 - DNA, 1027 bp, Artificial sequence
  DNA replication origin
cagacctgcaagctgaccagctgtggaagggagcaaggtgggacagcagtgcaggacccagcaaaccacgacgcgctgggcgtccctctcctggcggtgggctgggcacactgctctgcacgaggggtgtgaaggcactttgtgaacggatgatgcacacacttcgggcatgagtccctcatgagatggtctcatctcctctacactcccatgcggcatgttttcctctgcaccctgccctgtgtgagacgtgagaaacacaaggatgacttaaacacatccctgcccttcttgggagctcatggactggtcctgcagtagagggctgaaccatttcaaacacatgagtgcaagtaaagaggaagacgtgcacgcctgcctaagagtcagagacagcttcagagaggaggtgaaagtgcgctgggttttgatggatgactaagagttctccaggaagggaggggaatgggaaatggcagtaaaggcagaggatgacacataccgaggttgtaatcagtaaagggcacgtgtgccgtaacagggagaacaacaggcagatggggaggaaccaggagagaggaactggactgtgggaggccttgggaggcaggaaggcagcagtgcctgacaatggaggaactcggaggggggcggagaaagcgccccggctgcaggatgcaggagggaagggggatgaggcggaggtagggacaccaattagcaaccacaacctttgaagaaggcagggcaacaggggtgaggaagctggctgggtttgggaggtgagtagagctcggacgtgggatccggtcacactaggatgtgggagccacacaggggaagggtgaaggcagcaccccagcgctggtgccccactgatgggggacgcgctaggaagcacaggtctgggaggatgggaagatgctgcgtttggttttgggcaggtgggaattctgtagctggggtccccgtctaggggacagttggtactggggtcagagctggagaagtggccactgctggtcag

SEQ ID NO: 41284 - DNA, 2476 bp, Artificial sequence
  DNA replication origin
caagcaattccgtggctgtcccaggtccacagcgcctggagggatgggtgcccgtgtccatcctggtgtctgtttgtttctctacaccatgggcctcactggagggtgcttgagcctctgccctgtgcctgacacttttcctgtgtggttgcttttgattcacttgcaacctagcagagaccctggggccactgcctctcccgtccccggtgcccttctcaactcccttcaccctgttgaccgtccagctgctcccgatgcctgggtgcctccttcaggccagcctgtccttgcaccgtggccagggttcctctgacaccgaagattccagcttgttccggttggccagaggagtcctcgtcccagcagctgtggttacctatgggagacaatgggcccaggagcctgaagccaggcccaaagctggcggaactcagagggacaggaccctgtctagcaggaatttggactgtgccgtgacagtgaagggtgccctgtcagccatgaggagaaggagaatgagcccattttaggaagatcacacttgcctcagttgtacaggtgaagcagggagtggggccagagagagcactggaagccatcagggtctggaacccatatggggacagcaaggggagagggcaggatggctgagggggagacgacgggaggatggccaggggaggtgacagggttgctgaggaggaggtgacaggagggtggctgagaagggaggtgacaggagggtggctgagggggaggtgacaggagggtgactgagggaggtgacaggagggtggctgaggaggaggtgacaggagggtggccaaagagggaggtgacaggagggtggctgagggagatgacaggagggtggccaagggaggtgacaggaggatggctgagggaggtgacaggatagctgaggaggagatgacagaagggtggccaagggaggtgacagggtgactgaggaggaggtgacaggagggtggccaaagagggaggtgacaggaggatggctgagggaggtgacagggtagctgaggaggagatgacagaagggtggccaagggaggtgacagggtgactgaggaggaggtgacaggagggtggccaagggaggtgacaggaggatggctgagggaggtgacaggatagctgaggaggagatgacagaagggtggccaagggaggtgacagggtgactgaggaggaggtgacaggagggtggccaagggaggtgacaggaggatggctgagggaggtgacaggatagctgaggaggagatgacagaagggtggccaagggaggtgacagggtgactgaggaggaggtgacaggagggtggccaaagagggaggtgacaggaggatggctgagggaggtgacagggtagctgaggaggagatgacagaagggtggccaagggaggtgacagggtgactgaggaggaggtgacaggagggtggccaaagagggaggtgacaggaggatggctgagggaggtgacagggtagctgaggaggagatgacaggagggtggccaatgagggaggtgacaggagggtggccgaggaggaaggtgacaggagggtggccgaggaggaaggtggtggggatgtgtgaaagaaaggtgacagaaggagggctgataggggaagttggtaggagcatggctgagagaggaggtgacagcgtagcaggggaaaggtagcaggaggatgtctgcagggggaagggacagcaggatgggtgaggggaagggacaggaggatgggtgaggggaagggacagcaggatgggtgaggggaagggacggggatgggtgaggggaagggacgggaggatgggtgaggggaagggacagggggatgggtgaggggaagggacaggaggatgggtgaggggaagggacgggggatgggtgaggggacggtgagagacttggtgagctgactctcggcagagccctctgtctgccccgggtttacacttcagcgaggcctgttacccgcgtcacataggtggggaatatttaagtttcggtggctctggacaaggtggggccttgttctcttcgtagcgcagaacgctggaggtctgggagacctggggctcaaggcagggcccactggtctctactttggaagaggcagacagcgccgaaccctgcccagcgccttgctcagcatcagattcatgcggtccgggaaagccttgtgcagagggccgctgcccaccttcctcctcctgactggctggctcaggcctggcccagcctgggctgtaatcaattgcagggacttgattggcttgagtgaggaaaagctcagtattcaaggcttcattgaggcttaggagcttgggacacttgtggagtttcagatctccctaggggactggggacatcaggattcttctgccgtctgtactgcactttagtgaccacatgtccaagcctctgcattccac

SEQ ID NO: 41285 - DNA, 835 bp, Artificial sequence
  DNA replication origin
cttttcagccaggctgtgtgtgctctgttcctttgaagcccggctttctccccagcaggactccaggtggagctgaggcccctggttgaaagaagggtgtgctgtgggcagatcacacccgcagccacagcctgtttgttacaggtttggcctgtaagcatctgctgtgctgaggaggttacaaaccttagcgtcccctacaggactggggttggggaggggatgacgtgggagcagcgacagcaggggctgctggggccacacgcttactctgagccaggcacgggcctgagcactgcccaaagacaagctcactccacctttgccactgcccggcgaggctgggttgtgacgctgaggaaggcgaagcccagcgaagttagggaagaggcagagccaggatctgagccaggcacgctagctatggggcccgctccttgggaggtgatgcggtgtgagaggaaagaaacgggtggtgcagcagacggtgctggagctgatgagaaagccaggtgggaagcttgtggggaatgtgccaggctgggcgcgtgcaaaggccctggggtgggaatgggcacgtgaaaagctgaacaaagggtgggacgaaggagcagagagcacgaagcgggaggagcccgaggcggggaggtgggggctggacaacatggggcctggtgggctgtggcaagagtttggattttgggtggagggcagctgtgggaaagctggttgagcagaggtaggaagtgatgcttaggggagaggggaggccatctgggagaacgccagcacttccaggggctggcatctcataaattgtgcagtggctggtgtt

SEQ ID NO: 41286 - DNA, 849 bp, Artificial sequence
  DNA replication origin
agtccgcagacatacatcatgtgccccgtgcactgttcaaaaccctgggatactgtgatgctcaaaacagacagggtccctgttctcaggggctctgtgttgcctgggggtagacagaaacagtcacaaggaagattccaggtgggtgggggcgtgctctgaaggaagcaggggagggacacgttgcagaatggcctgtctgccactttagcttagtggtcagagagagcatctctgggaaagcggcacgtgagctgaggtctgaaggagaaggaggaggcagccgtgccaagacaagcaaagaacattccaggcagaggagcaaatgccaaggcctggagatgggaacaggacagctggggtcaagggagagcaggacacagcagcctggctggaggcgggtgagcgaggaggagcccggggggacgtgggcagagcagttcctgtgggcttggtggccgggaaagggagttcatgtttatgacacctttgtgggctttcaggcagggggatggcatgaggtccatgagggatggaggatggacagaggcaggatggaggcagggagttcgagaatccaggccagagacgagggcgactggcccagccgtggcagccctggaggggagcgaatgtgttgtactcgtggtgaatttcacaggcagaattgaaaggactggacctgctaagggcttcaatgtggggagaaagcagcatcaaaaataactaccaggtgttttgcctgaagcaactgtgggttgtgtgaccatttgctgagctggggaaggctgagggcagactgagctttgtctcattctattctgcttttgtgggagggggacttgggag

SEQ ID NO: 41287 - DNA, 1140 bp, Artificial sequence
  DNA replication origin
ctcaggttagcccagttgagggtgtggttctgccaccagacactttggtgtgggggcgtggaagccagatgatgaatcccgtgtttccacaggctaggggcagggtgggatcccacgttcaggtgacctgcaggagcctcctggcatggccttggtgtccccatctggaacccaaagggactagatttaaactcctccaaggacccttctggctctaaattctagaatgaggagagtggggggagggttggagctatgctttggggggggtagaatgaggagagtggggggagggttggagctatgcttgttgggggggtagaatgaggagagtaggggagggttggagtgatgcttgtggggggatagtgaggagagtaggggagggctggagtgatgcttgtggggggatagaatgaggagagtgggggagggttgaagcaatgcttgtggggggatagaatgaggagagtggggggagggttggagctatgcttgtggggggtagaatgaggagagtgggggagggttggagcaatgcttgtggggggatagagtgaggagaatgggggagggctggagtgatgcttgtggggggatagagtaaggagagtaggggatagagtgaggagagtaggggagggctggagtgatgcttgttgggggagtaggacagacggaggaggaggttcttcctcactgtctccttaagcctcagttttctcatctttttagcagaacaatagctcaatgggatggttgcgacaataaataaggccaagcgtattgatagcattgtccctgccacagagtagctgcgccaaagatgctaccagttgccacttgtcacaccagattgtcctgtgacagctgttattgccaatgagcccaccgatcaatggacgggcaaaggcaagagctccccctgccctacactatcggccacctgccctggggccacaccttacctcttattccccccacacccctacccacagggtcagtcgacgtggatgagtgctcagagggcacagatgactgccacatcgatgccatctgtcagaacacgcccaagtcctacaaatgcctctgcaagccaggctacaagggggaaggcaagcagtgtgaaggtgagtccag

SEQ ID NO: 41288 - DNA, 1252 bp, Artificial sequence
  DNA replication origin
ggacagaagagccggcgccgagggagcagacaaaaggaagcccggagaaaagacagatgcggaagggtagagaggaggcccgcaccgcccggggaaggaggaggaggccggtggatcagggggaatcaagagggatggtcccaccgatgataagggagagagagaggaggagacgggggacagatggacgccgcagaaaaacggggttggggggggcggtgagagggagaccgggaaagagagagggacagagatacctggaaagccgcagacgagggaccgggaccgtctgacaggacggggaggaaagacagagggaaggaaggcagaggatccggaggacagacacagggaggagagtccggacgcgggacgtcggtggagcagacccaggaaggggagggggagacccggaggccacaggcccaggcccgtgggtttcacggggacccccccaccctcccacccggtcccctcctgctctctgtcttcaggggcttcccgaaaagctggagtcacattctcccctcctcgtcatcagaggcgcttcctccggtgctctgcttggagggggaggcagggggagggtcctgcacgtccttcccggcttcctgaggtctggtatgggtggcgtagggtctattcctggtggtcccgcgtgccccgagtgaggatgctgggcctgtgagactcttccacagcaacacccctcctggaagcccagccctgctgccccatcatcccccttgtgtctgtgggtgtctctcccaagctttggggtccctcacctctgagtgactgttcctgggcgtgcctatccccacctgtgtccctcctcgtgtctctctgtatctgactctgtctcctccacgaccctctccgtggaagccctgtgactgtgaaaccccagcagcatgtccccagcataagcaaaccagagtcaaagggagcagcctgtgctaggagggctgggtcgccctgcaggggagtctccagcccagacaggagcgggagcatggcagagaaccgatggggacaagtggcttctccctctctctcctcaaactcccatgtcctctccccacactccacaccaaggacacccaagtgtttaaaggtgtgttgggagatagctccacccacccctcatcaacatccatccatttccattccagtgaagacacctgcctaggtgggagattaggggtgagggcacaaggggctcccacccctcattcctacatactggccc

SEQ ID NO: 41289 - DNA, 992 bp, Artificial sequence
  DNA replication origin
gccccgcacgcccgcacgcccagcggggcccgcattgagcatgggcgcggcggccgtgcgctggcacttgtgcgtgctgctggccctgggcacacgcgggcggctggccgggggcagcgggctcccaggtaagcccccgaccgaggtggggggcggcgggcgcggggggctcgggcggccgaggcgcggtcccggagggcttcttccccgcggatcccgagctcgccccgcgcggccccgcgccccctgcctctttgcaaagtaacttctagggccggcccggggcgccccctccccgcagcccgggcggccggggctcctgagtccggcggggccgcaccaggggtgggtgggccggggccccgggaggggaagcgcgagcgcgggagcgaggaagaaaggcggcggttcccggggaccccgcgtgcggacctgggcggggcgggaccccgagcgcagaggggcgctcctcctgggagagggggcgcggggcggggcgggcggagggggacacgccaggaggtggacggggaaagggacggaccgagagaccgggacggggcgggaggtgcgggacagacggacagaagagccggcgccgagggagcagacaaaaggaagcccggagaaaagacagatgcggaagggtagagaggaggcccgcaccgcccggggaaggaggaggaggccggtggatcagggggaatcaagagggatggtcccaccgatgataagggagagagagaggaggagacgggggacagatggacgccgcagaaaaacggggttggggggggcggtgagagggagaccgggaaagagagagggacagagatacctggaaagccgcagacgagggaccgggaccgtctgacaggacggggaggaaagacagagggaaggaaggcagaggatccggaggacagacacagggaggagagtccggacgcgggacgtcggtggagcagacccaggaaggggagggggagacc

SEQ ID NO: 41290 - DNA, 1525 bp, Artificial sequence
  DNA replication origin
actcatccgtttctgcacgcagccctccagcacatcactgtcatgtgcatacagtgctctgcagttttcaagatgcttccagaacattctctggctcacttattcagtcctcgccttcactcatggaccttggcagattctctatttgttcttctcatccattaggcaaatatcctctttatgttctgtgtctagcccaggtcacctgtcctaagaggcctccctgacggcgccctggggcagaagtgacctcctctttctctgctccacaggccgcctcctttccttcacctgtgaggggcttacaggtgtgtcttctctccatttccctcctcctctgctcgctgagtcctccacatagacaacagctgcctagaaggaaccactttctctctgcctgcacaccttagagggtgataattcaccagcaaacttgacctgagcaatcgcttgggggcaggctggggactacaacttggtacaagggacagctacctctgggctgaggggtcacagagtaacctgcctccattcctgccttgatttgtggggatggagcctggaagaagcttctcttgctgccatcaagcttgaggggcacctggctagggctgggcgggggggtgcctaatgaccaggcacattagagggcattgtttcaagtaggtcagagccccctggaagaacctcccccaccacctcacactgcttgccctgttgcccaatgcacaagataatatgtggttctgagggaactccccaccccctgcagaaactcaaagctacacaattgacggggacaaaataaagcctgtcaacagcatctcccaaattaaaccagcagccaggagcagccgtgcagaccgaaatgtctggagcaatggggtgggggctcagtggagacaacaggcagcgcttccttcttctttgggcatctctggaccccccacacccccgatccccatgtaggggaccccttgcctcagccaccaggcccgtgccacaagctgatgtgaagtcagatggggtgtgagagctggctggacacagatttaaccttccagggctgaggagctcgtctacggtaggttggatgagggcgtgaagaagcatgtgtgagcgtgtgtgtgctggagggtgtgagggtgtgaggctgtgtctgagtgattgcacgtgagagcatgtgtctgcatgtgtgactgtgtgtgtgtgtgtgtgtgtgtgtgtgtgtgtgtgtgtgcgtgtgtgtgttgggggcaggaaagggagctggtgtggaggggctcaaactggtgcaggcagagtggacaaaaagagaaaagagttgtctttgagttgggcctggagagcaggagaagaaaaaaggagctcttattggtggttgtcaaggagatgggccttggggtttgctgaactttcgtcccttaaagcgtcctgcctggaactgagaggggccatttatttccagccgcccgtccctcccaggcccggtgggaccagacccgaagccaaccctcgccaggcg

SEQ ID NO: 41291 - DNA, 1581 bp, Artificial sequence
  DNA replication origin
gctgactattggcggagcacctggggtgggtgccatgggcacctgagagggaactttgacctgagcggaggtcagaaccctcctctgaggaagtgccccaccccactgagctcccagaggctggtggcaggttgaacaggggactatgccagcagagggactgccttccagagactttggatcatcaccacgatgggttgattttacaaatttagccactgtcaccggaggcctggctgaacttcagagtttcttctccagcgtcggtttcttggtttgtaatggggagggctggatccccctgcactgatactcccatggcatggctgcgggaggggcgcccatcctgctggcctggtggctgtggagcggccggaggtggcgtgtgccaaagctgctgctggtgctccctctggctgccttggggtgatgacaggagctgacggcttggcagcagctcccagggaggcagcagccgggctggcggcgggtggtggcggtggtgggagggggcttctggagagaacaaagcactgaggatgctgggctccaggggcgacagaggagtgggggatgggggcagggttctggagtgtgtggcccacagggaggccatggcacgggtgtgtgtgcgggtgtaggatttggaacccacctcgtggttgtgtgagcccaggcaggtcacttagcctctctgggcctcagtttccacagttgtgcaattggaacaataccatcattacattattgtatccccagtgctgagagtagtgagtggcacagagtaggcattcactgaatttttctggagtcaacaaatcaataggtttgatggaagacggaactggctaattcatgctcagctcagtgatgggcccatgttcgttctagagaagcagtatctttgttattgctgctgtgattgtttatcaagggtgcagaggactgagccagcatggagtcccagggcaggagaagaaagttggtcagtgcatctggatgaggctggactctgggaccagaccatggagacttgagggccacagccgggcggctgagagtgggggaggggcccatatgccaggagtgagcaggatgaggtctgagcaagaccacactagacaccagggagaacgttggtggccctggcctggcctgaggaggcagggaagcagagagggcacctgcgatggctgtttaaggaaactcagttgaggaggtggatgagatggggcaggagtaggagggtgaggtgggagggacagaggcctgtttcttaggtcagttgatgcgagcaagtatgaatgcagatggagaggggtgggtgcaccgggcgtacctgaaggtgtggagaagtggggtaccaagtagagggctcttgagggaggcagacactggaggggagagaggagtttcaggaagggctgcagcttagggtttaggctggtgagggtttccttggttcagtgagatacaaagtatgcttgtcttcaaggcagagaactggagaccccacgagctgtgaggagaggaaggtctggggagagatggcagtgtggaggtggcagagccctgctggac

SEQ ID NO: 41292 - DNA, 982 bp, Artificial sequence
  DNA replication origin
tgccagctctgattccagcaagtaccaatcagcggtggtccccaggacagccagcaggtgcctgccccagcctccccaaccacaacaggtcccatgctatgcactatgggacctgcatctccattcctactacccagaagacactcagtcaacacagcatgcaccaggatgcatcagacagaggatcctgggaaagcaccctaaaacggaagccattatccaatggtgagaggcactttcccaaggagacaatgcaggagaacttgggagagatcacagagctgggggaggcacagaggagctggggaagaacaggagagctagggaagggataattgaggtggggagggtcaggagagctggggaggtacagtggagccggggggagggtcaggagagctggggaaggacagtagaggtaggggagggacagagaagctggggagggacaggagagctgggggagggacagtagaggtgggggagggacagaagctggggagggacaggagagctgggggagggacagaagaggtggaggagggacagtagagctgggggagggacagtaggactggaggagggacaggagagctggggagggacagtagaggtgggggagggacagaagaggtggggaagggacagtagagctggggagaaggagcagtgctggggaaatagcaccagacaaactttgcagctgccccctgctgccctcctcagaaaataggcctctcccctgcattcctgcaaggtccacctgctccctttgcccactgcttttcccctgcctgggacctgttctacctttgggaacatctacctgtgagaagttttttcttctgttgagcttggaacttctccctttgcttctcactccacctccaggactgcacagcaccctcagctccctcctgggttccccagggagccttggggccatcagtggaactccctgagcctcttcctccccaggctc

SEQ ID NO: 41293 - DNA, 1860 bp, Artificial sequence
  DNA replication origin
tctccgcgcccggccgccgggaggggcgcgctcgcggcctcggtcccggcccttgcgccgccacccgccggggcccccgccaggcccgccaggcctcggccctcggcccccgcccgggctcggagtccgcatcccgctgcggagggacagggagcgcggccgcgggcctggacgcgggaggaggagcggggcccgcgctgcggaaaagggagggggccgccccactgcgcccggcgcccctcttggcgcccgcccccagccccggaccgggccgcgcgcgggctgggcagggagcggggcgggggcgctctcacctccggatccgtggcctccgcagcgggcaccgcgtgcaggggcgtgcgcggctccttccggggcgccgcagccttcgcccgaggcccggaccccctcctggggccgccggggcaccctgctgtgggcccctcccgcccggggtctggaaggtccccctccggagacggagacactctgaccccagctcccagtctgaataggtcggggtcctcctcctgggccaccatctcttccactcgggagtcacaggtccccaatcccgggcacagcaggtagcctgcagcggccggagccccaacgggatgggtaaacaagtcaggaactcagacggcgcgacacccagtgtaaagaggccctgccttgctgggaagagcagagaccatcgccttcagtgtcgggggtcaccctggggagtttaaggccctgtggcttccagccccttgccgcgggtgggacggggattccagggccttgtatagttagggtgcagatcactctggcctgggcctcccagactgagaggaagatgaaaaggggctgtggctcctcagaggcccaaagcccctcaacaaatgcttgtagggtctcccttcaccaacacacacatcacacaatccccaaggacaccctctgcgggcccctcaggcctattctgcccctgaggactgctatctggtgtggcttcctggaggtggggacagcccagttgaatgagtgtatgccaggagagaaggcctggaaaagacatccaggccgagggaatgcggcatgcaaaggccttggcatgtgagttcattggggctagagacaaaggaaaagcaagggagggaagatgaggtggcaaggctgggagtgagggaacagaagccagatcgggaagagccttggatagactttatcaggggcagtgggagccatagagggtttttaagcagggctgtgacttggtcacgtttatctttttacagcttgttctggcacctctaaagacagaggtagagggggagaggctgggctatggagggagaggatggaggcctggggccctcaggccagagatggggggcaagggctggccgaggagtcctgaggcagtcaccccctcctgcttccttgtctttagaccccaattctctctcagggaatcccaaactcaacccgggagcctctttctcctcctaggctacaggcttcctgagcaccgtgacttcgagggaggtgaaggagaaaactgtcatgcctgcctgggaaggcggcttggactcagtgtctcagcagaccccacctgccgcctgcctgggacaaagccacagcttggctgtggcctctggagatcacaaaggacagtgacaaatgtgccttcctggtccctgggtcgagagcagaggttcctgtgacacttgtcctccaaggccagcttccccaccacctccagtcctaccagaactaccctcaagtcccagagcatcatctcttaccttcccagggtacacatttattgagcatctaccatattcctggcactcggcacttgctttgaagcca

SEQ ID NO: 41294 - DNA, 1171 bp, Artificial sequence
  DNA replication origin
cgggcggggggagccaaggaggctcggagcctcgcggcgcgcgggcgggcggcggagggggcgcggggagccccccgccccacgaaggaggagtctggctcccacttgcagcctcggacgcgcggcgaggcggccgccgccggaggagcccccgcccctgcgcgcctccctcccgggagcccctgcctccctcggtgcgcgctgctgctcgcagccgccgcggccgccgaagaggagcccggggccaggtaggaccggaggcgggcggggcgcggcgggcgcgggcgggaggccgggcgcggggcgcggccgggaccctctccaggcgctgggcgacgcccgcggcgctgcgcaggggcgcccgcaaagttactttggccgcctttgccgggtgcgggaagcgggctgggcaccccagctgccccgcctgcctagcgggcggcggcgggagggggctccgccagggcgcgggactccggctggggccgcggggtcagcgaaacttttcccttgctcgccagtcgctgctgctgctggcggagtagctggtggaagcagcgggctggtggagtgccagtgatgatgatagtggtaacaatagcagcccccgcttgtagagagcctactgtgtgcgctgccaagcccctgctggcacttgggggggaagagatagggaacgaacgctggccgagtggccacttttgctaggtattgctggaaacttcatccatttccttccatccattcatccctccctcccatccatccatccatccatccatccatccatccactcactcaacacatatttattcctgtctgctatgtgctcggccaggggattcagtggctacctagacaggtcccagccctcaaagggaatgttgatcatggaatgcccaaactaaggagcagttctgtctcctgtgtgtttgttctgggacatgttacgggagcgtgaattcatgctgtctcccttcaccctggcagggccagaggcgtgtcattcagagcactgatgtgcccaggagtctggcaggccccggcctggccttcggaactcaccctgctcctttccctcccacctctccgggctcaagctgggtggcccagttggtgtcaggaggctccactccggaactggcccccacccctgtccagctgacctctc

SEQ ID NO: 41295 - DNA, 1532 bp, Artificial sequence
  DNA replication origin
ctaggtattgctggaaacttcatccatttccttccatccattcatccctccctcccatccatccatccatccatccatccatccatccactcactcaacacatatttattcctgtctgctatgtgctcggccaggggattcagtggctacctagacaggtcccagccctcaaagggaatgttgatcatggaatgcccaaactaaggagcagttctgtctcctgtgtgtttgttctgggacatgttacgggagcgtgaattcatgctgtctcccttcaccctggcagggccagaggcgtgtcattcagagcactgatgtgcccaggagtctggcaggccccggcctggccttcggaactcaccctgctcctttccctcccacctctccgggctcaagctgggtggcccagttggtgtcaggaggctccactccggaactggcccccacccctgtccagctgacctctctgggatgtctcttccccagtgctgggctggcctggctcccagctcccctcccagagtttctttgccttccccctccccatttcccctgctctattgaatggcccagaggagagcttgttaagtggcaaacaattatgaaattaaactgggggaacaaaagtgggctggctgttgaatggcggagctggctcacgggagttgaatggcactgggagacttgttagcagggatctgcggcgccggggggcgggggcgggtcaggcagacaggcactgtcaataatctgactggactttgcaaaaaaaaaaaaaaaattaaaccaacttggtgagaaacctggcacagggcgatgttggagaggccaccagctgactgccacgtccagtcggaagccagatcttggtgtacaggagccagggctctaagagactatttggggagggtgctgatggattcggccgggctgaggcaggggagaacctcaatgcgtttgagcttgtggtgctagggaggcattctggagccaggcgcagtctgcaggggccctctgtgtgggaaccacgcatgataaactgcgcttcaccgtgctgggctccttgcaaattggctttctgagtggcagccccacaacacttgtaaaatctttttctggagatggatttcggtggaatggttccatcgattctagtgcttgctcactggaggtacattaattgggcgatggctagtcaaaaggcgataatccagtcacggaggcttaatcgtgtgttcggaagtgtttcagtgtgggactgccttcctatttatttctcggccccaggaatttcggaagacctggattgaatgaggtccctgtactggtgatgtggatgggttcagagagtcacctacatggccgaggaggtacctctgatgtaaccaccccgtggtacgcttagaatcactcacatccaccctggctgatgccccgtgggctatgcctgtagacagataggacaggtttagatctaggcgaacaataagaattttagggtgttttacttgagccccaactgtcaggaatac

SEQ ID NO: 41296 - DNA, 1532 bp, Artificial sequence
  DNA replication origin
cccaggctggagtgcagtggtgcgatctcagctcactgtaacttccgcctcccgggttcaagcgattctcctgtctcagcctccatagtagctgacactacaggcgcctgccaccacaccaagctaattttttatatttttagtagagacgacgtttcaccatgttggccaggctggtcttgaactcctgacctcaagtgatccacccaccttggcctcccaaagtgctgggaatacaggtgtgaggcattgtgcctggcctctttctccatattttgactctttttgctctttccttcacttgcaaacatagtcaggtttctggatcttcacaccggtggcctctgtgggtgtcccacccacagatgtatccttataccaagcaggtccctggcatttagaggcattcagtaagatttgtccataggttgattgaatgaaatgaagtccagcctggtaacagtccagcctggtgtgagttctggacccaaaaaccagcttcaaatttcagctgcaccaactcctgtagctaagatcatggacaagtcagccttttctgagccttggtttgctcacctgtaaaatggggctacccatagtaccctgcttagatggtcattatgagggtgaagagagccactgcctgtaacgtgcccagcacataatgagctcttgatgcgtggggatcattgaaatcattactgttgttattatttcaaagttgagcatttgttgcaatccaaatagctgggggactgtgtcgggaaatgagagtctatttctttctctggggatgactaggtctgcctcttcgctgtgctccagaagcctcggggtgcagggaaatatgagtggagttaattaaagatctctggctccagcagcaggcccagcccaaccagagccctcagaaccgcactgctcttggctggctggtggtgggtgggagctgaggccctcttagggctcctctgctaggcggggctcccagagggtagactgtcgggtccctagcagctcgggggtggcattgtgctccctgtctctcccatcttcatctctctttgtctctttgacttagtctttgtcaccttatgacatcttcaaaacctcagaggcacacagagagagagagagagacacagagagaaagaaagggaagagagggagggaaagagagagaaagggaggagagagagagaaagggaggagagagagggaaagagagagagagaaagggaggagagaaagagggaaagagagaaggggaggagagagagaaagggagagagaaagggaggagagagagagaaacggaggagagagagataaagggaggagagagaaagggaggagagaaagggaggagagagataaagagaggagagagagagaaagggaggagagaaagggaggagagagagggaaagagaaagggaggagagagataaagggaggagagaaagaaagggaggagagagagagaaagggaggagagagagggaaagagggaggagagagagagggaaaga

SEQ ID NO: 41297 - DNA, 1355 bp, Artificial sequence
  DNA replication origin
cttatgacatcttcaaaacctcagaggcacacagagagagagagagagacacagagagaaagaaagggaagagagggagggaaagagagagaaagggaggagagagagagaaagggaggagagagagggaaagagagagagagaaagggaggagagaaagagggaaagagagaaggggaggagagagagaaagggagagagaaagggaggagagagagagaaacggaggagagagagataaagggaggagagagaaagggaggagagaaagggaggagagagataaagagaggagagagagagaaagggaggagagaaagggaggagagagagggaaagagaaagggaggagagagataaagggaggagagaaagaaagggaggagagagagagaaagggaggagagagagggaaagagggaggagagagagagggaaagagagagagaaggggaggagagagagagagagggaaagagaaagggaggagagagagagaaagggaggagagagagagaaagggaggagagagagagaaggggaggagagagagagaaagggaggagagagagaaagggaggagagggaaagagaaagggaggagagagagagaaagggaggagagagagagaaagggaggagagagagagaaagggaggagagagagagaaagggaggagagagagaaagggaggagagagagagggaaagagaaagggaggagagagagagggaaagagaaagggaggagagagagagggaaagagagagaaagggaggagagagagagggagagaatatgaatgaatgaatttgattggctcacttgaattcctgtgccaggccagtagcccagtagcaattggctgcccttggtctgatcagctgtgtgtgggggggcggcagggtatgtaggtcacaccagctgtctgtcatggggagtgggggtcactgggggccccagaggacagaagagtggtgggaatttctgggaaggagatttcagcttccagaccagctcagacactacccctgatggaagcttccagaagaccccaggccaggttagggccttctctgcgccctgtcccctctgctgccctgtcaaaggtgctggctgtattgtcatcgtctggccaaatctgctgccaccatcagtccctgggcttgttgtgagcaggggtcagcctggttcatccctgtggccctgcgctgagctcagggctggcacacggtagtcattcaggatgtattgtattcagtgaatgagtgaatgagtgagtgaatgagtgaatggaggagaagaggaaaagctcctagcacctccctggttggtcatcatcggattcatattc

SEQ ID NO: 41298 - DNA, 1317 bp, Artificial sequence
  DNA replication origin
tcttaatattggctgtggccatggctggctccctggaaagcccggcctctttggggaggggaggtattggggtgggaagaacaaacgggtggggatcaggacagagagtgcttggccttgggggaaggagattggacctggacctggacaggctcctctgaaagctcaggggccactgcagcagccacatggctggaaaatgtcacacccctgcttggagctgcagctcctgtagagtagagacagcaaagctatcctcagaggattgtcaagaggaggaagtataggaatacctggctgctggcaggtcctgtaaaaggcccttcttcctccacaggaccttcatggtggtggccaccccagcaggcagcagagttgccagcactcagcctgcaccccgggaaatgggggccctggggaggctgggaggggcccccaggggaggtgagccttcctgggggtccagatgcagcagaggggtgtgagcatcctggatctgggtttacctctgaggcttcatctgtaaaatggacacgtaagtctccggtgcaggttcatgggagagggagagagaatgggacactcagcagatggcagaggtctcagagagttctcgtgactgttttcatcgctgatatgggtcttggggcttcctgactgtcagggactctgaggtgaggctcctggcaggatggtgcagagtgaagagggctagtgtgtagttcctcccaccttcctgtcgggtagagcacctgcttgttcatttcattcttcgttcattcattcatggccgtcttgagcaacccctccctgaagccggcctgggcaggaggggttcagggatggacctcagtcagggtggagaggggacacctgtgctgggggaggcaggtgatcaagagaaactgctggaagaggtggcctttgagccggtccttaataaaatacgggtcgtggatgatgggagaggctacgaagggcatttcagatttctgaactagcacaagcaaaacctggaggtacagaaaggccagactgtgtttaggaagctggaagtggatggttaaggttgacatgggtggtgagctccgtggggatcctgaacagaatgacctggaaggtgggcagggcagatcctaaagccccgtgtgccacgccgagggctgggcttgtcctggaagcagcagggagccatgggaggcgctggagtggaggaatgacatgcagtaaatgtgtgggtggggtcctaggagccaggggtgcaggcctcttcccctctgtccagtcggggttaagaggggaactggcaagggtcag

SEQ ID NO: 41299 - DNA, 2703 bp, Artificial sequence
  DNA replication origin
tttagctttcttttttttttggttatgtaaataatacttacagaaaaacagaaactgcaggtaagcagaaggagagaggaaagagaattgcctggggacccacagaccgccagtgggtcaaagtcctggtgagtccctgccttccctaggtggagaccttccctgggtctccaggtagcgagctggtcctgagggccccctggcccgtggggagctccgcattccctctgaccaccctgtactttcacccgccctccctcaaacacctgcacttcttctacaggcagccctggttctacggctggggcttcaacctcccgcgaggccaagccctgctggagaaatggaacctcattcccgaaggcgtagacatcctgataacccatggaccaccactgggtaaggctctgctggcctggccctccagctcgcccatctgggctggtgggtgggctctgggatggggggctggctgggcctgtataggggagccctggaggggttctgagtcccacttgctggggcactgaggacacgtcgccccatggtccctcttatttcctgagtgcccactgagagcagggggcttgacttgttatcttgtgggctcctcacaacagcacaggaggccagaatcacctgcccatttgacaggtgggaccctggagcttcggcttatgcctctgcagaccccagtcccgggtgctgaaaatcaccagagccctgcacagggcttcctccgggcagccctaactccctcagaaacctggggtccccacttcctcacccccacccagcccaacatccccagggcctgtagaccacctcccatctctcctctctgcccccaccccaccacccaatccacactgaggtcatcccctcatctgcatactgcctcctccacccctactgtcccatctgggggctctctcagttcccttcctttcctcattcccacagcctggccatcaccacatccctcccattccacctccaaactgcctcccactcccccttctcttcaagctgctgaccctgcctcagtccaggacaatgtcttctctctctctcccatggtcatggtggaggtggtggtgatggaggtagtggtgatggaggtggtgatggtggaggtggtggtggtggaggtggtgatggtggtggaggtgatgaaggtggtggtgatgaaggtgatggtggtgacggaggtgatggtgggaggtggagatggtggtggtggtggtgggaggtggtgatagtcatagaggtagtggcagtggggatggggtggtggtggtgatggaggtggtggtgatggtgatgggggtggtgatggatgtgatggtggtggtgatagaagtggtgacgtgggaggtggtggtggtgggaggtagtgatggtgatggaggtggtggtgatggtgatgggggtggtgatggatgtgatggtggtggtgatagaagtggtggtgatgtgggaggtggtggtggtgggaggtagtgatggtgatggaggtggtggtggtggttatgggggtggtgatggtggtaatggaggtgatggtggtggtgatggaggtggtggtgatggtgggtggtggtggaggtggtggtggtggtagtggaggtggtggtggtagtggaggtggtggtggtggtgatggtggtggtgatgatggtggaggtggtggtggtggtgatgggggtggcggtgatgggggtgatggtggtgatggtggtggtggaggtgatgatggtggtggtgatggaggtggtgatgggggtggtggtggtgatggtgatggaggtggcggtggtgatggtggaggtggtggtggtggtgatggaggtggtgatgggggtggtggtggtgatggtgatggaggtggtggtggtgatggtggaggtggtggtggtggtgatggaggtggtgatgggggtggtggtggtgatggtgatggaggtggtggtggtgatggtggaggtggtggtggtggtggtgatggaggtggtgatgggggtggtggtggtgatggtgatggaggtggcggtggtgatggtggaggtggtggtggtggtgagggaggtggtgatgggggtggtggtggtgatggtgatggaggtggtggtgatggcgatggaggtggtagtgggggtgatgaaggtggtgatggaggtggtaatggaggtggtgggggtggtggtggtgatggtgatggaggtggtggtgatggtgatggaggtggtaatggaggtggtgggggtgatggtggaggtggtgatggaggtggcagtgatgatggtggtgatggtgatggaggtggcggtggtgatgggggtggtggtggtgatggtgatggaggtggtgatggtggtggtggaggtggtggtggtgatggtgatggaggtggtgatgggggtggtggtggtgatggtgatggaggtggtagtggtggtgatggaggtggtaatggaggtggtggtggaggtggtgacggaggtggtggaggtggtggaggcgaaggtcttgccccttccagtccactcgctttacatcagcaggagggagttttctgtatccttatgtgtgccatgccacccctctgtgaccctctgtggttccctcagtcctctgaatgaagttcagtctcccagcagttcggcccatatcagtgtcttgctcccaccgccacctccagaa

SEQ ID NO: 41300 - DNA, 2093 bp, Artificial sequence
  DNA replication origin
ccccaggcctccacattgcctggtccatattagatcgttttccagctcaaaagcaagcaagcctcaaaccattcattccctgagggcctctgcagctcattgtcaaggggaaggagtgatcagacctcacctggccctggagtagctcctggaggagccctaggcacagaggagtcatcaaagcaggatgtgagaggtcctgggagagatgggcagctcacgtgctgtgggataataataatagctgtcattttctgtggccctactatgggcatgtagctccatcagatccaaagttgcctttgacccaaaccacacccccacacaattggacaggcacaattggactccaaagaataggtcctcacccacccactaaccactcccttcctcccccagcaccacgcagggaaggggaaatgttccttctatcttggagatgacctgagctgaaggatgagggggattctaccaaatagaggtggtgagaagagggtatgagggaggcagagaaagtacatgacaatgatgataatgatagtgatgatggtgagaggatggtagtgatagtagtaatgatgatgatggccatgttcacagtggtgtgggtagtgatgatggtgatagtaataatgtcaatgatgatgatgatgatactgatgatgatggtagtggtgacaatggtgataatgataaacgcaatggtggtgatgatgataatggtgatgatgatggtgattgtggtgatgatgatagtgctgatacaataataatgagggtgataataatgacagtggtgttggtggtgatgatcatgatgacatcagtgatggcatcatcaatgatgacaatgatgatgatgatagtgatgatggtggtatgctggtgataacagtggcgatgataatgataagggtagtgatgacgatcatggtgacattggtgatgacaccattcttgatgatggtggtggtggtgatgaatgatggtggtggtggtgatgaatggtaattataagggtggcaatgatgatgttggtggtgatagcaaagatgatggcattggtgatgatgatgttgatggtgatggtggcggtatgttggtgacgttgatggcactagtgatggtggtggtgagaatggcgatgacaatgataaaggcagtgatgatgatagcattggtgataatgatggtgatggtggtggtgataatgatgatgataataggagcagtggtgatgatgttgattgtggtagtgatgatgatggcattggttatgatgatgttgatggtggtgatggggatgatggtggtgatgattgtagtgatgatagatagcattagtgaagatgatgatgatggtggtggtggtggtgatgataagggcggtgatgttgttcatggtgatagtgatgatgatggcatttttgatgatgttggtgatggcgatggtggtggtgatgataaaggtagtgatgatgatgacggtgatggtaatggtggtggaggtaacagtgaagatgatgataagggtgttggtgatgatgttgatcatgatagtgatgatgatgacattagtgatgattatggtggtagtagtggtgaaaaatagtgatgatcacgataagggtggtggtgatgatgatgttgatagtgatgatggtggtacagtggtggtggtgatggtgacgaggatggtggtgaagatgatgtcgatgatgatgactcactgcgtgcttcttatgtgccaggcactgggccgagcacagtacatagataattatctcatataatcctcacagcaggcttggaagtggcatgtatcattatcatctccattttacagatgaagggactgacctcgagagtttaccagcttgccccaaacacattcagcccacaggggctgagtgccctatgactgccacacccccctggccaccctcactactctggctgctggcctgatgggcatgtgcttactttccagggtatggtgtcatggcagatgggacgaccacctatgtgaatgcgtccgtatgcactgtgaactaccagcccgtgaacccgcccatagtcatcgacctccccac

SEQ ID NO: 41301 - DNA, 1358 bp, Artificial sequence
  DNA replication origin
gatagatggagggatggatggatggatgggggatggatgggtggatgggggatggatggatggagggagagatggatggatggatgatggacggagggagggagggatggacggatggcggatggatggttagatggatagatggaggacgaatggatggagggagggatgggtggagggagggatggatagatggatgggggatggatggataggtgggggacggatggatggatggaggatggatggatggatggatggatgggggatggatggatagatggatggatgggggatggatagatggagggatggatagatggggatggagggatgggggatggatggatgatagatgggggatggatgatggatggatggatagatgggggatggatggatgaggggatggatggatagatgggggatggatggatggagggatgggggatggatggatgatagatggggaatggatggagggatagatggggatggatggatgggggatcaatagatggagggatggatggatagagagagggagggagggaaggatggaaggatgggggatggatggatgaatgcatggatgatggatagatggagggagggatggatggatgatggatggagggagggatggatggatgggggatggatggatagatgggggatggatgggtggagggagggatggatggatgggagatggatggatggatggatgggagatggatggatagatggatgggggatggatagatggaaggatggatggatggacagatgggggatggatggatgacagaggggggatggatgaatggatagatggggcatggatggatgggggatggatggatggatggatggatggatagatggggatggatagatggagggatgggggatggatagatggaaggatgggggatggatggatggatggatgttggaaggaggggtggatggtatatagagggatggacggacagatggataaaaatgacagaacttttgcagcttgggggctttcagactagggtcgttgtacctgccagtgtttctcctgggcaatgtctggaccctgtgtttcacaggggctgggctgaacatgccatttccaggaagagtccagcgctaaggcctctggaggtgttctgttttgggagaccaggcagccaagtatttgtacaaaagaggacccagaactgcccacaccaccacctctgggatccccccaccccaggggaggttaaagcaagcagagggacaccgactgctgccacacaggaggtctttggcatccaagctctgtccaggcctcagcattctgcaagaggacaccacgctgc

SEQ ID NO: 41302 - DNA, 722 bp, Artificial sequence
  DNA replication origin
tacagtcatcaaagaggctactcacaccccactttgatggggtgcttctcagcttcaaatgtatccatgtatcttgctagtaaaaagcaagtcacagcttcagaatctaaacccctggttctaaaatcctgccatgacataggaatcacccaacaggctgccccaacgccacaagttctgggttgggggtgggagggaggcagcccggtcaggggtgggagggaggcagcccagtcagaggtgggagggaggcagcccggtggggggttggagggaggcagcccaggtcaggggtgggagggaggcagcctggtgcggggtgggagggaggcagcccggtgggggatgggagggaggcagcccaggtcaggggtgggagggaggcagcctggtgcggggtgggagggaggcagcccggtggggggttggagggaggcagcccaggtcaggggtgggagggaggcagcctggtgcggggtgggagggaggcagcccggtgggggatgggagggaggcagcccggtgggggatgggagggaggcagcccaggtcacaggtgggagggcagtagcccagtggggcatggcctgctgtctctattattgtccttggctctgctcagggtctctccgggtaggcacagcacggccgcctgctgctatctgggacgagcccttcagggaggcacagtgctgggattcccagcccaggtcctggcctgc

SEQ ID NO: 41303 - DNA, 911 bp, Artificial sequence
  DNA replication origin
tcaggggtgggagggaggcagcctggtgcggggtgggagggaggcagcccggtggggggttggagggaggcagcccaggtcaggggtgggagggaggcagcctggtgcggggtgggagggaggcagcccggtgggggatgggagggaggcagcccggtgggggatgggagggaggcagcccaggtcacaggtgggagggcagtagcccagtggggcatggcctgctgtctctattattgtccttggctctgctcagggtctctccgggtaggcacagcacggccgcctgctgctatctgggacgagcccttcagggaggcacagtgctgggattcccagcccaggtcctggcctgcggcaccagggccagacctgcccttgttcagcgcctcacagggtgcgctcctgagcagcaggcagcaccagtaaccaagcgccgcctgccagggcagaaggaacgcggccagggccagcctaggctggaagaggcgggcttgggcctgaagagtggggacagcccatcataaacccagggctcaggctgcccctatcttgttaccttgggtaagatgcacccctaaattggcctccctgtcctcactggggtaaagtgaaaataaaaacagccacctctttggaaagttcaagaggggaggactgcttgagctcaggagcttgagaccagcctgggcaacatgacaaaaccccatctctacaaaaaatacaaaaattagctgggcaaggcatgcacctgtggtcttagctacttgggaggctgaggtgggaggatcacttgagcttgggaggctgatgccatggcgaggcctgatcttgccactgcactccagccttgacgacagagcaagaccctgtctcaaaacaaaaacaaaaccaaaaacaaaccagccacc

SEQ ID NO: 41304 - DNA, 1176 bp, Artificial sequence
  DNA replication origin
cccagcagagtgctttgtgcctaggaaatgctgctccttcatgtccagcagccccatctcacagacgttatggtgagcatggctcggagagctggagctgcaacagggaacagatcagagcccagactcatgcttatgttctagggggaagtgcagtggacacagaaacctctactagatcaggtggtgacatgtgccaaagagaaaagtagaggatcgtgggaggccagtcagggctggtgccattgtacagaggagtcaggaagtgcctctctggagaggggacactcagacacagtcatgaaggagccagagtgagccctgcggacactggagagggctccctgcgataccctgaagcaggctcggcctgttcagagaacagtgaggggacgggtgggatgggggtgtagacaggcttgtgggccacggccaggccttggccttggactctgagtgagaaggagagtcaagggggttgagcagaggcgcctcatgcatgacgtcagctgtaagggatcgctcgggagcgattgcacagagcagaggccacggagccgacgatggcagctgggagccatcacgaggttcctgcaggactccagcgaccttgggtgggggccgaggtggtgtgcctgggagagggggtccagtgctaatgcactctgaagggagagccagcgggatgtgtgggcagactggatgtgggtgtgagaggaagcgagggctcagaagggctcccaggtttgtgtctgagcaaccaggaggaaagagctccacttactgagatgggaagacttaggaggagtagggtggggacagggggtggaggtcaggagtttgatttgggccatgttcagtttgacatcccagagaaaatgcccccagaccactggagatgtgaggctgtgggtcaggggggtggcggcttggggctgagagtatagagggaatcatcaagaaacagatgggcctgcaccccaggaggccccctcgggcagagttagacatcagcctccctgccacactgtattgtcttccggaggcaggggcggcatcttttaaattcatttccacagtatttagcatggcgattgcacatattaggtactgaataatttttggtgaatgaatacatgagtgaatacagagagagctttccacaaaatccccaca

SEQ ID NO: 41305 - DNA, 3488 bp, Artificial sequence
  DNA replication origin
ctggggttttaaaaaagcgcatcgtgctcatgtcctccattttaccaaaggaggtaaatctggctttggcagcagacaaagtgcagagatttttatccggccatgagagcaggcgctgtcagtggctggggctccctctttcaggcagagcggtggagtggaggacagaggcactggagccggctttgcttctgccggtgcctttccctctcggctgcactcagtattcccagttttggatactgaggccatgttagccaatgttctttggttgtcagctgttctctagtcaggaggctggtatggagttaagcatggggctctgcacataacagacatccgttcagttcgtgtttgtgcgaagatcatgttattgtaatcatcatgacattgacactgaatgtcatcatgactgcactcaggattggtcctgaatgcaggggccagtcgactgaggaggtatttgcagacataacacgaggcttctgcagatcgtggctcttttccaggcaggtgaggaggagacagattcattcattccaacagatactcactgagtgtccacactgtgccagatgctgtcctagagctggggccatgaacaaaccttgctctcagagggggagacggaccataaagacaaaaggaggtgatgccatttgaagaggagtttggagagaagataagaggattgggggtgaggagtcctaatttgcatggtgactagggagggcgtttctgggccaagacctgaatgaagccagggagtgagccagtgagtgtcgggggaagaatgttccaggcagaaggagcagcaagcgccagcgccttgaggcgggaggggctgagcagtcatggggagcagtggggtctggtgtggccagaaagcagcaggtggggggcaggtggagggagacacggccagggggtggccaggagccagtcgggtgtggcctggtgggtcacagcgagtggaatgggagccctggggggttttggccacggagggcatgctcagactcacatttaaacataaactccttggctgcttcgtggagtcaagtgtggaggctggaggaccaagcgggaggcttgcactaacccggagtgcggggagaagcggggtgggggtggtaagacatgattgcattgtggaaatggtctggagggaggggctgatgggctctcctgatatactgcatatgggatgtgaacaaaaaggaatccagtagaatggatttaccatttattgggatgggagactgtgggtagagcagcttgggtttggtaaacctgagatgtctgttagagtctcaagggggacatcaaatgggcagctggatattctaagctgggctctgagaagagtccagggctcaagacagacatgtgggagtcatcagtgggacattgaagccacaggagtgaaccaccaagaagttagtgtggtcagagaagcagagagggctgaggactgagtcctaaaatgctccaggcttagagatgggaggaggaggaggaactagcaagggagactgagaaggagactccaaggaggctggagaagaaggagagagagcattggctctggaagctaagtagcaaaagtgcctcaaggaagaagggccaagcagctgtgtcaaaggcggctgctgggacagcaagatgaggactgagaagtggcccttgggtttgacaaggtggaagtctttggtcatgctgacaagaacagtgtttgtgcagtagtgtggacaaaagtgattggagacgttttaagagagggggacacattggagataatcttgaggggatttcagtgcaagggaatgggtgactggaggaagaggtgaggcaaggagggaggttctatttctgagacagctcatcttcatggggtgacctgagagggagtaggacgggcaggagcacttccttgcctggggacagggtcagggtcatgtgcatcacgtggccccacctggccataggtaggatcacggaggttcatcccttgatcccttacaacaggacaggaggcacctgtctcatgtggggatggagccaggccagctgcaagtgggtgtggggaatgggaatgctgtcttttagttgtttctgttttctctgttaaataagaggtaaggttgtcagtaaagcaggaggtggaaggagaaattggaggttaggaaagtggagaaggtgggaatggctgtgtggatggggtatgtgcaagtgtgtgtgatggtgtgtatgacagtatatgcaagtgtgtgtgaatatatatgcaagagaatgggtgtatatgtgtgtgagtgatggtgtgtgtgtgattatatgtacaagtgtgtgtgcatgtgagtatatgcacaggtgtgtgtgaatatatgtgtgagatatggtgtgtgtgagtatatgtgcatgtgtgtgtgtgaatatatgtgtgtgtgagtgatggtgtatgtgagtatatgtgcatatgtatgtgaatgtatgtgtgtgagagatgtgtgagtacatgcatgtgtgtgtgaatatatgtgtatgtgattgatggtgtgaatgagtatatgcaggtgtgtgtgaatatatatgtgtgagtgacggtgtgagtgtgagtatatgcaggtgtgtgtgtatatgtgcatgtgtgtgagtgaatatatgtgtgtgtgatggtgtgaatgtgtgagtatatgcacgtgtgtgagtttgagtatatgcaggtgtgtgtgcatatatgtgtgtgagtgatggtgtgagtgtgagtatatgcacaggtgtgtgtatgaatatatgtgtgtgatggtgtgtgtgcatgtatctgcatgtatgtgtgtgtgaatatatttgagtgatggtgtgaatgtgtgagtatatgcaggtgtgtgtgtgtgagtgtatgtgcatgtgtgtgtgaatatatgtgcgaatatatgtgtgtgagtgatggtgtgggtatgcaagtatatgcaggtgtgtgtgagtatatgcatgtgtgtgatatgtatatgtgagtgatggtgtgagtgtatgcgagtatatgtgcatgtatgtatgtgtgagaatatatgtgtgtgagtaatggtgtgagtgtgtgtgagtatatgcacaggtgtgtgtgtgtatgaatatgtgtgtgagtgatggtgtgtatgcctgtatctgtgcatgtgtgtgtgtgaatatatgtgtgagtgatggtgtgagtgtgtatgagtacatgcacaggtgtgtatgaatatatgtgtgtgtgaatgatggtgtgtgtgcatgtgaatatctgcatgtgtgtgtgtgaatatatgtgtgtgagtgatggtgtatgtgtgagtatatgcacaggtgagtgtgtgtgtatgaatacatgtgtgtgtgagtgatggtgtgtgtgcatgtatctgtgaatatatgggtgtgagtggtgtgtgtgtgaatatatgcacaggggtgtgtgtgtatgaatatatgtgtgtgtgagtgatggtgtg

SEQ ID NO: 41306 - DNA, 1385 bp, Artificial sequence
  DNA replication origin
taacctggggaaagcagcctgattcctctaacttcagcttccttgcctgtgaaatgagaatgaataaggatataggtgtgtggtgtgtgcttaagatgaaaggagctcatgtgtgcaggtgcttcacacacggaacacgttcaataaatggtggtgaaatgagaattgctgactgggatcaaaggctaagaatagagatccaaataaccacacacccatgtcagggaatattaagcggctgaaacggcattactctccccaaccccagtccctccttcacccctcaccctccacagcaccattgcccagactaagaaaacagaagcctagagatggaggaaggtcttgaataggcatgagtccagagccaagactagggcctggatcaatgaataactgttaagtggatggatggatgggtgggtgagtggatggatggatgggtgggtgggtggatgaatggatggatgatgaatgaatgggacagatgggtgaacggatgggtgggtggatgatggatagataggtaaatggatgaatgaatggatgaagggatgaatgatgaatgaatgaatgaatgaatgggttatggatgcatggatggatgaacggatgaatggatgaatgatgaatgaatgaatgaatgaatgaatggatgggttatggatggatggatgggtagatggatggatggatgatggatagatgggtagatggatgaatggatggatgatgaatgaatggatggaagggctatggacagatggatgtggggatggatgatgaaggatggatgggtggatggatgagtgggtgggtaggtggggagattgcaagccaagacaatccttgtagagacaggacaggaacctgcaaaaagggtagacaagcatctcatttcccagtggattcagtgatctgctctgcacctacctgggaagaggaactgagactcagacagacacagcagagcaaggcagaagcagcagatgaaagcagcctgaacacctattttggtatggacgggacttgtgaattttccatgggttaagaggacaccatgacaggtagaaatcttgagctgtcctgttcccaagggactgctcatcagggaaggggacccaagcagccaaaggaagtgagctggaccaccaggagtgggagctgagggggtccagagggggctaagtcagggctgatcttcctcaacaggaaaccatgaagttcagaggcccccaaagcactgtcctaattactccccacggaccctataggagagcttcccagagaggacccagataagggagagagagacatgctctccttccccagccctcatcacagaccccatgatctgggggagagaggaagcagaaagaaggagg

SEQ ID NO: 41307 - DNA, 1163 bp, Artificial sequence
  DNA replication origin
ctttccctttgaatgaaaatttcttatcaagctattgcacatttctggcataaggacagtgatagctttagtcttggggtgacctgggcaggtaaaagatgccaaagatctcggtgcaccaacttgaacccacccagagggcaggctaggatttcctcagagctgtagggtgggctgggctgtcttctgcttgaggggatacaagagacaacgtgcaggcaccccacagtgacgctgccatggagattggctgcagaccctaaccccatgagccacagcacagcaggctctggggggcacttccacgccacacagggactgcgctgccatcggcgattctcccccgacacccactgagggcccagcgcacgcagggcctgtgccgggggctggggatgactctcgctcctgatgcccacagcctcagggagggaggtgattcggtaactgggatgcggcggtccagtgtggagacaggcattaggtgtctgcagggagcacgggagacctaaacagaggatggctggtttccggtgacaggatggaaggtgacaggaaagcccactcagtggaaagcaacttggtgatcctgagggaacgcagctggaagtggggctgctgtggggcgtggccagcctgggcaaaagggggatgggggtggggacaagcagagctgcatcggccaagagatgacgggaaaagtcagcagggcctgtccttgggcttcacgctctggggttatgagatggcacagtgggactgtcatcaaaagaacaacataaccctattttcattcttcaccttccccctggtaccacgtggaggaggaaccaaaagggaaggagagtgatggggtggagacaggctgggtgactacagcttcttaggagaggagtgacacagtaccgtactagcgtgatggtcacagagcaaaaagacttcacatgaataaaagaaaggtcaagcggggaggtctacagactcctctgattggaggggccaggtgagggatggagagaggatggaacacctgcgtctggcctgggtggctgggcaggggcagcacccttcacttagaaagggaagagggaagatgcaacagatggtattttccaagatgggaatggcaagatctcccaacacaatatcatgttaacactcct

SEQ ID NO: 41308 - DNA, 956 bp, Artificial sequence
  DNA replication origin
acagcatttctgttaaggccacccatttaggaacacatattaaattaggccaaggcgggcggatggatcacttgaggtcaggagtttgaaaccaacctggccaacatggtgaaatcccgtctgtactaaaaatacaaaaattagctgggcgtggtggcaggcgcctgtaatcccagctacttgggacaccgaggcacgagaatcgcttgaacccgggaggtggaggttgcagtgagctgggatcgctgcactccagcctgggtgacagaggaagactccatcaggaaagaaaaggagaggcgaggggagggaaggggaggggagcggaggggaaggggaggggaggagagaggaggggaggaagggaagaaaggggaagggaagggaggggaggggagggagaaaagaaaagaaaagaaaaaagaaaagaaaagaagagtcctcttaacaggggcaagacatcctgaaaggcaaagatttggagagaaaggaagggagtagagagaggggtgatttggacaaccttcaagtaagccctatacagatgtatacctcacaaagtgcttccaaacaaaatttctgagggaggcaggggtaattatgtgcaggctgtgggagaagagtgtaaaagagcagagattttgccgtgatacagaaatgagtttgaattctggctcagaaacttcctaagatagttgtgtgactttggaaaagccccttcaccccacaggtttcaagtcctcgtctgtctacaggagggagtcaatcatgacattcacaagactgctgtgggcacaaatgaaatcaggggcatgagacatgttgtaaactggagagatttagggcgtttccacacacatttcccagctgattctcacagagaggcagggaagaagacgtcaccaccgtcagcgttgtttatcgttcttctccacatatcaggtaagctacgggaa

SEQ ID NO: 41309 - DNA, 2249 bp, Artificial sequence
  DNA replication origin
ggtaccacagggaccaccttctcagaggctgtcacccccatggtcaggccttcaaggcgtgccgaaggcgggagggctgggatggctcaagacgtgagtgcctcgggggcctttgccagacttgtccgcagggatcacgatgtcctcatcacggctgctgggtggcaggagggcagccctgtggggtggggatggccccatgtgtgcgcttctcctgcccagccgtgtggctcaccctgtcccctgtctccgcagtgggctacggctcctggtttgagcacgtgcaggagttctgggagcaccgcatggactcgaacgtgctttttctcaagtatgaagacatgcatcgggtgagtgctgccggagcagctgtcctccgggtgccctggccctcggcctggcagctcctgacgcaggagccctttacagtgggcgtgtgggaggaggaggaggggtctgaggagggacagaggagggggcgggacagtctgtgggctggaagggggcttgggggtgtggggagcagcctgtcaaagcctgaggtgtggcagggcagccatgccgtgcgaggctgagggacccaggaaggcgggtgtggggaggggactggggcttggcttatcagggggcctttggagtgctttacagtggtggttgatgggacgttgaggagaggccactgtctgcagtgagacacgaggcagctggtagcttggggagcctgggtcaccacagaagagactgagcattttctaggtgttgggagaaagcaggagctgggggaggggttgaaaagaactaatgggacaaggtcttagtccaggcagaggcagggcttggggctggagcctaggcagaggggcttctggtggcaggggcaggacaggcaggagacacctgtggcctggcccatgggaaagaggagagacgatggggtgcagatgtggactgtgaggttgctcctgtggggcagaggcctgagtgccagctggaaaccatgtcgatgtaggggacagacaaggccagcctgtggggctgctagtgtcagtggctgacagacaagcaggtttaggttgagtagcagtgggtgggagctgggatggggaggaggtctgctgggagacagacaggagagctgggtgctggggagggtgagccagtgctggagttggaggtcagaaagcccaggggtaggaaggccagccttgtactttccccacacctgcaggaagacgccagacctggctgtgaacagagccacacgaggtcccctatggcgctggggtgggggctgtgccttgtggccctggggtggtggggtgtttgttgtggccctggggcgggtggtgtgtgcactgtgatcctggggtgggggtgtgtgcgttgtagccccggggtgggggtgtgtgcactgtgatcctggggtgtgggggtgtgccttgcgtttcctgcagttgttcttgggttgctttgtgctcacacactggggcctgtggtcagcacgggccaggtcggccttcgcaggagcgtggcctttcggggcttgctcgatgtgcaggaaggaccccgtctgcaggtctgctgccggctggcgcatgctgtcggttccccacatgggtcctcaccatggctctgtgttatggtgaggaaagagcaaggtcatgtggcggtctaaggtcacacgcgccatggagccgactgctgggtgagcctgtctgactctacatgggcctccacctgtctgcctcttgtccacacaacttgacacagagccacatttagggtccctgctcacgcccagaggacggtgtggtagagatgaaggtgtagcccaagcaggttggaaccctggtcctgccgctgacctctgtgaagccgtcggccgtggtttcctgtggtgctggggaacaacgtgggctctggatgctggctgctcaggccaaagtcctgaccaccccaagcctctgtaaagtggggaggtgacagcacccccgtcactgtgtggctgggaggactgtgtgagcatcacctacgtgcaggcctggcacgggcccgcctggtgtgtacctttttgtggtggtgtcatgcacagtgaggtgtacttggcacacacgtggggcttgacagccttttacctgtcacatctgggcagccaccttccagatccagaacattccagcttcttgcagttgatacccctgcttcccagaggccaccgcggtttcatctccctcaccggagcttggcgt

SEQ ID NO: 41310 - DNA, 1039 bp, Artificial sequence
  DNA replication origin
aagctcagggccgcggtgggggcgcgggaagcacagggacgcggtgggggcgcgggaagcacagggacgcggtgtgggtgcgggaagctcagggcagcggtgggggcgcgggaagctcagggccgcggtgggggcgcgggaagctcagggccgcggtgggggcgcgggaagcacagggacgcggtgggggcgcgggaagcacagggacgcggtgggggcgcgggaagctcagggccgcggtgtggctgcgggaagctcagggcagcggtgggggcgcgggaagctcagggccgcggtgggggcgtgggaagctcagggccgcggtgggggcgcgggaagcacagggacgcggtgggggcgcgggaagcacagggccgcggtgtggctgcgggaagctcagggcagcggtgggggcgcgggaagctcagggccgcggtgggggcgcgggaagctcagggccgcggtgggggcgcgggaagcacagggacgcggtgggggcgcgggaagcacagggccgcggtgtgggtgcgggagtgccggcctcttggaggtcaggacaggactccctgcccgtcttcagctttcaggtcccatggagagttcctcgatttactgaggctactgcctgtcgccctcttgcccagcagggccccgtgttctggatctgtcctacagcttcctataccccaccctgtccccactagcaaccctagcggcccctgtcccagttcttctgggctttgttccagggcttcctggtgaccacttgttaagcggataaagtaacgggcactgttgcggtccactgccaggtaccacagggaccaccttctcagaggctgtcacccccatggtcaggccttcaaggcgtgccgaaggcgggagggctgggatggctcaagacgtgagtgcctcgggggcctttgccagacttgtccgcagggatcacgatgtcctcatcacggctgctgggtggcaggagggcagccctgtggggtggggatggccccatgtgtgcgcttctcctgcccagccgtgt

SEQ ID NO: 41311 - DNA, 1107 bp, Artificial sequence
  DNA replication origin
ccctgtctctaccaaaaatagaaaaattagccgggtgtggtggcacatgcctgtagtcccagctactcaggaggctgaggcaggagaatcgcttgaaccagggaggcagaggttgcagtgagccatgccactgcactccagcctgggcgacagactaagactccgtctcaaaaacaaaaaaacaaacaaacaaaaaaaccccacaggccttggcatttgatgcaattgaaaaacaaagagaattcggcccaaagcaggtacacgcctgctggcctgctttggattaggctggccacagccatgtttgactgtgaggtaaaaaccaacccgtcgttaaaaacttgggtaaaatgctagagacgcatgacccaagaccacctcagaagggatcttcacgtgtgggctccttgggaagacagcccccaaggccaggtaagtgccagggacctgcatgtgtattgcacagggaccttgggctcctcttggtggggactcatctcgggaggcagaggaggtgccagcttaccttggagtctccattgtggaggtcagagggcagaaagcggtagggcaggtggctcttgatgaggcggggagaggtcagttcctgcgtggagtcagagggagaggcaggtcagaggaaagggtgagaccaaggggaggagtggggccaaggggaagggggccagaggaggaaggaaggggtggggttcaggggaagtggagttatcagagggaacggcgggtctagggtagcggaggggtcaggagagcgtcaggtaagagggaggggtgaggccagagggaggggtaaggccaggagcagggggaccagaggacgagggaaggggtgggggccaggggagaacggtaggggtcagagggaaaggtgaggccaggagtagggaggggtcagagcaagaggaggcaaggctgtcatgccctggtctcctgtcctggagagagtctcggacccagccaggacagcctcccttgtcacctgagacaaagattggagacatgagcacaccccggctggaccctggcggtagagacaagggtccttgactttggcctggggagtccacccatcatagccacagccac

SEQ ID NO: 41312 - DNA, 920 bp, Artificial sequence
  DNA replication origin
tggttctataacccttggcacattttggccttagcctcgtctgccatgaggatggtggtacttcctactcaggttggtgggagagtccatgggctgagaagttctttgtgtgtattgaaaagagcttgttttccatcaccaagccagaccacttccttccttcagtgcctttgctccaaagctccctcctccaggaagtcttccttgatcaacacatccccttctgattactcagtgtctatgcagcaaccagcgtttgtcggtccactcaggaaatatgaattgagcatggccacatgctggctctcctggtgcagcaaagaacaagacaaaacagcctctgtccttaaggtggaaagaggagagagcatgtaaaagaatttgcaggctttttctgggcaggtagatagcacattggaatcgcatgacagggcgagggacgggagttagtcccacagctagtgaaggagactgtgctgactgagcggcatctgagcaggcgcagggaggagtcagggagtgaggaggctccaggcagggacaccagtgtcggcagcctggggaagggccggttgggctcagaggctggagggagctcaggggagagccaggtggtgagggagtggaacatggtgaaggccttgcgttgactctgtgggaggcagagctgcctgacggcggcagtggacagtggtggagtctgacttccatgttaaagccacagttttggccgctgggttgaaaacaggtagaatagtggtccccaacctttttggcaccagggagtggttttgcggaagacagtttttccatggacccaggtggtgggtgatggggatggtttcaggatgaaactgctccacctcagatcatcggggtttagttagattctcatgaggaccacatagcccagatccctc

SEQ ID NO: 41313 - DNA, 1771 bp, Artificial sequence
  DNA replication origin
cttgtttccctgtcagtaagggcagtgcttgtggaccctcctgctcgaggctagtggagggaaccacagggttggctgtgggcattgctttgcctgctccaggtgtgtggcttcatcggtaggtcccaggagggtccggtcctgtgctgtggatgagggttgccaggtttgctgtgagactgtggcgtgtccttgcacgggagcaggccctgttgctggtgccccatcttgatttcagttgctgagttgacatttgtttatattgattctctttgggcctcagcaggtcactttgtggcccttctgcgtgtcatctcctttgaccccagcagctctgtgaagaagggaggggcatcaccacctccattttctggaaggtggcagggatggtgtcattcctgggactcctgggccagcctggagcctggcacatagtgagccctctgctgagtgaataaaaggctcgctgggtgggtgggggtacctgtgctggggtcagagcgccaggcaggaattaggagggtggtggcaaggcgggtggaggggagagcagcagaagaggattctccctcagtctccagaaaggggcgcagccctgcccacacctcgactttgggacttctggcctccagaactgtgagagaatacgtttcttttgttttaaggcaccacgttttgggtgatctccagcagcaccccaggaaactaaaacagtgactaagaccagttccctgccctcacagggcttgccccagccaggcacagcgtgacagtgtgctaggacagtgtccagggctctgtgggaccaggcaggggcacctgatcgagaggcgtgttgttagggagggcttcctgcgagcagtgacccacagagcaagcccaagctggccaggcagagggcagcctgttgaaggctttgggccactggggcgctgggcttggaagggggtgggaggctggccagagaagagggggtgggtggagggctggcagggccacatcactgggacctcaggagcccctgggtgcagatggccacagcaagggtgggtggaggggctgtgcagggctcatgcccatgcccaagggcaccaccaggagcatggagagagaccagtgggaggagtgctgggtgccacagcttggcgtctggcagagggccttgcagagctagggctgtcttcaaagctgggtttgatctttggttccaagtgcttagaagtgtgcctggaatggggtaagtgaccagatagtataatgaccatttttctttgatcatgttatcacatcttgccagctggctttatgccctaggaaggccggggcctgttccctgcgtgtttcgtggtgtgtgttctcggtgcccctccctccctgatgcccacgttgacctgctgttgaattctcctggaagctggaaaacgtaaggtcaggaggtgttcaaccaggaaattgatgtggcaggctggagagaagggccacggggacagggccgggtggacctgacgagtcaagagcttcctttggctgatattctggcataaatatttaatgggggtgaggacgggacttgtggaactgaagtggccgatattgatgtaagaagactttaacgtgcagagaaggtctgtctgggtcgttggcctgcggggctgcacgggtggggaacgtgaaaaataggtgatgaaaatgtcactgggagaggcccatttcagggacgctgcccacagtctgatttctaaggacaaagaccccctcactgcagctgtcc

SEQ ID NO: 41314 - DNA, 1780 bp, Artificial sequence
  DNA replication origin
gtgcggggcgcgggcgcgggcgcgggcgcgggcgcgtgcgggctgcgagccgggaggcggcggcggcgacggcgacggcggcggcatggcggagagcgaggccgagacccccagcaccccgggggagttcgagagcaagtacttcgagttccatggcgtgcggctgccgcccttctgccgcgggaagatggaggagatcgccaacttcccggtgcggcccagcgacgtgtggatcgtcacctaccccaagtccggtgagccccgcgccgaccgcgcccgccacgccatgccccagccctgcagcgcggccgcgtagacgccgcgcccgcgcccggggcttctgctgggccgggtggtcgcccttggcctccgcccctgccgtgcccaccgctctcccgatgctcggatccctgcggggcggggtggggtggggtgggggtgggaaggggcttggttctcatctggggaaaccaaggtcagagaccttcgggagcggccccttccgtggagatggagcctatttggccggcgctgcaggaggatgggcccagggccgccacccatccctgcttctccctttacctggctggctgtgtgaccttggacaggtcactcaacctctctgttcctgaatcctgcccaacctttgatgagtgcaaagtcctggtgttcacctgggaagggagataacatgggcgtcagggctttcagcgtggaaacgtaacgtccctcctttccagcctgggctccgggtgggggatgggaccagtccccgcctggagtgccttgcttgtacattctcttgtttcagggctgcctccatcaccgaggcaggacctggggcattcacatttcccagcattagctgacgtcactttcacaataacagctgtgtgagctagtggtggtcattcccactttacagtctaggcacagaggctcagagaggggaagaggctggtccaaggtcactcagctggtgagtggctgacctgggaattaaagctaggctggtctgtttccagacctgaggtaggagattgtatagtaccccatctgaggtttttagggaaaggaggtagcagctttcctgttctgtaaacatgccctgggatttccttgttgccactgtatttgaggcaatcacagcgtggtttagaaggtgtctggctctaaggtcacgccggaccagcagtcgggcagtttcaggaaaagctgtaggcttggctgttgtagctgtatggagttccagacacctgagggcaggtctctgacattcttctgaggaagattggagtagggactctcagtggagggtgttggttggagaacagagcgttcgatgggctgctatcttgagcacatgccagtcgccgcatggggtgggacctaaaatgctttaggaatggctaagcgtgtcgttggcttctgtggccactcattaagtcctgcgggccaagtgctctatcgctgttaatctgtgagggactcttacacctttttttcagaggctcagagaaggcacaaattgttcggagtcacacagttgctgagggacagaggtcaggtctagctaggtctcccggtccacggccagcctctcccctgccttatgggtgctccgttgcccttggaaaaccgtgagggcccaagaaggagggggacctagccttctttcttggaggctttaaaatgctggaagtctcagccacttagggattttgaggtttgtgtcacttctctgaggcccctccaagtggacttctggtagcccagttca

SEQ ID NO: 41315 - DNA, 1000 bp, Artificial sequence
  DNA replication origin
cggtcggcgcggggctcaccggacttggggtaggtgacgatccacacgtcgctgggccgcaccgggaagttggcgatctcctccatcttcccgcggcagaagggcggcagccgcacgccatggaactcgaagtacttgctctcgaactcccccggggtgctgggggtctcggcctcgctctccgccatgccgccgccgtcgccgtcgccgccgccgcctcccggctcgcagcccgcacgcgcccgcgcccgcgcccgcgcccgcgccccgcacacgctcgcgccccaccggcgcgcggcggcagctccgcaggcgtgacgtcatggcgccgccgacgcgcggcggaggctccgcgggtatgacgtcatggcgccgcccggcacgcggccgcggcgctgcacgggcgtgacgtcatggcgccgcggagccgcgtcctccccgccccgcccccggccggggtcacccacccgctgccggggctgacagagaccctggcccgcggtctgcagcctcctcagtcgtgcgtgcgttcattccgctcatagcttctgtcactcagcaagcgctcaacacagacgcatgagataccctggctggaaggccctgaaaggtagtcgtccattcaacacgtgcttagcgcgctgctgatctgtgccaggcactgggccagggccccgacacgcgtcagggtagaagcaagcagaagcctggccctgttggagcttacattggtaaataaccaagataatttcaggtaaatattaggtcctattaaaaatatgcgtcttcgccaggcgcggtggatcacgcctgtaatctcagcactttgagaggtcgagcacgggcggatctcctgaggtcaagagttcgagaccaacctgggtaaatggtgaaaccgcatctctacaaacatacaaaaaaaaaaattagcagtgagctgtgagcttgcaccactgcactccagtctgggcaacaggacgagatcttctaacaacaacaa

SEQ ID NO: 41316 - DNA, 946 bp, Artificial sequence
  DNA replication origin
cccggccaggccctgaggaaatgctcagcctcagtggagatggggaggttagagagatggaggcgtgagtgagaacgggaagcaaaggaatacacgtgggaactaaagagaaaaatgaccagcctgggcagcatagcaagaccctgtctctaaaaaaaataataaaaacttagctgggcatggtggtgcatgcctgtggtcctggctacttgggaggctgaggatggaggatcatttgagcccaggaggtcgaggctgcagtgaaccgtgatcacgccactgcaccccagcccaggcaacaaagtgagcccctgtctctaaataaataaagagacaataagccactcattcattctttcattcatttatcagcttatgcttagtgagttataggccctggagacactgccttgaagaaaccttacattctggtgggcgtgcgggagcagatgctgaacaacaaacgggaaaatgtaaatatgagatttttccaggagtggtggggccgtgaagaaaacaagatcgtgtgagagtgaggcagggtgggggtgagagcaacattggcccgggtggcccaggaaggccttcctgaggtgacaactgagctgagactgaggatgagaggctgggttttgcaggtgaaggcaatggcaggtgcaaaggccctggggtgagactgaaggagggaagggccggcagtgggtgggggtcggggggagcagggcaggcaggggctgggtcaggagggcactgttggggcatggcgaggagtttggttttggggagcaaatgtgagaaaagggagcaagcagaggaaaggagggcccagtgctgcagtgggattggaaaaggaggaggaaggggcagacagtgagcatgcaggaggctgtccccttccctccaggaccccctgggtctgagcaggactctgcccctctggccatct

SEQ ID NO: 41317 - DNA, 1346 bp, Artificial sequence
  DNA replication origin
caaccatctgaggatagtacagaattgttctcattgtacagatgaggaaaccatagcacagagaagttaagcgacttgcccaaggtcacacagtagcaaatggcagaactaggggttctactcggaaccatttagtctgcccgcccgctgtgtgactaaatgtcacaactgcaacaacaggaaagtacagagtcccacaggcacatgtaacgatggtggggggtgactttgagcagcatctaagtgaagctggaaaagagatgttggccaggccaagaggcagaagagcatcggggagagggcatggcacgtgcaaaggtcctggggttggtgagggacagccaggaggtccctgtggctgcggcatgagggacaggcagcagaggtgagcttgggaggctggcagggtgggcaggtggtctcaaaagctgtgggaggagcaagtgaggtgggcgggagggggtggtggacccagctgggtgggaagaggctgaaggggtgggaggctgggaggagagggatggcggtcgaggccagatcagggagagtggggtgggcaaggggatgaggaagggggcccctttccatgccggagaccacacgaggacgtgcagaaatgggcggggacctgtgcggaacccctgaggtccaagcttgggattctggaacccggcagtgtacctgtagccacacgggggcaccagagagctgcctcgggtggagcaccaactcctgggcgctgcgccctcgccatttgggaagggaattgtgaatctcatctctaatcctcacctgcctgcccagggaggaatgtcctgctgggatccccagtttatggagaaggaagctaggactcgtcctaggacactcggcaggtggatgtggagcagggtctctggcctgtgctatctgtgaatccttgtaatcctccgtctccagagggcagtggccagagtggacgtggtggcctgagctgtggcctgggctgtgtctggaggctgggatttgggctccggctctgtcccagcccagatgctggtcccttccactctggtcaggtcagtgaatagagcacccaggaaatggttgctgcggtcatagttgtggctgtggttattaataacactgtcgtgttactgttatgagagagtgtggtgagagcatctgtcccagcctagcaggccacagactttctagaggggcagaagaggtagaaacaactcaggagcctgagagtcctcaagtccatcctggccctgccacttcctgttgatggtccttaggcaagtcacttctccactctgaacctcagtctcctcatctacgagagggcatacaccccttgt

SEQ ID NO: 41318 - DNA, 997 bp, Artificial sequence
  DNA replication origin
atccggggcgggcgcgtgggggcggcgccagcgtatacacagcgcgcgggcacttctggggcacacctggcgcacaactggagtgggggctgatcgcgacccggggacttcattggctggggcgcaggtgacgcagcccgggggcggcgcagggagcaccagcaccagccccagcccggctccctccagagcccacatttgggcccagccccgtccaaggctgcatcccggccctatcccgggtcacggagtgacccttcctcgtcccgatcaccccgcccggtccacccgccatgggcttcttagaggaggagggcagatggaacctgtccttctccggcgccggctacctgggcgcccaccacgtgggcgccaccgaatgcctgcgccagcgagccccgcgcctcctccagggcgcccgccgcatctacggttcctcgtctggggcgctcaacgcagtcagcatcgtctgcggcaagtcggtcggtgagtcccggaccgcgggggcgaaaaggggcggggacagcttaatgaaagcggatcgagcccagagacgctggtgcctggcgctgtgctctgcgccctctacccccggcacagcctcatttaatcccatgagaacaccgagtgctggggactaggtgacccccatttgcagaggagggatcgtggctcagagccagaaactctgtttcccaggtcggcggggcaaaaagtgaaaaggtgaacggatcatttgaatccggggccgagcccagaaattctgagctggagtggggaggaccccgctcccactgcacctaggagggcagtgggggtgtggagggactggcaggatccctgggcgctgaggtctccctttccctgcccccactgcagacttctgctgctcccacctcctgggcatggttgggcagttggagcggctgagcctaagcatcctgcacccggcctacgcgcccatcgagcacgtcaagcagcagctgcaggatgctct

SEQ ID NO: 41319 - DNA, 1012 bp, Artificial sequence
  DNA replication origin
gggagggctttcggggagctgtgggttgtaggagccctgtaaagccagtggcttggagcgtcagaggggctggagcatctctggtgaagggctcacagtttgggtataaagacgattttaaagtgaaaacatttgaaatcttaccagaacatggaaccttccatacttcctcactgaagttccaaacttctcccagccctgccatgctttgttaagctggtatataaaccttaacctgtgggtgttcactattgagtaactcctttgtgcatatgtagataagccttgtcttttctcctgctcatctgtctattgtcagttaatttgcaggcccttgattatagaacctaaatggagaggagaaagattttcctgcagaggaagagctgggggtcctgggagggaggattgtaatgagatcctgggggcagaggagttaccggtggtgaccaagtgaaggtatgacacgaaggtgggtgggagtgggtgggttggagggcaaggtcatctgagaactcaaggcctgagaggctaggatgtggatgctgaggtctccatgaatggggacacgaaaggggcagaaagaaaggcaaggagccaggggatgaggtcatcaaagggtgttgtcaaccacagggacaggtgtggatggtgcagtaggcatgtgagtcaaagcaggtggtgggttgcaggaggagggaaggaggcagtctggaagcagaggagaggggcaaggaggatgcgtacaggagagatcccagcctcctggtggtgaagcagcttcctggcagaagggctgcagaagcagagggcagggggttgctaatgatactggtgggagagtcagggctggagggggctcagcaggggtagaggattggcagcgggcacgggggcaggggcatggtgcccctcagtcttgccaggaagggggtgggacaatggctcatttgcaggttttctagaagtcaaagggagggagtccctggtctaggactggtcttcccttgaa

SEQ ID NO: 41320 - DNA, 1502 bp, Artificial sequence
  DNA replication origin
gcaacgccccggccgaagcgccgaacaacatgcgcgcgtcgcggaggaggtgcggggcgtgctcgctcaggcagcgggtcgccccgacgtggtagaagcccaggaagccgcagcccgcgaaggacaagctccagccgcgctctgcgtcgtacatggcggcggcggcggggcgggggcgcgggttaggatctgggtcgggatcgggaatcggctcgggtcctgatccgcagcagctccgcccggcgcccgcaagcgctctctaccctgcctcagtgtctcggccagggcattcccagcgcgacgtcagccccgcccccctcggaccatgcaaatgagccggcgggaggcccaatgagcgggcaggacgccctcccgggcggggcttggagggggatgggggtggggacgacgtctggcgggggatgggggcggggaccgggtctgggagggggattgggggcgggggctgggagggcgatggcggaggacctgtgcgggggggtccagcctgggagctccccgcagcgactcgagagaaagcatttttccaaaactccagcagacactgcatgtcctggagagaaacggcttccttctgttttccttgacatctgttaagtcggggggtgggaggggagtcgcagttggtgcccacttgatccttaacatcactttaacactttatcacgtcccttttgacccggggagagccagcctaaagcaggcaccaccacctgaagagtctactctctgcgttgttgcaggctttctgtatgattgccttcaagtgctggggatttttttcattgaatgaaagtaacaggaagtgtccatttcaaagtttcctttgtaagtaaaaaatgtgaatgacgggtgctggggctggggtcggggccctgtaggaactggggagtggggagtgctttgggaagctgaggcctggatgattcctggtcccttagtcccttagtccgttcaggtgcgaaaacaaaacaccttaaagcggaggggcttacaaacaagagatttatttctatctttttccccccaggctggagtgcaatggcacgatcttggcccactgcagcctcttcctcccgggttcaagggattctcctgcctcagcctcacgagtagctgggattacaagcatgcgccaccatgcctgactaattttttgtatttttagtagagatggggtttcaccatgttggccaggctagtctagaactcctgacctcaagtcatcacccacctcagcctcccaaaatgctgggattacaggggtgagccacttcgcctggcttatttctctgtctcacagttctggaggctggaaagcccaagttcaagataccagcagatttggtccctggtgagaggtatggctcgtagaaggtgccatcttgccacatcctcacctctgggcctctttgataagggcaccaatcccattcataagggtgccaccctctcatcaaatcaccttccaaaggcccccg

SEQ ID NO: 41321 - DNA, 1167 bp, Artificial sequence
  DNA replication origin
tttggccggtcccccacggtgggctccttccctctggggattgagggactcaagacaccccgcgcctgcgcttttcttttctttttttctttttttttttttgagacggagtttcgctcagtcgcccaggctggagtgcagtggcgtgatctcaactcactgcaagctccacctcccaggttcacgccattctcctgcctcagcctcccgagtagctgggactacaggcgccagccaccaagcccggctaattttttgtattttttagtagagacggggtttcaccgtgttagccaggatggtctcgatctcctgacctcgtgatctgcccacctcggcctcccagaatgctggggttacaggcgtgagccactgctccctgctgcctacgctctctgggtcgcagcccagccttctgggggctgggtagcctcccagaagggcaaccctgggcatcctccagggcaggctaactggagtctagtggggaggggtaccttgaaagaggaaagttgtttcctcctcctcctcctcctccagtgtttgggacccttcctgggggctggagtgcatccctggacaccccccaatcccatcctcttctctagtttccactgacctaggcccaccctcccctctccggctcagtactcctggaaatgagattccgtacatttgaatcttgtcctaatgaaatatttgtccatgtgggtacctgtgtgtgtgtggtgggggtgcagacggagggtttgtttctcactagctggaactactggggtgtggtatgcttcctgggaatttgtgtgccacagtcctggaggcgaggagggggttgtgagccagtaggcaggggctggggcaagtagcattgtgaagctattgacacccagacgtccccaggcaggagattatgcccccattagcccccttttatctgggcttccttaacaatggactctttgccctgcctgccagagccagcagggagtgactgttcagtggtgaggaagcgggcagaggaagccctgccattgggtaggagcagtgggcagcccctgggctgactgggaggtggggattagggattagacagtcctggctgtctgccttcccctaagccagggggagaggagcaaagggcacgaaatgtggcctccaggaggatta

SEQ ID NO: 41322 - DNA, 1267 bp, Artificial sequence
  DNA replication origin
ggctgggggagttctgctgtagaaatattagagtggaaggaaaaagatgtgttgggagctatttttctttaatactaaaagttggttgatgaatttgtcgttggccaagaccaaggagactgcatttttaaggacatatgtgtatttatctgctcagaaaatgttcattgctgtgtgctagggatactgcagtgaacacagaggtgtgacccttgccagccttgtgagagaagtgagcagataagtaagcagaagggtgatgctgtgtcgatgggaaagtacaggtgccaatgagaaggcacaggtgtcaaggagaagacacaggatgctggaggctcatgcaggatggatctccaaggcccaggggaagaagggcctctcggaggacgtgaatccacattaagactttggggataagtaggagcgccttaggcatggggacccatggatgcgaggcctgtaggacacagacaggatggcatgaaggcctgtgcaactggaggggtggggatggggacactaagagatggctggaagtgtgggggtggggacactaagagatgactggagaagagggggtcaggagtggtgaaaaatgggagaggagggcaggctgggccttttggatacagggggattgcatcctgcagtggtagggagccactgagggctgctgcagtaggagtgaggggatcagaggagagctttggaagccccctggatgcgggacaggaagcgagataccagtgtctaggaggccagtgaggcagccacaggctccaccaggatcagggctgcgagggtcatgaggaggaaaccaatttgaaggagtccaggggaataggacttggaaatgaccgatgggacatttgggaagaggaagacagaagagcgcagtcccggcttctggctttagcagttgggcaaggggagatggggagatgtgcccatgggttgagggttgaggacattaggagggagccggtatggcaggaagagctggtgtgccagagatgctggaagcagcatctgcctgagaacagatacctggcaatattcctaagggaaagtgacatctcggagggtgaggagggcatctgatagggcctggaaagagccggggcaagcatgaatgtgaggttatcttggggggcaaggctcaggcgttgaggagcagcccctggtctcttcagcctgaagttggaagccagagttgggccaggtgcagctgtggttgtctgaagtccccctcccccagcccagtgtg

SEQ ID NO: 41323 - DNA, 1877 bp, Artificial sequence
  DNA replication origin
tctgtaggaaggacaagcttctgtccccacagcagctggcattttcttctcagccaggtgtccggactctgctcagaaggctccagggcttccctctcatgtagagtggaagcaagagcccacatccggcctccaaggccctcctgccactactgctcttggaattcatgctcccgcccgaggtgtcccgctgtcctacccttgctccctcaccgtgctctgggctgtgctcgggggttgccttactagccaccctccctgaccatcctaactagatggcatccccttctggtcactttctaccccttaattctgctttatttttcttcacaacacttgtcaccgcctcctcaatgatatataaagatactagcttataggtttccctcctcaagaatggaagttccttgagagcaggaattgggctttgttcactgatatattcttagtgcctggacagtgcctggcagccagcatacatgtgttagactggtggatggatgggtgggtgggtgggtgggtgaatggatggatggatggatggatggatgtgtgggtgggtaggtgggtgggtggatgggtggatgggtggatggatggacggacggatggatggatggatgggtaaatgggtgggtagatggatgggcactaccacaggataagcacaggagctacgggcacagtggaggagcccccacttccatctaggaggttgaagaaggcttgcaggagacacacctataccaaagtcttaaaggcagggagtgggaggccaaggaaacaactgaaaaaaagggagttacagccagcggcagacagagtgaatacgagtgcctgaaagtcagggtgagccaatgccttctgggaaacaaaaagtatttccacagagccgaagcatgagacaggcacagtgatgaaggatcaagggctacaggcaccctaacagcacaagcagtttgtgtaggaaagtgatatggtaaggcttgtgtttcagaaacactaacacatctgcagtgtggagaaggggaaggggaaggcagggagtggaaggggagtaaagacgactcaaaaagactaatatgtccatagtgtagaggggggaaggggaaggcagggagtaggagaggagcagagacgactcagaacgcgacattggttcagtgcggatgagcagtgctgagaggaggaagggcagcgcccagtgggtggcaggtggctgaggggaggactgagagcagccagggagttaagttcaagggcagccgggtgcactgtgcaggtcagtggatggggagcccaggcgtgggtacagatttgtggggaaggcaatgagctctgttgatatgaggtgtctgtaaggtaggggctgagacagccaggagcacttgaatctgggcccaggaaggaggcaggagaaccagagttgctacacacaggcagcagctgcagccacagggctgtaggagactgtcccagagagaagcagggtggggagatggcaacagagatctaggggcaagccatgcctatgaggcagaaagggccctgagaagagaaaactgaggagtggaagagcgcagcaatgatgagtcaagaaaacaagagagataaagtgagaacaggcgagcaggcgacaacatccagtgctgcagaagggatcaggatgggctcacgtgccggacaacaaggaggcctgtggtggcaggggcagaggaaggcaggaaccaagttcaaagtgcagagtcaagggctgaataggggcagtaacaaattattttaaaatgagctctctagaaacagtcgcatgcaccatttcattacactcaatccttgcccccaggttttaaggtagataaggacctaggcagcaaagg

SEQ ID NO: 41324 - DNA, 1040 bp, Artificial sequence
  DNA replication origin
ggcgggggcggcctcgtggggctctagggccgagggcgggcaccgccgggcaggtccccgggggtcggcgggcgcgggcgcgcactcaccctcgcgcgccctccgcttcctggccagggtgccgcccagcttgcccaggaacgactcgtccttcttcatcctgcggggccgcggggtgggcgagcgcggcgcggaggacatgggccgcgcgtggggccggcggcgggcgcagcgcgtgtggagccgcccggtcgccccggggagaggccgagggcgcggccccgccgccggcccccgccccggtcccgcccccgcccctggcctggagcgcggccccggcgtcccggatgcccgaggcctgctggtcccggccagagccgtccccgtcccgcgccgccgctcaagctcagagaaggggcgtggggccaccccgggagcggcgcagccttttccctacgcgttggagccctgggctctgctcggctccgctagtggtgccggatccaggcgacagcgcgacagacaccattgccacgtgggtgcagcctcaggacgtcctgaaagccggagagaatcaggtcacacgaacgtggccggtctgttgttaagcttctgccaagagccaggcccggggcagggggagcccttcagaactgggaattgtccctacccacgggaagcttagaggatggagggcaatgcggggcacaggtcattggcctgacctccaaggggagttccaggagttgtttctggaagaggcgacggggaggccccaggaaatggcttgcaggccggtaccatgaggtgagcagaagagcaggccctggggacagtgtggggtgccagggaggggagaggaggggagacaggcctcgcatgtgttggaagcagaggaaacggcttcatcccgaggactgccagacagggctatttttattttattttattttattttattttattttattttattttattttattttattttattttattttgttttgttttattttattttatttttttagacgtagt

SEQ ID NO: 41325 - DNA, 1238 bp, Artificial sequence
  DNA replication origin
tgcccgccctcggccctagagccccacgaggccgcccccgccctcccccacgcaccccgcccggcccacgcggctgcgcgaccttcgggacaggccaggcctttgacccaggacccgtaaacaacggccgggacctggcgcgtggggccgcggtggcctccggagtctgccaaacgcgcgtgcgggcgcctgcgcggcggggacctcgggccaccgtgcggggcccgcgcctgctctgcctgccgggtgttcagctcttccctgggccagcggcatagccagccgcgcggggtgaccgttcattccatgagcagtgacgctcacgtgtgcagggcactctgggcagacacggcctgggggacccactactgggtgttgcgcgggcgccctgcagggtgcggggctcagggcgtgcagggctgaggcctgggaggcctgcgagcaagaattgcagagatcccattaaaaatttttttttttaaattttttactgcgtgtgctcacgaaacactaccaacctcgtacgttttaaagattgttagagttgcaagggatagtctggtgtctttaagtgtaccgcttgcccagggcctcctgggagatacattctggaattttctgcttgggtggggaggttctgccccgggaccatgccctatagtgagatttcggattggtgagaggtgaggggagctgctgtggaaaggcagatggagaaaggccggcctcaggtgggtccccgggaaggagccctcccatagcgggtatgcagtacggtttccttaaaccacctgggcctgacatatcccctgggaactcttcctgtgcctccagggattagtgtaccccgggatgcaggtcccccattcatttcttccctgggactcttgtattcctagggatgtgtgtgccccgggaagacatatgacagatttgcctctaggcatgtgtgtgcccccatgcacctgctccccaggatttttgtacagtgcagggaacgcttggttccccagacattttctcccagggatgcctgtgcccccagggatgcgtgtcttcccacccgtgatcctgttccaagagggcagggtcttgtccccttcagtaggtctcctggcggataggtcactcttctctcaagccttacactggaggacccactgtagcttgtattggtcggtgttggtcacgtctcctaaatgacatgattagtggctgtcacccttctatcatcccca

SEQ ID NO: 41326 - DNA, 887 bp, Artificial sequence
  DNA replication origin
gggtgagctgggcgccctgcctcggttctcagggttggggtgcctggcaaacagagggccacaaaccctccttggatctaggcacaggaattgagggacaggctggattgggaagggtttagcggcttctgtgtggtctcctgggaagtggaagagtcaggaagactggataatgagggcttgaataattgagagtcgctggtatttccgcaagcccatttgccttggcaacatgcgcttctgccactccagggtggagcagcccctggccctgactttgggccgtcagagctatgctcggttgcctaccagggagtgacagggcgcttgggaggtttccacgaccctgcctgctgcaccgtcggcttcatttcctcctttgttagaaagttgagggtggatttgggagaacggatgtggctccgacatgttcctgagttgaggactctaagggaggagggggaagctgggggaaggggcgggctcatcggtgaggttccagattcaggcaggggtgtgacaaggcacggagggacttttgggagggatggttgggatgagtgacgtggcctgttccagaggagaggggttaggaaatgtggggccctggggtttggaggaagcagtgcaggaagtgtctgagaatgagcttcacggtgggcgtgattaaggctgatgtgctacgggaggcgtgtcacgtggtggcctgggtcagaaaagggaactgtgacgaactgtgggcattcagaaaatggaaaggaacgccggaaacccccagggctccccacagaagctctggggacgtgaaaggacagcgtgtttcaaacttgggttcagctttactggggcttggaggagcccgtgtgcagagaagaccaacaacacac

SEQ ID NO: 41327 - DNA, 1122 bp, Artificial sequence
  DNA replication origin
tggactttaaataaccttcaggagagaaatctcaaagctctaaaccagcaaccgagaatttccttcagggcatccatcttttacacggagccatcagttgtgtagatgatgggttgccccaaaacactaagacgcaccagtgaagggaggggagctgtggcaggggggcctgcactgcccccgcctttccccccagcaacgcctgggctgggagctgggggtgggtgagaccctggctcaggccccactcaggacagtttgagggacaggcagatggggggactgagccatgggggtctcaccacccagacttggggttttgggcctccctggaggaagtggtcctggctgaatgtctaggatggatgtaaattagcccagggagggggagggggctcctgaggagacccccaggcaggctcccagtggctgagcaacggtgcagcctgtgggctgtggccagccctggtcgggggctggagaggtgagcagccctggcgtcccacaaacacaggagcttggaacccttgctggggcttggcaggggtggccgatttcagtggtgctttggggagtggggaatggacggaatgggggaacggcggggaggcaggctggcaggaatgtggcacggggcacaggcagtgccccgaggaggtggcgtgggtgggcgcaggcgtggctgtgatttccacgctgttttctagcgggctgcagcccctctgatgctgaaatgaaaaaggacccagatccttgtttgtgggaggggtgggaaaggatttgcaaggagtgtggtctcttttggacgatttttcagacttcttctcgtttccaggccctctgtgctcacgtgacccctctgatagcgtcagggcccgtagaaaagtggctgtggcatgttgggaaggccagcgggcctcctagccaacgaaaagggggagtggctggtccgaagttgggggatatagacaggtgagggaccagggccatagtcactgtggtttctatggggaagaggggatggtggaggtcctatttggagctgttgtgttgtgaggctctttacagaccctgccaacaaagagaaagacaattccacactgttatctctaaacccaaacc

SEQ ID NO: 41328 - DNA, 1243 bp, Artificial sequence
  DNA replication origin
ttttcatcgcatatcggggcacacccatctgcacaccttcgctattggcgtcggtcgtcatcacctgtgcaggcgtgctcacccggtttctccactggatccagctttattttcctttctatcaaccatcacaacctgaaactgtgggcgtccgtgtgtctcttggagtctagtagaatgtaaggccctcaaggcagaggcctcgtctgtcctgtttgtcaccagagcctggtccgcagtggtgcctagtaagttagtccacccattcaccacatccttacagagctctggcgccaggcagcaagtgctggtgctgcggacagagccacagacaagccggtcatagcttctggcctcatagaccttggagtctaacaggggagagcctttcaaagatttgctcccattgctaatgggacaggatgagacagggtgctgggggactgagagctgtgatgggggatgctgcctggagggctggggtggtctgagctctggaggaggaagtgctgctcaggtagtgagggagggggtggtatctgggttaggggaagtggcgtgtgcagaggccccgtggcgcagatgagcttgggctatttgaagaaccccagcgaggaggcagggtgttcaggtggctgtggctgtggcccaggggcaagagggagatggggaggagtggaactggttaagaagtggacagaagtagggtgagaaggcaaagtccaggatctgagacaggaggatggtggccttcctgcctcccttccttcctgccttccctggaaaggagcacgcctggggtgtggtgagtcctgttagagatgctcacggaaccccctctccccaccccgccccgtggcaggggcatggagaggcgggccctgtgcttagggggtcctgggttagggacggcgctggaagttgcaggagggcagaaaccggcctctgaagagagtggggagggagaaggggagctgtccagggccctcaggcatgcatcatgtaagggtcaggggagtcagggaggatcccccaaaggaggctgtagagggtgaaggaggagggcaggaagccagtgagtgtgggggtctgtgggccatggggggtgggggaggcagctctttgggaactgagggggttcgggtgcagccctgggactcccaggccagtgctctccctccccctgccagccacctcgcagagagagcccggggtggaagcagggtagttggtgctgtgccct

SEQ ID NO: 41329 - DNA, 1084 bp, Artificial sequence
  DNA replication origin
aaacctcctaggcttgtgacaggtggtggtgagggtggggggatgaggtgctggggaggccatgtcccataactcactctgaaggacacagtgatgcttggaccacattgtttgtccttattcatctggccctcagaaagtatatttggagggaaacatgtctgtgtttgttttggtcacacattcattcattcatctgatgaatgaatgttcattggcttacatgtgtcgggtggctcttggctgtagagacacagtgggaaacaagagagatgagccccgcaccctgcgcctgcccactcccccagcacacattctagcagagtgaagaaagagaagtattatggggtggagtggttcaacctgaaacctagatgatgttttaaaggaatgacaagtgctaggaggaaagtaatagaaggttatggggtacagtggtgggtgggggttggggaaggcaatccagggaagctcctctggggaggcgacatctgagcacatgtctgcacagtgagcttgggaagggcgttctgggctgaggctctaaagcgagaaagagcctgttgtgttggaggagcagtgaaaagaagcggaggcggggcccaggtggcagagagggagggagagagccaagagatgaggctggggccagatctcattcagccctgctagacaacagtctattccaagtgacaggaagccattggaggttttgggtagggctgtgacgtggattgggttagagtttaaaaggtcacttaggcttctgggtgcaggatggatggggaggagagtcaggagttggaactgagagatcagtcaggacaccattgccatggcccaggcatctgatgaagtagctcagcccccagagtggaagggcagacatggggaggtactgtacagttaaactgccataggaaccaagactgatggccaggtttgtggcttgagcaactggtaaatgggaagccgttgggagtagggtgggaggttgggaaggcgggggtctgtgttgtacatgctggggctgagatacctgcccttttggaggtgatgctgagcaggtgagcctggagtccag

SEQ ID NO: 41330 - DNA, 2729 bp, Artificial sequence
  DNA replication origin
agccagagtgaagcacctacacctccctgacccattcctgttcttgccacattctgagcctttgctgatgctattccctcccctctgcaagcccttccttgataactctgcaaaccaatccctgatcaacttcccggctcccctctgatgcaatgcccttcctgactccttgagattattctaagccctcattcttccaggcccctcctctgacccaggcatctgaaccaacacgtttcactgtggccctgcaagaccacacgtcactaggagaacagtgggcacagactgagagctccctgaaagcaagagctatgttggatcaacttaacatcccatgcagttcagggcctggcactaaacaggccctcagggaatgggggaacaggcgtgtgggtaggggatgggtggatgagcaggtgggtggatgggcaggcaagtgtatgggtaaattgggtggatcaataaacagaacaggaagatggattgaaggacaaacagatggatgcatgacaggacaagcaggtgaatggaccggtaggcaagtggatggatgaatgaatggatggacagacagacatatagataaacttcctatgggtgggtagacaggcaggcaggtaggtgggtggatggatggatggatggactgggtagatgaataaacagacaggaagataggtgcatggacaggcaggtaggtggatggacaggtaggcagttaggtggatggacaggtaggcagttaaatggatgggtgcatagatggtgggtggcttggtaggtgaacaggagggctaataggcggtcaggtaggtagataatgggtagatggggatggatagataggtagatgatggatggatggatggatggatggatggatggatggatggatgggtgggtggatggatggatgggtagatggatggatgggtagatggatggataggtgaataggtggatggatggatggatggatggataggcagacatatagacaaataagcttcccctacacccttcacttcacctggaagtgaataaacagactggtcatgccagttctgtatatctgttcacctagaggtagaccataaagaaaaatccttggaaaacttaccatttctgcaggagagttgggagtgaggtagaattcctttaagtgcaggaagaagccttcaagttgtccaatcagcaagagtaagatgaccccatctgcaaactacaaaggaaggaactggagacaatcacatggaagaagcctggcgaagcccactctgtcttttacaggctgtgtggccctaaggaagtcatacaacttctctgagcctctggtgccttgatgagaagtggggaagacatgcctgacctcacagggttgcaggtaaaaagtggtttcaggctgcctggtatatagtacatgctcagtgaaaagagtgctttctaaacttactgcagaaaagcctcatatcagtttttaaacagcacgctcttccacaagctacagaaacacaggggaaaacagagttaagtgtaaaattattccatcagagaaaggcagagagcagcacaccaggctcatctcgctggctgccacattaatatttctgtctgttctgtctgtatgttcagagataaagctgtcgtccctgccaccagcatatcatatgttaatataatcctattgagactcttcaaagatacaaaacacaggatgggatattggaaggaactgccattcgaagcccttaatggaatttcctcatattaagtctgcttcgatgttattagtttgggcctgaaatcttttctgctgctattccttggtaatacaactgaaatgcaagggacttccttaccccattttattgaacagtctctaaataccacctttgcacatgccatgagtctctgaaacccattattttaccaagggagagatacagatagaacaggtagaatgtaaatctcagaaatcatcctgtttatacccacataaaatataataaaactacaaatctctcacttatttcatgccggcagcgtgccaggtaatataccaaacacgtggggctcaccagctcatgtatcactcacaattctaccaagttgctatcttgtacccactttataagaagaagagcctgaggttcagagaagtccagtaactcacccaaggtcacacagcaaatgtggagggttctcagcagaccccagggcccataagtggtggaggcaggagggaaatgtgtgtctgtctggctacagagcgtgatacttccaccctgccatgctgccacaccatatcacacacaaacttctcacgtggccaccatgtgaggtggttataagcactaactctggccccagctgcctgggttcaaatcccaggtccactacttatcactgtgtgactttagacaagttaattaacctctctgtgccttaacatcctcctctgtaagtggggtagtacagttcccacttcagaggattatggagaggattcaatgagttaacatggaaagcattttgccctgggactggcacatagtgagggctttattggttttagctactaggcatgggagtacattaacccctccctccccagccaatgcccatccagagtctctctgagaggtcagcagctctggctacgatcttcatgagccaactggtccatctgggaccagactccctccccaccccagaccccagcaccc

SEQ ID NO: 41331 - DNA, 744 bp, Artificial sequence
  DNA replication origin
gcagggagctggtggcgaagagcacaagactcaggcctcttgcctggcagtgacccggggtaagccttggctgcccgtggacctctctttccttatttggaaagtagtaaaatcccttctcatgggccaggcctacctggtaggaagggtgctcctgggaagggaacagcttgtggcaaagcccagagatgggagagcccagggagctggaggaagtggtggcacacaccacaggggcctggcgggggcggaggcaggactagccagcgggcactgaaggctgtacctggggaagaggcggtgggagctgcatctttgcaggctcacctgccctctcaccccacctccatcactctcttcatccctcttccccaggtcaagccacagccctcatgcctggaagcaggcagccagctcccagccagtccaccagcctctagggtccacgtgggaactgctgatccccccaggtcaggccccacccttccagcccctctagccagagtgaagcacctacacctccctgacccattcctgttcttgccacattctgagcctttgctgatgctattccctcccctctgcaagcccttccttgataactctgcaaaccaatccctgatcaacttcccggctcccctctgatgcaatgcccttcctgactccttgagattattctaagccctcattcttccaggcccctcctctgacccaggcatctgaaccaacacgtttcactgtggc

SEQ ID NO: 41332 - DNA, 1064 bp, Artificial sequence
  DNA replication origin
ccgaatggctccatagccatgcccccacccaccgggagaagtggattcagtgactgtcaaagcaacccgggctgtgtcctgcagctgccctcgtgagttttgcccaaaagtcacaaagaagcaatcttcgtggttgattagtgggttcaggtcatctccagtctgtcctcgggagctgtgggttcccactcgctccagtgagacttggcattttctgcacataaagaagagtcgtgtgggagaattgcacatagtcagtccagggcatccagagtggggcagagctgatggctgatgggaaccggggaggaggctggcggggaggggtgagattggtggggagggctggggctggccgggaggggtgggactgatggggaggggtgaggctggcggggaggggtgaggctggcggggaggggtgggactggtggggaggagtgaggctagtgggcgggtgaggctggcggggaggggagggtttgtggggacgggtgaggctggcggggaggggtgaggctggtggggagggctggggcctggtggggaggagtgggacttgtggggaggagtgggacttgtggggaggggtgaggctggggagaagggcaaccacagccccaggctgctgctcctccctggaccctgaagaggcctctgggtctggggttttcacagtttgacagctgaggccttggggaggggctttagatgggggttaggggctaggtcatcattgacacccactgggggcgcctaggcagatgtccttcgggggagcaagatgggagccagggacgcagtgccaggtcagccctgggagctggtgtctgggtgtgagaaggccttgaggggtcttcccttcacctagcctcccatctgcctgcccttctcagctcccaattcacagggcaaacccaagcccataagcgtgttccacgtgagcactcagatgcacccctcttcatggatacccaccctacttcccggctgcctctgggaaacgtgcatcctcccacaccaggtacctggagcccagctccttccacctgctcaggtgcccc

SEQ ID NO: 41333 - DNA, 990 bp, Artificial sequence
  DNA replication origin
gtgaggtgtttgaattattaaaaatgttggttgagagaggttgcatggagaaggtaagcacagaggtaaaggaggtgagggtgtgagcccagcgaatatctgagacaagagcatctgagcagaaggaaccacaagtgcaaaggccctggggcaggtgtatgcctggcaggttggaggaatgggaaggagggcagtgtggctggagcccagtgaacaggagaaagtgaaggggggtggaatgcaggaggggtaatagaaggggatgttagagaaggtgcagggagccagtcaaattatctggggctttgcagagtccgggaaggacgctggcttgcatttcaggtgaaaaggaggagcctcggcaaggtttgggcagaggagcagcataatctggcttaccgtgtaaaggcttcttctgactgcagtgctaagaacagactgcagaggcaaggatgaaggtggcttgcactaggatggaaacggggcagggtggagagaagccatcagattccggatgcactggggcaatgaaacgataatttcctgacagattggatgtagagtgcagcagaaaaaggaaccatggataaacacaggctcctggcccaagccacggggaagacagggcagccaccaacccagatggggaggtgggaggaaatgaggagatcagtgttggacgtgttggatgtgagcagaggtgtctttgacatccacgttgaaaacctagttggaggtcaggagtcaggacagaggtccaggctggaggcgtacatgggagtcactggcatctggagggcatttaaaaccccgaggcaggatgagatcagtaagggaatgagagggtaataaaacaagacacggtaaggactgagctccagaatgcgccaacacgttcaaggtcaaggacacataaaagagccagcaagggactgaggtggaactaccagagagatgggaacaaggctgagagcagcagagtcctggcag

SEQ ID NO: 41334 - DNA, 840 bp, Artificial sequence
  DNA replication origin
acaggccctcagctgggcatccacagccttccatggcctggccctgcctctctgggcagctgggatctgtaggatggaaaggaatgagtctgtcggagttggaagagaccaggggaggaagtggggagtggtccgggcactggaaatagcacgtgcagaggcactgaggcagagacagctgcacatcaatccatcagaagagcagccaggtggcatgagtgtgggggaggaaggaagcgcaggaggggacaggtgggagatgcaggtaggtctgactgtgcagggccatggtaagatgtgggcttctcggtccagggacaggggtgccctcgaggagagtgacaggacgcatttgcctttgggaaggcagctgggggtctaccagagaggctgccgctctcccacgagctgcagccatgtctgtggcttggctgagggtggtggtggggaggggccggcaccagggagtggagtccgtgagattggccagggcctggggtgggggctgagaaggaggtgggggtccaaggaggatgtctgggaacctgggctgagtagcctgggagattttccaagatggggaccttggggcggctgtggctttggtctcagcagcatggagtgttttgagtttgagatgccccgagagaccactgcaatgggcctggggaggaggcgctcccacctgtggcaggaagaactccagggcaaatggggtctggaagccgcgagaggatcaggacagctgaggggcatgggacctggcctcggatgtgggctgcgtgccctgccctctgcctgtcgctcctgcgatgtcccctgcctgcagtgcccacgtcc

SEQ ID NO: 41335 - DNA, 1513 bp, Artificial sequence
  DNA replication origin
aagggacacgtccttgtcaccccacagggccttgagcccagatgtgtcccctgatcaatgtgtacacttactggagtgccgcttacctcctccccaaagccatgagtcagtctgtgggacatctcaacgttgacggcatccaagagggagggagattcgggactcaagtctgcagggttgtcgagataggagagagtggttccattcgtttaagggaaatatggagccagcgaagtgtggagacttcgtcaggtggggttttggcgagaggccactgccacgcagctgacagcagccaaccagcaggaatggaggcagggaggcccagggggaggctatcactgtgcccgaggcagtggggggacacaaagcagtattttggaggtagtgcaggcaggacccacaaaggaattggatgttggaggggcacactgaggacaaggacaactcagaggtctgacccaagagacacgtggtgttgctgctgaccaggaaggacagtgctggaggggcggagctgggcacagggtggtgcatcgttaccaccatgggacgccagcaccaggggagaggcggagagggcagaggtgggtcctgaggggctaggacaggtaagaagtgagcaggagtctgtgtggcatggtgtgtgcattgtgtgatgtctgtgtggcatgggtgtgtgtatgtgttgtgagtgtgtggcttggtgtgtgtatattgtgtgggtctatgtgacattgtgtgtgtgttgtttgtggcatgtgtgtgtatattgtgtgggtctgtgtggcgtgtgtgtgtgtatggtgtggtatctggcatggtgtagtgtgtgtagtgttgtatctgtggcatggtgtgtgtgtatattgtgtgggtctgcagcatggtgtggcatggagtgtgtgtgtgtgtgtgtgcgcgtgttgtgggcgtctgtgtggcatggtgtgtgtgtgtcttctgtctgtggcatggtgtgtgtgtgtattgtgtgggtgtctgtgtgtcatggtgtgtgtgcatatgtactctgcatctgtgtgacatggtgtgtgtatgtgtatattgtgggtgtctgtgcagtatggtgtgtggcatggggtgtgtgtatgtgtgttgtgggtgtctgtgtggcgtgtgtgtatatattgtgagggtctgtgtggcgtggtgtgtgtgtatatattgtgagggtctgtatggcatatgtatgtgatattgtgtggatctgtgtggcatggtatgtgtgtttatgtgtattgtgggtgtctgtgtggcatgctgtgcgtgtgtgtattgtggatgtttactgtcccgggcagtagaaaggacgtcggggaagcagccccagcatcagggacaggccaggagtgcagaatgcatggaagctggtcaggtcggagcccgggatgaaggaagcacagagatgcaagggtgccagggcccatggaaccaagagccgatgatcaaggccacagtgcacacagccctggaggcaaaggacatattc

SEQ ID NO: 41336 - DNA, 1704 bp, Artificial sequence
  DNA replication origin
ccctgggctcagccctggtcagggccagaggagcccaagggaagcagcccccatcttcctacagaggccactgctggcgccagggctgacctaagcctgggaagatctggagcctggaagtcgagactgggagaggcctcatgctcatctcctccaggcccagagacaggcaagggttttcccaggccacacagcaaaccaggcagaggaagaattagaaccaggtctccgggttccgggctggccccttccccccagcctcaaacagggtcttaaaggatctgctgcccgcgagacctccgtctgggcgagagcgaggtgagtctctccctggggatgtgcagcggtggcgtgtacaggccggacactggctccattcacgcctcctcgacaccagaagcgcacacccacccaaacacatgcctgcagcagggagcagacggaggcggcgccggagtgattaacagatcggtggcttcaggcagccacagcccctggcacgcactgttagggctcggcagctccagctgctgtggcaagccctggacaccatccactctgggcacaggtcggggagacttggaccctggccctggggaagggtgtgggagacagatgtggctctgggtgacaggggctgggtttgagggaaactcagggctgtgggccagaagacaggcttgacccagctgcgtaggagggtcagggtgtccggaagacttcctggaggaagtgatcttcgacaaagggccggtgggaggtaggcaggggaggaagggggcagggaaagaaggcacggcctgtgcaaaggccgggtgctggagcgcagaccctgtctgcagtggagtcggctgacaccgggagagccaggcttcacagcgggcttccaaaccctcccgcaactttggccacctctgcctgaggaaggcagagcagccctcggtggggaaatgttgggcaaatgaataacagaagtgaggtcatggggcccggacagccccagccatgcacagcctggtcgtgttgagtgaaggggacccctgggggaggctgagagagggtctagagggcagaacctgatgcctctgctcttggtccagcaggatggggaggacctccgtcctcacagcaggggtgaggcagtgagagcatcccgggtgccaggaacaatgtaggcaaaggtggggcaggggcacctgcaggaaggagggagagggcagaccaaaacagcaccaggtaaaggaagaggctgccatgtcctgggagccccagatgccagctcagaattccccccaaagtgtctgactctgtgggaccctcagggatcccagcccaaggactcagggtcctggaggatgcccaggtggggaccaggcccgggcagtggattccagggaaggaggcgaacaggcaggcagaggagagggagccaaggccccgccctccagaggggctcagtaccctcctcccggggaccccaacatagccccaggacacattctctaatcagccccactgatgaagccggcctgagctggactgctcccctctgcttgctcactccctctctgtttgttcgcagcaattacaccgccttgttgggagtgtggatctatggatttttcgtgttgatgctgctggttctggaccttttgtattactcggcaatgaactacgacatctgcaaggtctacctggcacggt

SEQ ID NO: 41337 - DNA, 1560 bp, Artificial sequence
  DNA replication origin
tggggagggtcgcacaacactgaatttactcaatgccactgactgtccacttaaaaagggttaaagtacagtggcccacaccacccaggcgttgtaatcccagcactttgggaggccgaggctggcggatcacctgaggtcaggagttcgagaccagcctgaccaacctggacaaacgctgtctctacgaaaaatacaaaattagccgggcatggtggtgcatgtctgtagtcccagctacttgggaggccaaggcgggagaacagcttgaacctgggaggtggaggctgcagtgagctgagatcacgccattgcactccagcctgggcgacagagcgagactccgtctcaaaaaaaaaaaaaaaaaaaaggagcggggaggagttaaagtagtaagttctctgtaatgtatattttgccacaataaaaaaaaatttttaatgttacgagggaaaataaaacaaggcgtgtctggggagtggtgccgagaatggtgatgggggagctgctttagaagggtggtaaggagggcctctctgagaaggtgacatttgagcagacctttgagtgaggcgggagaggccacgtggctgtctggaagaagagtgctgcacacggagggatagcaggggcaaaggccctggggtgggtgcggtgaggaggcagcaggggcaaaggccctggggtgggtgcggtgaggaggcagcaggggcaaaggccctggggtgggtgcggtgaggaggcagcaggggcaaaggccctggggtgggtgcggtgaggaggcagcaggggcaaaggccctggggtgggtgcggtgaggaggcagcaggggcaaaggccctggggtgggtgcggtgaggaggcagcaggggcaaaggccctggggtgggtgcggtgaggaggcagcaggggcaaaggccctggggtgggtgcagtgaggaggcagcaggggcaaagaccctggggttggggtatcagcagggccactagagacagggctttgggccctgaggggactagattacttagactatgatcaacctgtctcccataggagttggaaacggaggctaggacaggccatctaagtgctctgtgtaacagcgtcgtcctcccagagcccctgttgcctgcgtgtatctggtgggagcagtagagatgagagatgggagttgatttgctgagcatctactatgtgcccggctctgggccagaagaggtactgtaccccatcctctccctggtggcaccctgttatggtatgtgaattgtgttccccccaaattcacatgttgaagtcctaactcccaggactcagaaggttgacgctgtttggaaatagggtcatcacggaggtcattagttaagatgaggtcatcagggtgaagtagggtggctccctaatccaagaagactggtgttttttataaaaagggacaatttggacacagaaacacctgtgcagggaaaacactatgggaagatggaggcagaggttggggtgatgcacatataagccaaggaatgccaaagattgccagcgaacccccaggaacagat

SEQ ID NO: 41338 - DNA, 1323 bp, Artificial sequence
  DNA replication origin
tctgtttggcatccatggcctggctgtgcccccaaccccccgagtctggcctgagataggtcaccgtgcgatcaaagccgcagccctgtatgctggacaaaagccccaggggcgtgtggggaactctggatgaaggggtctgggggattctgcatgaggaggtaggggctgcccttactccccacgcccccaaggcagctcagggccagagctgaaagctgaatcctcagtagaaagaataacccgccgtgcgtcacgagaagttacctaagtaaaaattccatttctaatgatctgagacagcaaagcttagaagccaacctccccattccaagctaggtcagaaagctactttggaaacctccccaggccttggggaccagccagctgctgtgatcccagtcaggcttccatgaggcggccagcctcagggccatgagttcaatagcactgatgttcacaaggccaaagtcatcaccttgggtccctccgtgggatgtgcagagggggaactgagctcaaggagctctgacgacgatggcgtgtgtggaggggacctgggctcagggagctgtgatgacgatggcatgtgtggagggtacctgggctcggggagctgtgatgacgatggcgtgtgcggaggggaactgagctcggggagctgtgatgacgatggcgtgtgcagaggggacctgggctcagggggctgtgatgatgatggtgtgtgtggaggagacctgggctcagggagctgtgatgacgatggcatgtgtagagggtacctgggctcggggagctctgatgacgatggcatgtgtggaggggaactgagctcggggagctgtgatgacgatggcatgtgtggaggggaactgggctcaaggagctgtgatgacgatggcgtgtgtggaggggacctgggctcggggagctgtgatgacgatggtgtgtgtggaagggacctgggctcagggagctctgatgacgatggcgtgtggaggggacctgggctcggggagctgtgatgacgatggcgtgtgcggaggggacctgggctcggggaattgtgatgacgacggcgtgtgtggaggggacctgggctcggggagctgtgatgacgatggcgtgtgcagaggggacctgggctcggggaggtgtgatgatgatggcgtgtgtggaagggacctgtgctcggggagctctgatgacgatggcgtgtgtggaggggacctgggcttaggaagctgtgatgacgatggcgtgtgtggaggggacctgggatctgggagctctgataatgatggcgtgttacaccactggaca

SEQ ID NO: 41339 - DNA, 1181 bp, Artificial sequence
  DNA replication origin
aaggctggaggactgggcctggacgtcaggcagacctgggcttgagccccgattctgcccctagctggctgtgtggctcagagcagatgtcctaacctctctgagtcccagcacctctgctgtgaagtggggaggacgctgcccagcactgtggtgaggaacaaataaagcataaagaatacatcaagtataaagggctcagcccagtttctggtgcggttccatcaatgcttagaaaaatgaaatgagggccaccatctcaggagacccaggtgggaggatcttggggccagtcctccaggggctcccttctccctcctaaaatgcggaatcgataaaagatcctcatctccattctctcttggggccctcgaggaggctgcaaccttctccccacgagatctctttacaccagaggtctcccggccagggacaggggaaggtggggaaacgggggctcactggcttcgaggccacagaagggcaagcgcagccttgtcccgcaggtgaggggcgaaatggggggcagactggagctggggggctgccgggtggagaggggagaagaagccgaagaggggaccccatgcagtggcccaggagggtcgggaagtggggcctttcccacaggaaaccctggcagaggagcttgtctcatgtgaagggttctcggcccaagctgaccgtgaccctgatcctcctggccagggtctggctggcaggaataacgtggctcccagacaaagcaggtgtatgttccatggggatgggaggactggggagtaggagactggggtgggaagaggagaggaaaagggagtggggaggaggaggaaggaacaaaggagagaggaagaacgcagaggaaggaaggaaggaggaagggagggaggaaggaaacggggcaggaaagcggaaagagggaagggaaaagtagaaggaaggaaaatgaggaggaaggcgtgaaagaacggacggaaaggaagtaaaaagagagaaagtgagaagccaccgcaaacagcaggaggggagagagaaagagccagagggggagaaaagagaccgcgaaagaaaaaaaaaaaatgagaggaggacgcaagagagagagagggagagagagagaggaagggaggagagaggaagggagagagaggagggcgcaggacgcggcgggcagggcg

SEQ ID NO: 41340 - DNA, 2927 bp, Artificial sequence
  DNA replication origin
ctttcaaagataagagggaggctcagcctcatgcccgaggcacccagctggacagtgggaatggtgctggggcgcccaccctaggaagcctgcactgttggagtgcctcagtttccccacctgtctcacaggtgtccatcccttcctgtcttcagtggacctggcttgagcagctgcccaagcaggacacaatctccctccaagggagccgatgtgggccctgctcatgggaggggcagagggaccccatgaatgccccagcagggcgaggtcagggtcacagtgagggttcagggaggcagtgcctgctcagccacaggggcaggcagtgttgcccagtgggaaggctcatgggatttgtagcaaggtggcactttgtccctaattggccaggtggccttgggcacggcacagaagctccctgaacgtcagttctctttcctaaagaggtcacagcactgcctcccgcatagagtgtctcgaggactaaatgagactgggcccatgagatacttctcctggcgcctggcaaatatcccaagagggggacggaggaaactgaggccaagagaggccatggaacaggtagaagtgcccggtgctggtggtggcggggctggaaggtgcctgccagactgtcccgtctgattttggctgttatgctggagaggtgcctgtcatctgtgccctagcagggaccgtgtctcaggctctcagtgccagggacactcagcgttgagggatgcgggctgagcaaggggaggaagtgtaggggtgtcacagcaggccgcctgtgttgctgggatggggtgtgttgtgtgtgtggtgtctgtgtgtgtggtgtatagtgtgtgtatgtgtgtgttgtgtgttgtgtttgttgtatgagtggtgtgtgtgtgttgtatgtgtgatttgtatgtggtgtttggtgtgtgcatgtgctatgtgtgttctgtgtatgcgtattaaatgtgtggggtgtatggtacatgtgtgaatatgtatgtgtgtatgagagaatctgaatgagtggtgtgtgttttgtgtgtgtggtatgtgtgtgaatatgagagtgtgtgagtgctgtgtgttttttgtgagtgtggtatgtgtgtgaatatgagagtgtgtgagtggtgtgtgtgtcttgtgtgtgtcatatgtctgtgtggtactgtatatgaggtgtgtgatgtatgtttacggtgtgtctgtgtgttatatatagtgtgtggtggtgtgtgtggtatgtgtgagatgtgtatgtttgtgagtatacctaggactgttgaaagtgtgtgctgtgtgtgtgttgtatgtgttgtgtgtgtacgtgtgtataagagtgtgtgttgtgtgttatatatgtatgttatgtgtgttgtgtgtcatgtgtggtatatgagtataaatgtgtgtgttgtatgtgtgcgttgtgtgtatgtggtatggttggtgtgtggtctgcgctgtgtatggtgtgtttgtgaatgtgtgtgtatgtgtgtgtgtatgaaagtgtgagcagagtgtgttgtgtgtatatatgaagatacgagtgtgatatgtatatgtgagtgatgtgtgtcaatgtgtgtgtctcaggctgtgtgtgtgtgagtatgagtgatgtgtgtgagggtttgagtggtgtgtggtggtttgtggggtgtgtggtgtgtgtgagtgtgtgaaggtgtgagtgaatggtgtgtggtggtgtttggggggtgtatgagggtgtgagtggcgtgtgtgtgtgagggtgtgagtgctgtgtatggggcctgtggtgtgtttgtatgtgaaggtgtaagcagtgtggggatgtggtgtgtgtgtgtgtatgagtgggtgtgtgtgagggtgtgagtggtgtatgtgtgtgaaggtgtgagtgctgtgtgtgtgctgtatgtggggtctgtggtgtgtttgtatgtgagggtataagtagtgtggggatgtggcgtgtgtgtgtatatgagtgggtttgtgtgagggtgtgtgtggtgtggggagtgccagtgtgtatgtatgtgtgtgaggtgcgagtgaatagtgtgtgtggtgtgtggtgtctatgtgtgtgtaaggatgtgaatggtgtgtgtggttttgtgtgtgtggtgggggtgtgtgagtgtgtatgtgagtgtgcgtgagggtgtgagtggtgtgggttgtgtctgtgtgagatgtgagtggtggtgtgtgagtgtgtgtgagggtgtgagtgaatggtgtgtgtgaggtgtgagtggatggtgtgaatgagtggggtgtgtgctgtgtgtgctggggtgtgcgatggctgttggcatgcgggggtggtagaatgaggcatctccctttttggggtgcgcatgtctggaatctccatatggtgagtgtgtcggtgcatgtttccacgtgtatgtgtggtggtgtgtgtgtgtgcatgcatgtgtgatgtgtgtctgtgtatgtgtggtaagtgtggtgtatgtgtggtttgtgtctgtgtatctgtatgtatgtgtggtgtatctgtgtatggtatgtgtggtgtgtgtttctgtgtgtatgcgttgtgtgtgtggtgtgtgtatgtatggtgtgtgtgtggtgtgtgtctgtgtgtgtggtgtgtgtctgtatatctgtgtgtatgtgcggtgtgtgtatctgtgtatgtgtggtgtgtgtttctgtgtgtctgtgtggtgtgtgtgtagtgtttgtgtgtggtgtgtgtatgtgtgctgtgtgtgtctgtgtctgtgtgtgtatgtgtgatgtgtgtgtgtctgtgtggtgtgtgtctttgtatctgtgtgtgtatgtgtgtgtgtgtgtggtgtgttcagggcatgtggaaagcgtcatcatttagtggagcccctccccctcatcctccctccctccgcccttcacctgccact

SEQ ID NO: 41341 - DNA, 1303 bp, Artificial sequence
  DNA replication origin
agtgagtggagcgcagccacactggaacctggtctctgcaagcttggggagtgaactgaggttgggaagggccctgggaaatcacaactttagaaagctctccctccttcaggaagcctcctttgattagtctgctcagattggcctctcacttttctgtttccctctggcctttagagcagaggcccctgttttaatagatgattgcttggtattggcctggccttcccaaagacactgagagtccccgcatcagattcaagtttccatgtctttgcatcctgcggggtgagcggaggactttgcatccagtagatgggtatgtgtggatgggtagatggatgcagcatgagtgaacagatggtagatggggggatggatggatagatgggtagggaataggtgaatggatagatgggtgaatgggtggataaatggatggatggatggatgggtaggtaattggtggatggatggatggatgggtgagtgggtgggtgagtgaatgggtgggatggctagatggatagacaatgggtagatgggcagatgggtagagggttgagtaagtgaatgggtgggccggtggatgggtgagtagatgatgggcggatggatgatgggtgaacaagtttacggcaggatgactatacaaatgagtggttgggtagatggagggctacgtggacaactgaaggacgggctgggttgataggtagatgggtaaggtggtgagtgtgagatggatgggcgaggggtgcatggctcggggggttactgggtgaatgatgggtggtgggtcttcaatagacaataacaataatggcagtaataatttacctccagctaatatttattgaggtaccaggcactgttccaagcattttacatgatgaattagcccatttaatacttgtaactcttccaggggagaatgcatggtagattgagagggggcagcttgggtgtctgtgttgtggacaggcaggcagtcaggcagacggctggatgtgcattttgtgatgggggcagatgcttgatgaaacagatagggagctgggcagcttgggaggggaggcgtgcgggaaacaggatgatgagaggtcctgaggggcaggtgagaggctgacataagagctgagtatgttttatttgcccccacctcagggagggacatttccatccactggacacccacaccaggaagctggtgtcccctttgatggccatctctgcctaggtccctcatcctaccacctcttagggctgcagccgtctaataccatccattccagatcccact

SEQ ID NO: 41342 - DNA, 894 bp, Artificial sequence
  DNA replication origin
tcccggtgtttacaaactgctgatttcccagggttccaggctggcatgtcggcaaagtgtattaaaatccctggtttctgctaagttcccgctcagggtggcttcttggaggggtgagatgtgaaacaggcagaagggcaagaaccagcagccatgccgaaagctggggaggaaactcctgggaccttccagaaggctggagatggacaacagctgggctagaggaagagccaggggtgctgagtggctggagcctggttgggagtgggggtgggaaaggggtgtggggaggggtcatgagatcaagagaggggacagagggggcagtcacttagggccaggggccttggtgagtgttgggacttcatccccagtggactggaggtggctagagctgcccggtggcagggagaaatggcaggattccaaagacatcttgccttgggtcgaggaagcagggagccagctcagagcaggctgtgggcacctggtgggagatgagctgccggagagggtggcttggacaagggtggcctggagccctggaagggctgccacagggtggagacaagcagagggattgggatgtggcctgaaagtggggccgcgggaagggctggctgcctcaggtagaggcaggaggggcaggagaggggagatgggggaagctcggagtggggggagatggaagaggggaaaccccagccagtagatatttgtcatatatcaccctaggatggactgggcatcagcaaataggaagtccctgcgatgggacacaggctggccgggcctgtcaggatggatgcctgccaaggccagaggctggaatttcactgggggaaagcccctcactcctggatcccatgactcagtgacactcatgaaaccctc

SEQ ID NO: 41343 - DNA, 1070 bp, Artificial sequence
  DNA replication origin
cctcttcctggaatgcctttcccctggccctagtggtgagctcctgcttatccctagcgagccttgtcaagctcttcttctttgaagcctgggttctggggtcagaattaatttcaatttcactttcattactatggcacttcacttgaacccagtgaattgagaaactcagcatactgcacatccacacccacatccctcaccagaatgtgggctccttgatatcaagaaccatgtctgagttaaagtactcaacacaaggcttggcttggtgtttcgtgagtcattgtgggatggtggatggatggatggttgagtgactggatggatggatggatgggtaggtggatggattggtgaatgaatgagtggatggatgaaagatgagtgggtagatggatggatgagggggtgggtggatgtttgagtatgtgggtgggtggatgagtaggtggatgtatggatgggtgggtggatgaatggatgagtgggtgggtgatgagtgggtgggtgagtgggtggatagacgggtagatgtatgaacgagtgaaagggtggatgagtgggtggatgggtggatgagggggtgggtggatggttgagtaggtggatgtatgggtgggtgggtgaatggatgagggggtgggtagatggatggatgagtgagtggatgactacatgggttgatgagtccagtggattcatgaatggacaggtggatggatgggtgggtaggtggatgggtgtgagaatggaaggacagatggatggataggtaggtggatggaaggatggatgagtgagtagcagggtagatgggtgggtgggcgaatggatgggtggacggctggatggatagatggatgaattactgggtgcattcacttgttctttcctctgccttacctgtcttcatagcccttagcaccatctgcatcatgaacatttacttatttttttacatattatccactttaccaaactagaatgtgaatttcatgaagagagaaacttgttgaagactactttctcaaagccgaaaattgtttcagacacatagcaactgctca

SEQ ID NO: 41344 - DNA, 971 bp, Artificial sequence
  DNA replication origin
gaaaggaaaaggaaaaggaaaaggaaaggggaaaggaaaggaaaggaggaaaggggagggaagaggaggggaggggagaggagaggaggggaggggaaaggagaggagaggaggggagaggaggggaggggaaaggaggggagaggaggggaggggaaaggagagaagaggagggcaggggagaaaggggagggagggagggagggagggagggagggaggaaggaaggaaggaaggaaggaaggaaggaaggaaggaaggaaagaattgttaccagtaaccttccctggagatctgcctgtgggaaggctatggaaaatgctctcaggatggacacctgtgggacgtgaggccaaggactggcactggggatgtctgcagtctctgtgagtcccacggagagctctggagccggctgaccctgcacggtagtcccgcgtcccccaggcccggggtgagcattgccacagaaaagaggctcacatggcctcgggtgaggtggcacctttgctcgagggcaaggttcagaagggaccccagctgaccgctctcgcagccagcactcccagcagcaggggagcagaccctttagtcttggaaggaaacccagacggcccaaggcatccatggcaagggcagatgatcgcagttaattggaaactctgctgattctggtggaaacccagtcagtccgtggaatcaactgaaacatccctcaaacgactacacgttcagcgaagcagccaaataaaaacacagcattaatctttcgtacgtatcagcaacgatctcttagtaactatgaaggaagcctgtgagactcgccataggatcatatcgacaacagaaaactacgcccaaggaatcgtttagtgactaggatgcttctcacagcattgttcactatgacgaaaattgtcaacacatttctaaaggaaagggatcatttgggtgaagcatggccagtccag

SEQ ID NO: 41345 - DNA, 1165 bp, Artificial sequence
  DNA replication origin
caaggccaacaaaggttgaggaaagtcaataccaagtcctagggcttgaggtctgcaaggggtcaaggccagggactaggtttaactttgcttagcatccttggagtatggcacagagcagacacaagtatttgagggacaggtgggtagttaggtgggtgggtggacgggtggatggatggatggatggatagatggatgggtaggtggatggtggatggatgaatgggtaggtggatggatggataagttaatgaatgtatgggtaggtggatggatggatgagtaggtggatggatggatggataggtgggtggatgggtgggtgagtggatggatggatggatggatggatggatggatggatggatgggtaggtgaatgggtcagtggatggatggatggatgatggataggtgaatgggtcagtggatggatggatgggtaggtggatggatctatgggtaggtggatggatctatgggtaggtggatgggtgggtgggtagatggatggccagatgggtggatgactgggtagatggataggtgagtggatggatggatggatggatagatggatgggtaggtggacggtggatggatgaatgggtaggtggatggatggataagttaatgaatggatgggtaggtggacggatggacgggtaggtggatggatggataggtgggtggatggatgggtgagtggatgggtgggtgagtgggtggatggatggatggatggatgaatgggtcggtggatggacggatgggtaggtggatggatctatgggtaggtggatgggtgggtgggtggatgggtgggtgggtagatggatggatggatgggtggacgagtgggtaggtagataggtgagtgaatggatggatggatagatggatgaatggtggatgggaggattggtgagtgaattgatggttgggcatatggatggatgaatggatagaaggaaggagtggaactgacgtcctgtgctttaatatgatggatcagttttgtttcttctatagcaagaaaacccccaagccccaccctgccgcaccctcccccaacaatgttaggagccttttctgggctccctctccccttcctgaactcccttgtgccacagccctgagcacattgtgtggtcaccctctgg

SEQ ID NO: 41346 - DNA, 1377 bp, Artificial sequence
  DNA replication origin
gcataatttgtgaagctatcatagggattcactgtgcagccctttatacaggtgtggaccaaagcttgtgcccagcagaggtcagctgctcccctgtggccacgtgccaggccctcctcctcactgacctcaccaggcactcacagctctacatggcaggctctgtttgctccacaccagccttctccaaaaccctctcctccaggcagcctctgggcttgctggccaggttcttagaggtgccagtaactaccacactcaggcctacaacctctcagtctccaaaaggcaccctctgctcatctccttttttgtcgggtcagtgaagatgtgggctgccacttggtgccaggcactgttctgggggcctgagtgaggtctgagatcaggatagacagagcgcgcccccctgccccaaccgtggaggggctgatctggtgggggaatcagatgaccctgcatacaaatgcatatttatataaagcatagagcagggggttggaaatgggtcgtgggaagaaacatgatgcaggtgatggggtgggagcaccagggtgctagtggagctggcaggtttagacagggcggtcagaaaggtgacactgagcagagacttgcaggaggtgagggaggggccctgccaatacccagtacctggtgacaagtgtccaggcagcaggaacggctaaagcagagaccctgaggctggcgcgtgcctggagccaggtgagggggcggtggggggtggatgtcatgtaggatctccagggtatagggttggagtagaggctggcacgggactgtgatgggatggatgtgctgggatcacagcagccactgcatggggaggagacctgtggtctggctgggtcgggggcagtagggggcgatggcggggaccattaagggcttgcttggagcagcgtacgggagagctgctggtggctctgcctggggccatcgtggggggtgcagagggaaataaggggggagggccgatgatgtttggagcctataacactggccatgtccttgttttgtcctctgggaaggggtcttgaaacaggaccccacagagtgattgaaagcagatttcacctttcaagggtctctaggaaggaggaggttgcacaggtccttgcccgtcgtccttcctatcccactcgcgaccctggtcctagcctcagaagtgcaacccctggctgtgcactgatttgctgagtgacgtagtgggtcacttgcctcctgggataatcagtttccccattggctccgtgagaggtgactgaggtccttccagcctgcctggtgcctatgacaggaggagaggagtcatcagcaccaatgtcctgttattattgggtgtctgttattact

SEQ ID NO: 41347 - DNA, 990 bp, Artificial sequence
  DNA replication origin
aggagcctctgtggggatcccacagaatgccgtctgtagttcctgagtctgtgaagaggctcagccccgcagctcacattctccattctgcgtacccccccggccggagctgggttcactcctctgtggtcagaaagcagtgaagctcagaacaccacccaccttgctgtgttcgtttggaaggagggggcaagagatggtcggggctggggcatgagagcgccgagctggaaaggtggggctggcggtgagtgcttcccactgagaaggagctctgtgcttcagtggctgcggatggtgaggcgcagggcggggtgaacgcagggttggtgcacacctgcatggccacacccgtctgcagggccaccccttcccaggctggctgttagggatttgaaatcactcctggccctgggagtgggtggctgagatcaggtggaggaaggttatgagaaaaggggatcccgggagcccagaggccaggctgttgggaggatcaagcctgtggccacggcagtcaccaggaattctatcaggagtggtgttgagggggtgacagtgactgaggaggggtgtgacttgggggtgggccgcaactgttgcagggagggtgttgggtgacaaagtccaacagcgtgaattgggtgagtgtggggcgttcaggatggagggagggagaatggcatagaagccacagtgagggacaaggagaccgccatggccagtgggatgtgggcgagggaacagccccctgagagcagaccccatgggggtggcagggtcctcggggatggactggatttaactcaggcagagtctgaaggtgtaggtggttttgttgacagttgactgaagcccggggggtgtcatggaggggaagggagaggagccgaggggggcactgctgtgggagggatatgcagggccttatgaggcagacggtgatggggtccccggcttctcttgaggactgatgccatcaggacacag

SEQ ID NO: 41348 - DNA, 783 bp, Artificial sequence
  DNA replication origin
accctcctacagccatccagcaaacattttaaggtgtctcttgccctttgaggtccatagaacactttcaaatattggatgtttcgtggcaacctaagaggataagaaggtgggctccagtggtgaaaaagcaagatttggaaaacggagaccccctcgcccaggggtagcagtgcctaggccacctgcagcattgacatcagcaaactgccagggaggagagtggaggctgcagaacagtcaggtgcaggcaggggcccagggaggaggcgagacctgagcaggggtggagcagagggatggccggtggtggggaaggaggatggggatggaggaggaggagggtcagacatggcgcccagtgcctggcctgggcagctaaaacggcagccccaggggagatgggaggctcagcctgcggtgaactgaggggcccggggcttcctcgggggatgccaaggctgaggatgcatgggggttgcaggagggcacaggcagaggctcagatgagagagtcggggtcgtggagataccaggagccatcagaatttgagttgacccagagagaggcacagaaagagcggaggcagccgggacaggccccgaacacacacggccaagaggaggcctgggaggggcattcagagggaaggggcctcagaaatggggcagaaaggaaggttctagacagcaaaggggcacagggtcaggtgcggcagggaagggaggtgtgggtacaaatgcggtcccctaaacaggttgagatcctcacccccagcacct

SEQ ID NO: 41349 - DNA, 1684 bp, Artificial sequence
  DNA replication origin
ctgtctgtcggtctgtctgtccgtctgtttgtctgcactctccagtccagacctctctgtagccccagggaattcaaaagctgcggctgcccctcaggagtgcgggcacagcatgggaggcaggatgcacgcccctgcccctgcccctgcctctgcccctcccttctccctctgcacctggagaagccgccgtccagcagccccaggccagccacgggcgctctgggcctcggggagcccggacaccgcacgtgaggctgctctgctggggcaggtgggtgcgtctggacctccccagggtgctggggggaggatgggtgcacagcagccttggtccgggttggcccagcctggctgaagggacagggtgcctttttcctttcgtagagtatggtcgtgtcaccttaattttctgttgtctgctgggcacagcttcgtgctgctcctcactgctgcacccagtgctggaaagtgtgtgtgtggcttgagtacatctgggtgtgaatgcgtgtgccagtgtttccgcctaggtgtgtggtgtgtgtgtggtgtgtatgaatgagtgtggtatgtgcatgaggtgtgtggtgtgtgtggtggctgtgtgtggtgtgtgtgtgcacatgtgtggttggtgtgtgtttatgtggcatgtgtgctgtgcatgtgcgtgtggtgtgtgtgtgctgtgtgtgcctttgtgtacatgtgcggtgtgtctctgtggtgaatgtgtgtgttgtgtgtgaccagtgtggtgtgtgtgtggtgtgtgtgtgtttgtgtggtgaatgtgtctggtgtggtgtgtgtgtgtgcctgtgtatacgtgggtggtgtttctgtgtctgccgtgtgtgtgtacatgtgtggtatgtctgtgtgtggtgaatgtgtgtgttgtgtgtgtgtccagtgtggtgtgtgtgaggtatgtgtgtgtgtggtgtgtgtgtttggtgaatgtgtctggtgtgttgtgtgtgtgtgcctgtgtatacgtgggtggtgtgtctgtgtctggtgtttgtgtgtgtacatgcatggtgtgtctgtgtgtgtggtgaatgtgtgtgtcatgtgtgtgtctggcatggtgtgtatgtggtgtgtgtggtgaatgtgtctggtgtggtgtgtgtgcgcctgtgtgtacgtgtgtggtgtgcctgtgtggtgtgtgtgtgtgtacatgtatggtgtgtctgtgtgtgtcgtgtgtgtgtgtctggtgtgtgtatgtggtgtgtgtggtgaatgtgtctggtgtgtgtgtgtatgtgcgcgcctgtgtgtacatgtgtggtgtgtctgtgtgtgtggtgaatctgtgtctggtgtgtgtgtggatgtgcatgcctgtgtgtatatgtgtggtgtgtctgtgtggtgaatgtacgtctggtgtgtgtgtgtgtgtatgtgtgcgcctgtgtgtacgtgtgtggtgtgtctctgtgtggtgaatgtgtgtctggtgtgtgtgtgtgtgtatgtatgcccctgtgtgtacgcgtgtggtgtggctgtctggtgtgtgtatccagtgtggagtggtgtgtgtgtgcgtgtgtgcgtgtgtgcatacctgtgtgtatgtgtgtggtgtgtcagtgtgtctggtgggtggtgcatgtgtggggcagggagggtggatgtggcagtctcagggcctctgggaaca

SEQ ID NO: 41350 - DNA, 1728 bp, Artificial sequence
  DNA replication origin
tgggccaacccggaccaaggctgctgtgcacccatcctccccccagcaccctggggaggtccagacgcacccacctgccccagcagagcagcctcacgtgcggtgtccgggctccccgaggcccagagcgcccgtggctggcctggggctgctggacggcggcttctccaggtgcagagggagaagggaggggcagaggcaggggcaggggcaggggcgtgcatcctgcctcccatgctgtgcccgcactcctgaggggcagccgcagcttttgaattccctggggctacagagaggtctggactggagagtgcagacaaacagacggacagacagaccgacagacagatggacagatagacagggctcctgggcgggagctgggggagacgcagggggcctctctgggtggatttctcaggggtgggggctccaatcggccaataccctttctgggcagcccaccgaaagtgtggtgaggtgttgggtgtggtggaatttcaagcaaaggggcctgtggagtgagtgtgtgggtgtgtgtatgtggtatatgtgtgtgtctgtgtaaggtgtgtgtactgtgtaatgtgtgtgtgtatgtagatgtatgtgtgtccatgagtgaaggagcatggtatgtggtgcgtggtgtgtgtctatgtgcgatgtgtgtactgtggagtatgtgtgtgtgtgagtgtgtgatgtgtggtgtgtgtccgtgtgaggtgtgtgtactgtggaatgtgtgtaagtgtgtgtggtgtgtggtgtgtgtgtgaggtgtgtgtactgtggagtgtgtgtgtgtgaagtgtgtgtggtgcgtggtgtgtgtctgtgtgaggtgtgtgtactatggagtgtgtatgagtgtgtgtggtgcgtggtgtgtgtgtgaggcgtgtgtactgtggagtgtgcatgtgaagagtgtgtggtgtgtggtgtgtgtccatgtgaggtgtgtgtgctgcatggtgtgtgtgtgagttgtgtgtactgtggagtgcgtgtgtggtgtgtggtgtgtgtgtgaggtgtgtgtactgtggagtgtgtgtgtgtgaagtgtgtgtggtgcgtggtgtgtgtccgtgtgcggtgtgtgtactgtggagtgtgtgtgtgtgaagtgtgtgtggtgtgtggtgtgtgtccgtgtgaggtgtgtgtactgtggagtgtgtgtgtgtgtgaagtgtgtgtggtgcgtggtgtgtgtctgtgtgaggtgtgtgtactatggagtgtgtatgagtgtgtgtggtgtgtgtgtgaggcgtgtgtgctgtggagtgtgcgtgtgaagagtgtgtggtgtgtggtgtgtgtccatgtgaggcgtgtgtgctgcatggtgtgtgtgtgagttgtgtgtactgtggtatgtgtgtgaagtgtgctgcatggtgtgtgtgtgagttgtgtgtactgtggtatgtgtgtgaagtgtgctgcatggtgtgtgtgtgagttgtgtgtactgtggagtgtgtgtggtgcgtggtgtgtgtgaggtgtgtgtactgtggagtgcgtgtgtgtgtggtgcgtggtgtgtgtctttgtgaggtgtgtgtactgtggagtgtgtgtgtgaagtgtggtgcgtggtgtgtgtctgtgtgaggtgtgtgtactgtggagcgtgcgtgtggagtgtgcgtggtgcgtgtctgcgggtacaggatgagtctgtgggtgtggtgtgcgtgcccacggggg

SEQ ID NO: 41351 - DNA, 1243 bp, Artificial sequence
  DNA replication origin
gatggatgggtggatacatagttagctgtgggggatgagtgatggtgaatgaatggatggatgattgaacagatggacggatggatggatggatggatggatggatggatagatgagtagatggatgatgaatggatacatgcatgaacagttggatgggtgggaggatgatggatggatggatggttggatggatggggggatggatatacgtggatggatagatgatgggtggatacctggatgaaagaatggatggatgaatggatggatggatgattgaatggatggatggatggatggatggatggatggatggatgattgaacggatggatggatggatggatggatggatggatggatggtttgatgggggatggataagttgatggatgggggatggatggatgcatggatggatgactgaacagatggacagatggacggatggatgggtgggtgggtgggtgaataatgaagggatatgtggatgtatgggtggatgtgtagatgggttttcaggggcctagattgtccgaccattgcccctgttttggtacaagggaatggccatcactcctttcattcctctatcctctttctccctgctgattctaatggctccagattggccaagggctgtaggaggggatggtcaggcctagtgagctgggtgaaggagggtaagagtcagtgctgcactttgccctggacttcaagccaagacttccttgctaggagctctggcagtgagaacaggactcatgggagcgcctcagagcagacaggccactgccctaagccaagtggtgacaaaggccctggcccatggagagggaaggagagagggcccaggcttggcttctctgctgagccccaggaaggtgacaactcagcaaggtacaggtaggggagaagacagatatgcctcaaagtgggcctatgctggctggagcctcacaaatatacagcatcccccagcaacctgcacacgtgcatatgcacattcacgcacacatcatccagccaaggggcgcactggctggctcggaccacagccaccccactgctgtctcagaatggatcccaccaccaccttctgatgaggcagatttccttgtggccatttcacagaaaggcaaactgaggcaaacagactgagtggcttggtctgagcctggttcccccgaccagtactcccactcactggtctacaaaagccaagagttgtttcaaaggga

SEQ ID NO: 41352 - DNA, 1203 bp, Artificial sequence
  DNA replication origin
gctcaggaggggcccagatggaatggggcgaggacagctaggtttcgggagctaggagtaagggagtgagactcctagagcacctgagataggagcagagcatgagcgatggggagatcatttgtacacatttggctgcaggttatgaacatccatccacattatggtgctatcccaggagtctgcagtagagtcggcagtagatggatggatggatggatggatggatggatggatggatggatagatggatggatataggtggatggatggatggatggatggatatagggggatggatgaatataggtgggtggatggatggatgatgggtggataactggacggacggatggatggatggatggatggggggatggatataggtggatggatggatgatggtggatggttagatgggtgatggatgaatgattgaacagatggatgggtggatggatggatggatggatggatggatggatggatggtttgatggggggagggatataggtggatggatggatgatggtggatggatagatggatgatggatggatgattgaacagatggatggatgaatggatggatggatggtttgatggggggagggatataggtggatggatggatgatggtgaatggatagatggatgatggatgggtgattgaacagagggatggatggatggatggtttgatggggggagggatataggtggatggatggatgatggtgaatggatagatggatgatggatggatgattgaacagatggatggatggatggatggatggatggatggatggatggatcgatggatggatggatggatggtttgatggggggagggatataggtggatggatggatgatggtggatggataggtggatgatggatggatgattgaacagataggtggatggatggatggatggatgagtgggtgggtggataatgaagggatatacgaatgtatgggtggacatgtggatgggttttcaggagcctagagtgtccaaccattgcccctgttttgggtcaagagaatggccaccactcctttcattcctgtgtcctctttctccctgctgactctaatagctccagaatgaccaagggcagtaggaggggatggtcaggcttttcagccaggctgggtgtgataccagaccagtagttcttttcaactgtcatg

SEQ ID NO: 41353 - DNA, 1299 bp, Artificial sequence
  DNA replication origin
ggcccccccttccgcagggtcgcgcgtgccgccccccaaccccagccacccggtcccctctccggccgggcctccggacccgtagccgccgctcacctcggtccccgcgccgccgccgccgctgccaccgcgcagagccagagccggagccggagccggagcccggggccgggggagggggccgcggaggccccgccccgccccgctccgccgcgtcccgcccctcgggcccgcgcgggggcgcccgcagccgccgcagcccccagggactcggggcgctgcaggggagactcgcctaagtgcggcaagcgggtccgcgggcacgcccacccgggtccgccggagctggggggctggcgcttgggccccctcccggcctccgcccctgagcactgcgcaggctgtgggcggcgcccgccggggcagggggcgtcccgggtcacccggcggcccggatcggcccgtgacgccctcaccccacccctcggcgggccgcaaacgtccagagagcgccccctccccaagccccgacctgagcggggcgctagaagccgggaggacaaatcagacggtcagactcagtccctgtcccggggatcggggtccagccgcgggcggagcggggagggaggggaagacgaatgggcctggcaccaaaaacagcccagggctgtggttctcaaagtgtggcctccgttagtgcagagtccctggccccaccccggacctacagaagcaaaactcggggttgggccccctattttaacaagccttctgggtggttccagagttcagtaaagtttgagaagaactgccctggtggaaacatccagcaccccacatcctgcaccccacaacccacatcccacaccccagtgtctcgaaaagggcttcttttcactcttcacttaaacagcctcaccctgtttaagtacctctccgttggtacgtggctgtggtgggggcagtgggcggggagcagtggtgtctgtcccaggaatccccgaaaggattgacagtcagtgcctggtagaagccgcaagtcctgtaccagaggccaggctgtgggcattcgggcggtgatggttatggttattgtgttttggtgtagtgattgttttaatgttttagaatgcaattgtgcaaatatttgtgtccatattcagttgtaaagctttttttttccccttccatcattgtgcttgtttgacgctaagccactcatcccccagaaacagtgttgacatgaggcagatcagatggccggccttcctggtgaccagatttcaggacagcaag

SEQ ID NO: 41354 - DNA, 2139 bp, Artificial sequence
  DNA replication origin
cgccccctgccccggcgggcgccgcccacagcctgcgcagtgctcaggggcggaggccgggagggggcccaagcgccagccccccagctccggcggacccgggtgggcgtgcccgcggacccgcttgccgcacttaggcgagtctcccctgcagcgccccgagtccctgggggctgcggcggctgcgggcgcccccgcgcgggcccgaggggcgggacgcggcggagcggggcggggcggggcctccgcggccccctcccccggccccgggctccggctccggctccggctctggctctgcgcggtggcagcggcggcggcggcgcggggaccgaggtgagcggcggctacgggtccggaggcccggccggagaggggaccgggtggctggggttggggggcggcacgcgcgaccctgcggaagggggggccccggggcggtgccggcggagcggcgcgcgcgtgtgtgtgcgcgcgtaggtgcgcgcgcgcgcgacgccgactgcggggccctagggtggggtaggggtcggacggaatctgcggggcaggggcggcccccttgggtgaaggtccagcctctcccaccccagcctcccgggacctcccgagctcgttctctcccagcctctctcgctcgccccccgccccgcccccttccctctatctctgagtttgtccgcgtctctgtgggtgggtctccgtccagccgccccgtgtccccatctccttccccgacaccgctctctccccatggcagctctcccctccctcgccattgctccccctaatagggcaaacaaagatggtcgaggatgggggacccttcctttctgagccctgtcctggctcagcctgtggcccccaccgctctggcctctggcctgggcctccagccacttcctggctggtagctggccctgcagagtgggtgggggcaggtggaggcagcaggcagaccccgggacagagactccagggctggagcgcttagtggtctgtaaggtcagaacctggggagacaccctcaccatcccttggcaggtggggatactgggcaggtctgcctggccacgggtctgcgcctctgacctaatcagatggatttctagaccctgttcccataagcagagcctgacgctttctaagattttttccaccagagccaaggtagaaggctgggggagggtcccatgtccaaaggtcacaagatgtggtcccagcgactgggtcacttcctccaagcggcctccacttccctaccagtggcatgggtgggagtgacatctgtggacagaggccatgaggaccgtgtggggtggcctagctgcaaggtgatgagtgatgctcttggtgggagagtggtgagtcccattccctggactggatctggaggcgggagggcgcctccctgtggcccctccggccttctgcactcggcgcagcctccagaatcctgggggtaagctggggctctccaagtgaggtcctggacccccagatcatcctccttgatgacagtgcttgataaaatgtcaattcctggtccctgtcctgagctggtaagggggcaccaggaatctgcattttgtaagtcccccatcgtcattctaatgcacattcaggtgtgagcaccgcttggtgttaacatcggatgagggggacaaagtcatctaccttcctccggctggcggacagcgaagaggaccaagaagggcccatcctggcgtctacaactttgctgtgtccctgggcaagccgctcccctcttggagcccaagtcccccagcagtcagaggaggttatggcctccccagggacctttcctgccaaacagtctgggattctgagccctttgtttaaatcgtggggcggggattgctgtgaagtccggcaggcctgagtcaggatcccagctccagcactggctggctgtgtggccctggacaagtcactttgcttctctggtccttgggttactcacctgaaaactggcgatcatcatattacccccactcatccacccacaggggcagtcagggaggtccaaagaagtgtggtaccccacgtcgcaagcacaccatggtgtgggtggatcggccgtgagaagggctggcacttctgtgtcttggctgtttt

SEQ ID NO: 41355 - DNA, 876 bp, Artificial sequence
  DNA replication origin
actgaggctcctcagggcaggcggcagagcgggacggactcccgggctgcactcccaacctgtattcttcccaaggcaccttcttggctggcagccttttcttagaagaatcttggatggaaggaatgctgcttgggatgtcagagttcacactgcaatgtgaagccctgcctgacactgccctgggaggaggagccccgggaggaggagccctgggtggaggagtgccaggtggaggagcccccgggaggaggagcccccaggaggaggagtgccaggtggaggagccctgggaggaggagcccccgggaggaagaatttcccccggtggaggagccccaggaggaggagcccccgggaggaggaggatccctgggtggaggagctaaggtggaggagccccgggaggaggagccctgggaggaggagcccccaggaggagccctgggaggaggagccccgggaggaggagcaccgagagggggagcccctggtggaggagcgtgggaggaggagccccgggaggaggagccctgggtggaggagcgccaggtggaggagcccctggtggaggagcgtgggaggaggagccccgggtggaggagccccgggaggaggaggagacgggtgtgggcttggtgtaggatttgggggtgtgggatctgagggcttaggcagtgctttttcactcgttctttcatcgctcctccaaacagccctgggaggcaggaatgactattcccagtcagaaattccggtccagcagggtagggaggcaggaaacagcccatcaaaacttggcccgcgttcctgatggcatcaattgagcccacagagccgactgtggaggtgatgtcggctcctctggacactggc

SEQ ID NO: 41356 - DNA, 1316 bp, Artificial sequence
  DNA replication origin
gttggcgcaggcccggcgctgctgcgtgccccgctcgtccgcggcggcggccggctctctcttgcccaggtcactgaggctgggcgaactcatgaacttcaacctgcggagagtcctcatggtgacccgggccgcctgcgccgcgcccacgcgcgccccacgccgcgccctgcgccacgccgcaccaagggccccgggccggcgatgcgccctctacgcggaaactccggcgagagcaggaagccgagcggtcctgcggggtcccgccccggccccgcgcctccgtctcgggtcccgcgccggccgccccgccgggttaatcattgcacggagaggctcagcgtggagcgccaggcgcgcggccagcacagacccggcgcaaacggaggccgggggcggacccgggggcgggcccaggggcgggtctcggcgccccggggggcggggcggggaagggggcgggggcatcgcgggcggggcggggcctcaggcgagggggcgtgtgcaagaggcggagccggcgtctccgcggccgcagctgccacgacgcctcgctgggtctgccctctgaggacgtgctcaccctcctcccctcttccgagggccccacgtgcccacaggaaaccaacacgcacaggacgcagggcccaagcccaagcgcccgccccccgcccagcactgcggtcgcgcccacacgatgtccttcgaccccggccccggaggtctccctccacagccctcctcgcaaaggctgtgccacagaggtgcctccgtacccctcacctgaacacaggctcccccacccagttctcatgaggactttgggtagaggccttcagtcccctccaggcaccttggcccaagaacccactccacccgggctcagcctagacccccttggacagggacttcagcattgcctggctgcctggaggatttgctggagtgagggcttgaagaagtagagggtttgctccttatctcccacccccaggtctcttggatggtaaaaccaagcagtttcccaagtccctgtggtgggggcagagtgatcccagtgaaggcagggcacagccggtgcttcctgcctgcttcgcagagcacttttagatgtctgatttcacatgaactaacatgaactacttccgtgaggtagagattattcttctccccattttccagttgaggacattgaggctcacagagtgaaataacttgcccaacattgtgccaacattgtgcaatcaacaaatggtagagttgggcttcaccacagggagcgtccagccccttgaacagggcccttcccagtcccc

SEQ ID NO: 41357 - DNA, 1768 bp, Artificial sequence
  DNA replication origin
ggcccttggtgcggcgtggcgcagggcgcggcgtggggcgcgcgtgggcgcggcgcaggcggcccgggtcaccatgaggactctccgcaggttgaagttcatgagttcgcccagcctcagtgacctgggcaagagagagccggccgccgccgcggacgagcggggcacgcagcagcgccgggcctgcgccaacgccacctggaacaggtaaggccgcgccctcccggccacccggaggccctggagccgggggaggggacccctgagccgtccgcgggctaggggccgccccgagccaggaacgctgccgaaggcggcgcggcgcttcacagtttgcaaagaacttgccccgccggagtggtgcgggcctggaggaaagttcagtgcagcgtggttccagaacccagggaagggagcgaggcccgccagcgcccggggctggcccagaagcgcccggcgggtgggcggcggggtgggccgggaagccgcgtgcccgcctcctacccggggtctttccacgtctccactgcggtgctcgtgacaacctgggaggctaacggagcaggaagtatttttcccattttgcggctgagcacgggagcctcggggctcagtgggtgggtcgcgcaggcttcctgtgtctctttaagctcccttcggctttcccttgagaggccccctgtcctccagctgtcagcagggggtgcggcagctgcgaggcattctttagaggactctcctccaggggtcattcccagacaagcaggggcctgggaagccccttctcccagctttgtttgaggagcaagtccgggatctggaaaagagacggtttatttagtggaactccccagcgtctctgctccctaggaaaatgagaggcaggagaaagtgaggcaggctgttcgcgggaggcagtggacactgttcgggggaggctgtggacactgttcgggggaggctgtggacgttgcccctctcgcgcccacacctggcagtaaaatcttgccagatgctccaccggctgtggtcttggccaccgggaacccggctgtcacttggacacacgttattttcagttcattgaatgcattgtgagcgtcatggtgggctcagggctgccagcgagaccctcttcaaacgtggtctcttctgtctctgagttgcaaactgctagagggctgtcacatgcctgcctccgtttccctctccgtcagtgggtattcgcattcctccctgtggggagggctggtgtgggaacagtgaaggaaggactcctgttgggaaatctccctgacccaacgactgcacagtgtcttaagagctgtgttctccaccaggcacggcggctcacacctgtaatcctagcactttgggaggccaagatgggaggattacttgagccagggaagtcgaggctgccatgagccatgatgccaccactgcactccagcctcggtgacagagcaagaccctatctcaaaaaaaaagaagagcagtgttctcctccagtattgagatgaaagccatctctctgtccttgaatctctgccgtgatttagaggaaagagttaaatagacttatttcaaatcccaactctgcctcttccctactctgtggtcttgagcaagtcaggtcctcaatttccttatccataaaacgggcagataacagtgcccacctcatggggctgttgtagggatgaaatttgaacatgcaaaataaagccctcaacacagtgcttagcacatagtaagtcctctgtac

SEQ ID NO: 41358 - DNA, 915 bp, Artificial sequence
  DNA replication origin
aggcgtgttgtagctcttggagcgcaccacagggttcttggccagcacgtcccccgagcgggagcggcggaggaggcgcttttctggggagagacacgggcactgtcacaccagaggccacctgggtccccgcccgccttggcacctgctgctcactgcacactgggtccctgtgcaggggcagctgcagggaaggcccgacccggggcccggctcagcaggtcccaccgccacaagccctgacaccagctcaggttccagtctctcttctccagcctaggcccagcctggtcacacaggacctcaagtcaaatgcctgggtttgaacctgcaccccgccagcgacctctgtttgaccttaggtaagttacctcacccccgtgcctcagtttccccacttgtggaagtgtatggactttggcacctgctggacacctgtactttcccaggcaggcgcagcccctgccccactggagctggtgtccaaggggatggtgggagggccaagaagcccaaagaggcgagccatggggccaggttgtggggctgtgatgggagcagatggggacaggccctccatgtaaggtcaaggcggggattccatcctggggatgcggggagcctgtagccaggcagttgtaaatgggcctcgctggccgctgcgtggagagtaatagactgtgggggctgagggtagacgtggggacccagggaggaggccccttggttcatctgggcgggaggcagtggcacaggtggccaaggctggttggggggcagggttcaggttcccatgcaggaccctgcaatcccaagagtggccaccaggtggcgggcgacacacacgagcggctcaggggcctttcccagaccagaggatgcgggtcccatcaggcaggggctggggtcctgcca

SEQ ID NO: 41359 - DNA, 1019 bp, Artificial sequence
  DNA replication origin
gggaggtcagagcaggtgttagtttgtgcttcccaggccggatggccttcagcaggtcacccccaccccctaggccacctggacgcttctgtagcacgggaggagctggcagatcccgcccccacccctccttccctccttcaaaggcttcagtgagtccatccctgctaaggccaggggcaaagtcagggccagactcctgtgcggcagggccagccccactccctagcatcccagcccttccttccacaacctcccggtcctcccatcagggacagggacggtggagcagtagggaggcctggacaacaggcacaggtctgccccctccacacagaccctggaaacctgcgctccctagaagggagcgaaggcctgagggtgagcaccctgaaggggcgcccccagggcaggcactgcagacatgagccaggttgacaggttttattccacccccttccatccccatggccaccccaggcaggaggagacaggtgtgctggagtctggtcactttggggcccggcgtgggcagagcccactgggtttacattctctgtgggcaggtgtggacaccagagggctggggcaggaggagcgtgggagcgagcggccgacccccgtctctggcccggcccctgggtaaacgccgactcagatgcctgaaacagacctgggccgagcaaggaaggctgatggtatttccaaccaagacagaaatacaaagtgaccaaggccagtgacgaggccgatagggctggcgggacgggacgcagtaaaaaagtctcactcacacacacgccacatggacacccccgcacacagggacgtgtcagtaaaaactcaaggccagctgtgaggcctcacacgacactctgccggcccccagagccctccaagtcggacatgccagagccccggccccggccaaagtcaatgaaaatcccttcagaatccgagtccacggactccaggatctggtccaccaggttctccgggctggagcggggcagggagct

SEQ ID NO: 41360 - DNA, 1819 bp, Artificial sequence
  DNA replication origin
ctgtcttggttggaaataccatcagccttccttgctcggcccaggtctgtttcaggcatctgagtcggcgtttacccaggggccgggccagagacgggggtcggccgctcgctcccacgctcctcctgccccagccctctggtgtccacacctgcccacagagaatgtaaacccagtgggctctgcccacgccgggccccaaagtgaccagactccagcacacctgtctcctcctgcctggggtggccatggggatggaagggggtggaataaaacctgtcaacctggctcatgtctgcagtgcctgccctgggggcgccccttcagggtgctcaccctcaggccttcgctcccttctagggagcgcaggtttccagggtctgtgtggagggggcagacctgtgcctgttgtccaggcctccctactgctccaccgtccctgtccctgatgggaggaccgggaggttgtggaaggaagggctgggatgctagggagtggggctggccctgccgcacaggagtctggccctgactttgcccctggccttagcagggatggactcactgaagcctttgaaggagggaaggaggggtgggggcgggatctgccagctcctcccgtgctacagaagcgtccaggtggcctagggggtgggggtgacctgctgaaggccatccggcctgggaagcacaaactaacacctgctctgacctcccctgcagcctcactatccccagacaggctttccccgggccctcaggtgggcaggataccgcatcagccgtagcaggcagggctctttgttcccccgtcagtggggcccgagtgttactgagagccaaaggccagcccagcaccacgggcacccctactatcggggcaggagctgagcctggggcagccttccctagccacccccgccgttttaaagcatcgggtcagcgtggcctccatggggaggggtggaggggtctctaacggcgggcacctttccacaccccgttcacctgctgatctgccacccccgcagccttccacgcgctcgcctctcatggcgttttctcaaggtgggaaaggagtgctgagcaaatgaaggacaggcccagggcaggggaaccaggtgtgattggagggagagggtgggtgtgagccgggcgtgagcaggaggacgtcacctgacccctgagtcacggccggagctggcccaggctgtctcccagcagagccttctggatggaggagtttccctctctggtgggagaagcagacctggcgcccctgcttcagctcaggataggagggtgtaggggtgggggcagggggagctctggctttctgactctgctgagccgcagttttgtcatctgtgatacgggtgcataccaaccctgtggagctctctgaagctactcggaatgggtaatgtgccccaggcagggctcagctgggcaagtaggggagcaagagcagcctcgggacccaggcctgggggacaggtggtcgttgaacagaaagccagaacctggtctgagaaccactaagccaggctgatgaggccgagatccgtggaccaacctctttggctcccagctccatcatggagcccgaggtggcctgaggcggggagtagtgggtgaccattagcaacatgggcaggagggttcccagcggtcacctcaaggcaggaggaccaaagaccagaagccgtggcagggagttgctgtctgggctctgtccacaccagggtgctagaccctgtgttctgtcccctgagtggtgggggttccatcgtggggggtcgagcatccctggcccctg

SEQ ID NO: 41361 - DNA, 1497 bp, Artificial sequence
  DNA replication origin
ggtctcaggttaggtcgggtcagcgcctgggggaggcacctcccccgcccccacacaccccaaacctacaaggtgggtgaggtcattcccgtttcatagatgagaaaacggaggccggggcaggtgctgcgctgattcaaactcagggggtggggggctggccggttcaacacacagcggtggaaccccccgggagttaaaagcagaaacttttttttttttttttgacaccgagtcttgctctgtccccaggctggattgcagtgttgcatctctgctcactgcaacctccgcctcctgggttcaagcgattcttgtgcctcagcctcccgagtagctgggattacagggactgacaccatgccagctaattttttgtatttttagtacagacagggtttcaccatgttgtccaggctggtctcgaccacctgacctcaggtgatccgtcttcctgggcctcccaaagtgctgggattacagtcgtgagacaccgcgcccggcctaaaagcccaaagtttaaaccaatccgctagcagcctcggaggtcgtcaggaaggcagggaggccctgcctttcactttccctcaatcctgtggggggtgggggggctcctgagaatccctcgggctctgccacaccctgacttggaaatttctccgctgccttgggaggagtgtgaaggccccggagaaggaaccgcagagtccacccgggaaggagggtgggattgtttggcgggatggggacagcaccttggccaccgacttcagggttttgtgacagaggctgtgtagattccagagagctctgtgccgtccctcgcttgcctgtgaaatgcagtgttggcatttgtccagctgagaactcaatgcttaagactcagccgtttcagaagtcgatgtcctttggttggcctctctgttggcagctttaggatcatgtttgtggactcctcattcgattcactgactaaccattccccaaaccaacgccagagttgggggtagggcgaagagggacatgggatgtgggcctgagcccagctgattcttgtggacagccagctgcctggtccctgccctcaggggcccagagtctggcttctgtgtagagagaatccaagggtttgtgggagcttaggaagggcttcctggaggaggtggccattgagctggaaggtggatgggaggtggatggggaagagaatggcacctactggctagggatacttcgcttgtgaggtacgggtggaaaagtccatggagtgcctgacggggtgggccaatttacttggataacatcattgggtcattgaaactttgtgtgtgtgtgtgtgtgtgtgtgtgtgtgtgtgtgacgcagttttcgctcttgtcgcccaggctggagtgcaatggcacgatctcagctcactgcaacctctgcctccttggttcaagtgcttctcgtgcctcagcatccagagtagctaggattacaggcgcccaccaccac

SEQ ID NO: 41362 - DNA, 1391 bp, Artificial sequence
  DNA replication origin
atttcctgcctcagcctcccgagtagctgggattacaggcatgtgcaacgaggagctggacttttaaaaatgtgaatgctttcgtcctggaaggtgcaggtgtgggtcttcccactcctgtgtgaggaaaggaagagggagcagaaagtgctgggaggaggggctgcaccctgctccaggcttcccatccccagcccccacctggggggcccccaaggtctcctgggagatgagcaccctcacagaagccagggcctgggcccctttgtacagccccccgcccctgtgctgggcctggaaccttggccaaggaaccttttactgcattgagcagagccctttgaagggatgagcccaggggccttcaaagccaccaaggctgcgtgtggcctctccctgtacattacccctcctgggcctgtaccactggggttggagcccctgcctctgtgctcacagccagaggagctgctcccatatgcaacggcatgtccacagaccggccagagggcattgcggatgcggggggcaacagcttttctgcagaggtggggtttagtgggaaggggtgtagagtcagcaaggaggcgggagagcattccaggtggaagctcaggcaggaggatgcccttgaagaactgaaggaaggctgctgggccaggtcctcgggggcagaggtaggggcctcgtggaccagcagtggagggatctccgtgttccccactcctgacgacagcctggtgtgggtttggctccctccccactgctgcctgtacccctttgtgccctgttttcacccttggcacatgtgcctcaggctgttcttacctgtgtccttgtgtgtttaattgtaatgaagaagctgtgggttctgggaagcggggcggcccatctgttctccgtgtccctgagccgtggccgtggagtgagaaagtgctgagaatccagggggtggggggtgggtggtgacatcagactgcacttgagtcactgtcagggccttccccagggtgtcctgcatgcagggggtcctctgtctcagggccctgggcagagagaggaggaaagtctgaaccatgaggtctccaacctcttctggccacttgtggggtggggcaaggtggggttggggctgggagaggagaggcagctgtgtctgcaggcacggaggatggtctgcaggcatggaggatggtctgcagggccctctccttcaggagtctgttctgtctttttttttttttttttttttgagacaaattcttgctctgttgtccatgctggagtgcaatgatgcaatcttggctcgctgcaacctctgccttccgggttcaagccattctcctgcctcagcctcccaggtagctaggactgtagacatgtgccaccac

SEQ ID NO: 41363 - DNA, 892 bp, Artificial sequence
  DNA replication origin
atacacaggtgaggaacaggtggttccttctgagcaatgggaaacggccaatgcagagggtgcagggtgcgaggcccatgtggctttgaggagggtgatggagggagggaaggaagcaggcagacctaagagggcgtgaggcccgggcccacgctcaagactgtggacccaaagctgctttgggctggagaaggctcagtcctgcaggtgggtctggtggcctgggggtcatgtgacagccatctaaggacccatgagtcaatctactttaggttagtctttcactctgaacacccagtctgtgctgagcatgtgacttagtcaacttagtgatggagaagcgtgtgcacaagaggtgtgtgtgtatgagagcaggtatgtgtgcacaggagggggtgtgttcctgggagggggtgtgtgcatgggagggggtgtgtgcatgggagagggtgggtgcatgagaggaggtgcatgcatgggggggtgtgttcctgggagggggtgtgtgcacgggagggggtgtgtgcatgggagggggtgtgtgcatgggaggtggtgtctgcatagtggtggggggtggagagaggacagccacagtaggggactggcacagaacgcaggtaagcacacaaggggacatatgcaagggacgatgtgtttgggggtgctgcatgcaaaggctgggggaacagaaggtgtagacccaggaggggtaatgtacagggagaggccacacacagctttggtggctatgagggcccctgggcccgtcccttcaaagggttctgttcaatgcagtaaaaggttccttgcccaagttagtttgggaaactgcctgagacctccccttctgaatgctcctgatgcttgttggtatggcaaactaacaaca

SEQ ID NO: 41364 - DNA, 1042 bp, Artificial sequence
  DNA replication origin
tccgtggctgccagctgcccctgccaggtgagatcccagcctctgttgtgtctacaggtacgatgagaagctccagagcctgcacgagggccggacgccgcctcccaccaagacaccaccgccgcggcccccgctgcccacacagcagtttggcgtcagtctgcaatagtaagtgagccggggatgtgcctgctcctatgccctggagccctgggagctgtggggcgcttctgggtccagaaatattttccccagacgtttgtctccagcagccaagctgaaccctgcaggaaagataaagcctgagctcatcactgaggccgtggctcgctgctcagtgcctggttgggggggcgcgtgctcgctgctcggtgcctggttggggggcgcatgctcgctgctcggtgcctggttggggggcgcgtgctcgctgctcggtgcctggttggggggcgcgtgcttgctgctccgtgcctcgttgggggggcgcgtgctgggtgcctggtcgggggggtgcgtgtcactgctctgtgcctgattggggggaccggcagtgggtagtggatgggggtctctggggttcccgccccagcttccatcactgctgccccctgccctccgggtacacagacacttcccaccaccttcaaggagggcgtggtcatgggatgtgcttaggtgtaggtgtggggtgtgtcgtgctaggaggaagcttccagagccagtgggcagctgcctctcatggtgatgtataggcctgggtccggtagagacggcacgtggtcactctgcatccctgatccccgcatcaccatgcaccttgctaacacccaggctggacacaggcatagagaagacaggcttgtgctgggctcagccgctgagatttaagggtcattgttaccgcagcgtaacctgtccttcctaataccctttatcagccacatgaccttgaactcacctcttctctcagcttgtttccttattcctgttatactacctttttttggggtggcgggaacagagtcttgctctgcttctc

SEQ ID NO: 41365 - DNA, 1103 bp, Artificial sequence
  DNA replication origin
agcaaacagacgcgagctgctcacggtcacaccactggaaactggcagtgcaggacccatgcagaatggttctagaatttgtgctaacaactgcctcacactgccgttcagccagtgcctccctgagatagaacagttgagacctgggcttgcttggcgaggccccatcctggtcgccgactgcacagggcagctgtgcccacggcttgtcgggaccaccccacagtgaggccatccccgctatacacagcggcctcagatggcacctgcagactgagcagggcctgggccctccggagaggcctgtcctacctcggggttctcctgggtcgggggccggtcttccttcttctttttggtggcctgagctccctgagatggctcctctgtgggcggccgcgactctgccgtgctctcgggctgcgtctgcacttgaggctgaatgatgatgacctggaagatgccatggaggggtgaaggggacagtgatggggagggaggggtgaggggaagagaggaggggtggaggggacagtgatgggttgcggggtgaggggaagagaggaggcgtggaggaggctggagagcgagggtgaggggcacagggaggaagggaagagtgaggggggctggggaggtagctggtatggcacagggcaggggttggggagcacagagcctgggccaggccaacctgggagggcggatccccgggaactgggtggtttgcgcccctgtctgtctagcacctgcccctcctgacacaccttttccaccatggggagggtctgcatgagaagctggcctggtttaggaactgggaaggtctgggttccagtcctgccccaccgcttcccagctgtgtggcctcaggggagtcactgcttctgagagtcaggttggtcatcagtgaaactggccacacctctccccagggaggccgtgcacactcaggcggcgaggacttctcatcccagctcaggtgcagatgaactgaggccacgagagctcagacttgctcctggcctgaggccatccagtcaggaggcagaggagctgggaacccctcaggtcagcctggctccgtttctccctccccacac

SEQ ID NO: 41366 - DNA, 975 bp, Artificial sequence
  DNA replication origin
cccacctgcatctgccctttccccagctccaggaccccacctgcacctgccgtctccccatctccaggaccccacctgtacctgccttccccccacctccaggaccccgcctgcacctgccctctccccagctccaggacccccaactccaggaccttcacctgccctctccccagctccaggaacactggcatgtgggaggcatctggggctccagcgagcacagtgtagaagccggtaacttgaggaataaaattcaagactgttgcagtggacagatgggggcttttattatctggcctcaaatcctttcttcagtctcatctcctgactcaaaactgcagaccatttcccagacatactaaacatgtgggggtcactgagcctttgctatcctgcttgggttgcccttttttttttttttttttttttttgaaataagatccagcccatccaccaagacccaaggcctggagcatctccttaccctcaagaaaggacctctggatgcatctggattggatcatgcggatgcaggtggtaatgaggatggtgatggtggtgctcctggtgatgggtgtcatggtgatggtggtggtgctgctggtaatgttgtcatggtgatgatggttgtcgtgataatggtgatcattgtgatggtagtggcggtggtgctcatgatggtgctgctggtgatggtggtgatgatggttgtcataatgatggtgataatggtgatcattgtgatggtagtggcggtgatgctgctggtgatgggggtgctcatggtgatggtggtgctcatggtgttggtggtgctgctgctggtgatggttgtcatggtgatggtggtgatgaggatggttgtcatagtgatggtgataatggtgatcattgtgatggtagtggtggtggtgctgatggtgatggtggtgctgctgctggtgatggttgtcatggtgatggtgatgagga

SEQ ID NO: 41367 - DNA, 953 bp, Artificial sequence
  DNA replication origin
tgtccaagtttggcgctggcggctgcggccggcattccgaaggaaacgcgatcgatggccgggggcgcggcgcgggcgggggcggggcgcgaaggagggagggagggggcagcggagggagggaggggcgccgccgcccccgtgcccgccacagcggtgcccccagcacgccattggctgcgccgctcaaagttctcggctcggggctgcgcggggaaggggcgggtgtgcgagcgcggggaaggggcgggtgtgcgagtgcggggagggggcgcggcgggggaggggcagcggaggaggggcgggagccagggggcgggggcgcgcggccggccgggctctggcggcggcatctgttcgtggtgctgaaaccccgagcgctgagctcagcgcaactaagtcacaatggacaacttttcctccccggagggggcccggaggggggggagcggtcgcgcctccgacgcgtgggagcttctcaggtgtccccaactacacctaacgcccggagcccaaagttggagcagaactggggagtcccgggggcgcgtttcttttgttccccgggagctggcgtcaggttccaagaataaaaagtgaagctagggaagtggaaggtggtgggggggagggagcctcgaggaacgatttcaaaacgaggtttgccacggaacccagaaatcgcttccaacgagtttggtgtccaggcccccacggccgcccccctccgcccccatggccgcctcagcgcaaagcgggggactccgagccgggagaaatcgccacgttccaaaaacatgtccaccacctcaaaatggacgccgggccgcgcgctgccttttaagtgagctcctctcttcggcccccgcagggcccggctctccctgccgcctccgagaacccggctctttctttccaggaaaggggaggggtggggaactttgagaactgga

SEQ ID NO: 41368 - DNA, 1069 bp, Artificial sequence
  DNA replication origin
gatccaggcgcgcgcgccggaggaaatatagtccctgcccgcgggaggctcgcgcgggaggaggcggcggcggcggcggctgggcgggcgcgcgcggggctgcgcggggctcccggcgccgggggggccatgctccgggccgcgccggcagcccggggacccggcgcaacttgccgggcagcctgaggagttggggcagccgagggctcggcgccgcggcgcccggaagcctgtcttccccttcgccagcccccttccctttcggccgtgggggagggggctcgtgtcccccccaacccagcccggaggccgcgtccgcccgcgcccgctctggcccccgcggagccgcgcaacttcccgggagcccgggccaaagtgagcgcaaagtgctgcccaagttgccgggatggagctgcagagccggcccgaggcgctcgccgtggaactcgcgcgccaccaggtaggtggccgggggccgggcccggggccggggagtgtgttgcggggtgagggggtcgggggacccgagcccagcatcctctcttccgggtctctgggtcttccaggctggagcctgcccgggggcggggggcgagggagtgagcacacgcgcggacccccttctgggctcccctccgcctgcccctggcgctgtcctgcacagtttgcgggatcgaggacgcgtgggacccgagcctggagtcttctcttaagcgatgtagggtctgcatgactgggagggtgcctggagggggccccttcgtgagccggtcccggggaggggagtgcgaataggcccccttccggcctcccctcgggcccccgcgccccgggcgaacctgcccggtgtgcagaagtagttttggcgatcgctgctggcgagcggcggcgtggcggccggagcctgagcggggctcggcgtgcgcgtgtgtgtgttggggagattaggacgcgacttgaatatttatgagctttgctcgacacggactcgccgtgtttacttggctctttgttcctcccccctcccccggcacacactcacactcacactcactcgcacacgcacccc

SEQ ID NO: 41369 - DNA, 1555 bp, Artificial sequence
  DNA replication origin
gacagaatgagactcacacagtaagtaactatgcaaaaaacagaggggcatgtatatgatccttaccgtaacccacatatttaacctacgtaattaaatcaacagaggttattcaggtcatcttcggcccacacagattcaggcagatgctggccggagggtagtggctcctcctgttgagtcttttctgtttgtttgtttgttttttctgagacagagtcttgctctgttgcccagactggagtgctgtggtgcaatctcggctcactgcaacctctgcctcctgggttgaagcaactctcctgcctcagcctcccgagtagctgggattacaggcttgcgccaccatgcctaattttttgtatttttagtcgagaccatgttgggcaggctggtctcgaactcctgacctcgtgatctgcccacttcggcctcccaaagtactgggattacaggtgtgagccaccgcccccggccggcctcctatggagtcttaaagcgctgtttgcaagtttctgttaactaatttgggttaaagtaagggtcatctacatgcccctctgctttttgcatagttactcatatcctaagtctcactctgtcgtgctctgaaggcgaggtgctgggttgtgggatgaggggccatctgtgtttgggggtcccaaacacgtaatttattacaaattccctaacagagagcagaacaacactggggtcctcacttgaaaaaaaaaaaaaaaagaaaagaaagaaaagggggaattccaataacttctgccaacaaaagcaatgtgtgacctgttggcatatgttgaaagggacatttgctgatggtgcttgcttgggtattttttgtgctgccggagaggaatctgaagttaaaacgacttaacagcttaaacgtttactttgacatatgattgcaccctttctccccagcgtgtttcaaacgtgccagtttgctgccaacagggcacccggcactccgacctgaatgaagatggcagccccgaggtggtgacagtgactctgggacattaacctcctggctgcgcggctgggggttctgaaacgcgacctccgcagctgtaattataattgttttaggtcgcattgaccgggcctgtttacgactcttaacaagagtcttaaaatgtccagtgacatctgttgagagtttaatcgtgtaaaaaaaaatcattaaaggaagagccaagagatcaattttcttgctgtttaaacaacacggaggccatcaggcggcgggggaatgtggcgacgcgactaatttaatcccccaagtcgcggcgctggtatggacaggaggggacggaagaatttaaataaaatatcagagggaggcggaggaggggggaaaggagggagccgaggaccagggtgaggagaaatggaaacacggactcgcagcctcccagcggaaagtgtcctgatcccggcgttacacggcgcagggggtgggggcgccgcgttccccgggttggcccggggacggagaggatgactccgcagtcgtcctctccgagcgcccggcccg

SEQ ID NO: 41370 - DNA, 879 bp, Artificial sequence
  DNA replication origin
ctaaagtgctggtattacaggcgtgagccacctcgcccagcctggagaaggatttttgatgaatcccaattgaccctccaaaaccagctttaatgtcacttcccctgaagtggcatgggccgttcctccacagcccacctacagaaccatatgcacacccatcttaccatgttcattccctcccctgtacctgtggttggcgcacacctgtctcacccaccacctagaggcttctgcagagcccgggtcctcagtgctgggcctggcccacagaagtgcttagggaggattccttgagagcactcccgcttgcgaagggcccccacctaagaggggtcaccttgctgggcagtgagcaaggaggcagcgggaactccagcccagggaagaatcacaactgcccagggagtctgggaccttttcccagagcaggggagatggagatgggacctggaggatgccctgtagccggccaggtgggcagtgggaatgggaattccaaggagaggaaagcttgtcaagcgtactgagctgtgagagtgactggggactttaggaagaggccaggtgtttgtcggggaggaggggagaggtccgttggtgctcgttcaaggagcaaggccatcctggacagcagggagtaggggaaggtcatcatcagagctgtgcctggaaagataaccttggccacagcaggaggacaagtaagagttcacaggcctggaattggggtggccatgagggggctgccatgtccccagagagcagtgttgggcctgagcatggcaggggtgctaggtggaggtgaggggttagaggggggacaggctcaagaatcacctgtggccgggcgcagtggctcatgcctgtaatcccagc

SEQ ID NO: 41371 - DNA, 701 bp, Artificial sequence
  DNA replication origin
ttcttaagggtggaaagaagatgtgagtggataagcttggatgtgctgcgggctctaaggtgatggccaaaggacacacagagctctcctgcaggaggaaaggcagagcctggcttgcagaagtgcagggtgacctcctgaggaggttgaaggaggctgggcaagtgctcagaaatctgaaggtggtcccatgagaaatggggtggactgacgtgggagccatgactgctgcccagggctttgctgtagacaaccagatagaggacaggggaggggctgcttgggggagagggagtggggacttttatttgaacctgagatgcccactgagagtccagagaggtgacaagaaggagctgatggccacgcacagtactcagggagagatgcggctgaagggcatttagcccaggtgagtcacgtgctggggtggccaaccagagagcagaggctcaggatgggcagaggggccacctggccatggagcctgggaaggagggtggggaacagtgggagccgggggccacgggaagaagggggcagtccaggagttgagtgttgctgaggacagatggggaccacgaacatggtggccctgaggttgcggtgggacagtgatggccaaagccaggagggatgggttggagtgggacgggagcaggggtggaaagagccagcacctgggcccctctttatggggt

SEQ ID NO: 41372 - DNA, 1432 bp, Artificial sequence
  DNA replication origin
gaatcgcttgaacccgggaggcggaagttgcagtgagctgagattgtgccattgcactccagcccgggcgacaacagagagactccgtctcaaaagaaaaaaaaaaaaagaagaaaaaaaagaaagtgtccctagagctgagttttgaaggccaacaaggagttagcaaagcgaagaagggtggggagttttctcaccagacagagggaatggtgagtcagatgagaggctggggcagaaaggactgagtttatccactcacacgcctttcagaccgctgaccctgcaccgggttctggacagagagcaaggtgggtgcgttccctgcccctgcaaagcttatgttccagaggagaagctgtgggacaggagacccaaaaccatatactgagaacccagaagtctgagctctgtcctgagagttctgaagaaccctgaagggtttaagacaggggctagccagggtgacgtggcattgccagaagctcatggttccagtggatgttggattggagccatgaggaggggggggaagagggaggaaggagatctgtggggaggtcaccgtggtcatctcggtcatctggggaagggttgctggggcagtagtggcgaatggaaggggcgaggggctcagtgactgcacatgtctggtgaggaggaggaggaagagcaggaggaggaggaggaaagtgggagcgctggttagagaggtcagagttggggcctgcgtggcgctgtggccgcgggagggcttggcggtccctgagtgcccctgggaagtgtcagggttggagcagagggaaacatgccctgacctgggctctaaaagggccaccctttgtgcagagaggagggggcaacggtagaagcagaaggtccagcaggaggagactgtagccatccagtgggcaggcgaggggagggcatccctcatggtggtggggtgggagcactgggggcaccggaattgctgatggattggattgagagtgagaggggagtcgagggtgactcaggtttgtagcctgagcagcgggagggtggagctgtcattcatggaacttgggaggctggagagggatttagctggggagttgggggtgtgcggcgtcagagtggggtcgtcagagtcaggctggagagtcctctgagtgtggcatgtatgatgctatttccagtcaagggatatcccaggggctctggccatgggaggttcttggtgatcttggcctctgcagcctcaggggggtggcctggctgggagctggaggggagtgggccaaggaggagaggggtaggaaccagtggaggtggttggggaagcaaaggttgacagccacgttggtcacctccggctgccctaacaaagcagcatggactgcgtggctgaaaccacacacactcatttctcacaagctcagggtgtggc

SEQ ID NO: 41373 - DNA, 1327 bp, Artificial sequence
  DNA replication origin
aagggaggaaagaaacgcccgcgttcagctactgcgcaagcgcgccggcgcttccggcagtagcacctccttccgccggccgggccccttacgcggcgcatgcgcccagctccctggaaaccggcgcggggctgagaatgccggtctcgcgcaagcgcgcacgcgccgaccttgatctcgtagccggcgccagcagccgcgctttggggcgtcggctcacgtggggccggcaacgcgtcttccaggatgttcgcgcgctagtcgccgctgaggggccggcgatgcgcgaggagttccggcgaggaaggtcggtcagtggacatggccgaggcccgcggtgtccgcgtgtgggagctgcagggctgaggagaggccgcccgcaaccctcgggaatcgtgtgaggtgccactggggtcgcttcacatcaggaggccccgtctcgggggacgcgcgcaggtgaccctgctggtcgtacctggccggggtggcccggaggggctgggtctcggcgccaggaggggccgtgtgggccgcctgttaaaggacccctcgttcgctgacatttgattttgcattgggtgccttctcttctgtttttttcagccagtgagatccgtcctgggcactcagctgtagagcaggggaacgagtcctgcgctttttgcgctgaggtctcctggcccgtaggccaggcagcctctgagctcctttctcaccagcagcttgcgatccctcatccctggccctgtcactcccagctgtttccagtgccgccctttttttttttttttttttgagatggagagtttaacttgttcgcccaggctggagtgaagtggcacgatcttggcctactgcaacctctgcctcccggattcaagcgattctcctgcctcagcctcccgagtagttgggattacagtcgtgcgccaccacgcccggctaatgtttatatttttagtagagacgggttttcaccatattggtcaggctggtctcgaactcgtgacctcaggtgattccctccccccgccccaccacctcagcctcccaaagtgctgggattacaggcctgagccaccgttcccggcctcgagcgccttcttataaactggatggtggtttttgttttcaccttcaaagtcgaatctccctagtccgtttattaccagaaagaggtctccactcagacccagcgagaggcttcttggatgtcgcgtaggaaagaattcggggcgagtccacggactaaagtgaaagcaagtgtattagagaagtgagaaagcaaaagaatggcagagcagggcattcctgaaagcgggaggag

SEQ ID NO: 41374 - DNA, 1040 bp, Artificial sequence
  DNA replication origin
ttgccgagcactaagtcctctgagttccgcagcgcagcaccggaagcggccgagcgcgctcagcccggcgacccctgcgggctccagacccctgcgccgctgcgccccgggtttcgccgcaaccaagacccagcgagtgcagcggcggccgccgaggaggtgaggagcggcggcgggcgcgggaggagaagaggctgagggcgggagcctggtgctgagagcccagggccgggagggcgggagcgggctcgggcctgggaggggagtgcgagtgcagggctggggactggaccctggggagggaggtgcgggttcagcgccgggggacgggcccctggggaggggtgcggggccgggggaccagaccctggggaggggcttaaggggctggaggacgggaccctgggaagtggggtacagggctagaggtcgggactctagggagggagcctgggtcgggcgcacgggccgggcggggcgcgcggtgggggagcgacgggtggagggtggggtgggatgacagcggcgacgcagccccggctgtttttgaagcggggcccgggccccaccgggctgcggcgtccgactcgagtgagactctcccctgcggccccgccggaggtagggggctggcagggctgtcctggcgtggtcttctccgtttccttcctagcgattcctctcgagcttcctctccccctggccgcccctcgtctctcttctcttgggcgcattacctctctggcctgtcttactgcgttcccgggttattcatcacccatttgctcggttccattaagaaccagcttggagattaggtatttctgtctccttacttggcccccttgttgttttcctccaacaaggcacttcactattaagtgtagccaaatctgtgttttcgttttaaggtgatgttgacaagttgagctttccaagggcagagctacaccagatgccagagaccacataactatatcaggcacaaataatgtttttttccagtttacctagactttcagtctcccaccacgttgctt

SEQ ID NO: 41375 - DNA, 1724 bp, Artificial sequence
  DNA replication origin
cctctgcagtctgtgaggcctggagaggagatgcatgagtggctgaggcgggcttccttcagaagtggcactgccgtgaccatagcactcaccgctgttgagggttactgtttcacctgcttccctcctgccggccctagacatcctggaagttcggcagaagcccatcctgatgacctagccgcgtgcggagcctgcgcagagccccggccgggcccagccctcggagtgctgccaagtgcctacctgtccaccgccaccggggtctgcgatggcacgccagtgctggagccgcagccaggcgaggccactcgactcccggggccggggccgactccacgaacaccagcccaaactgaagtgcctcttccctcccctgctggcgctgctccgccctgtgccccccgcccatcgccccccacccatctctggagagccctctgcacccaaagaggactagagatgccgagcggccatgagagagagcggaaggagcagctgatgcccagagcggggccagagcggcgggtctatgttcacgtccccccagcagcaggcggaaccacccagccagggcactcagtgcattggactgtccacatgttcttgaggaaagccggtggaagattctggaatgccgtgcggatgaacttcagcacccgagtcagtcccagctcatcctccccagtttaccactttgttctaataggagatgggaacacgagaagtttgatggctttgccctgggctgggaatacctcacccacgcccagttccagaaaggcctccagctgagcagacggccccgatcccgccagaacggccttttgcttccagccaaagaacaccgccaacacgcacacctccaacctgggacatcccacgctgggcctcgcacggaggaacctgcagaatttggattctgagggtagtcgggaggcctcggtagccaggcagaacaggatatctgccaaagggtgtctgatgtggggtggggctggcatcctcccaggaaggttctaggtgggaccccgtcttctgggggcgggggtgtcttttcatcttccctggtttcctagaactcacttcctttgacggcgtgtgttggtcccatctctcagaccagctcactgaggcagaggagttgctcagaggctcacatgggcacccccattggttcgtgtgagcagctgcccagccccaggcctgccctcggcctggtccagcatgaaggcgtttccatctgcaaggatgcacggtaccctccccgagagcaggcctgtcccctacccaactgggaataaactggaagctgggtctctttgttgctatgtttttttgtttgaagttcccaggaatatttgaggggttccggtgatgtgtttagggatcttctctgtgggggaaaaggaagaggagggtcttgttctcccatctgtttattctttgggctctgggaacaggggactactttggggctttctccagacttttgtatgttgttattaaaagcgagctattgcatttcattctgcctcagtttgcccacctgtgaaatggggctgataccacctacctcactgaagtcccagggttcaagtgtgtggctgggtcagggcgtggtcacccgtcattctgcataggtcgggttggatgttagactcctgggatgccctcctccccctcgccctttgtaataacctaatctgagaccgtgcttggtg

SEQ ID NO: 41376 - DNA, 1280 bp, Artificial sequence
  DNA replication origin
actcaggaggctgaggcaggagaatctcttgaacctgggaggcagaggttgcggtgagccgagatcgtgccactgcactcgagcctgggcaagagtgagattccatctcaaaacaaacaaaaaaaaacgacgtgaaggattcgctgacaactcccactgagcacctcccccagcagggagcagggctgcagcattgatcagaagaggtggcagtctttgtcctgaccactgggaccaagaagcaggggtgtcccacctgctcaaggccctggcctgggtcagggactccagcactggcctcgacctgctcttgtgtgaacttgggcaagccccttccccacctgggcccgttcccgaatcagtaagaagtactgatcactgccctagtctgcctctctggggcaggttcccccagcctggaccgcaggactgggtaatggtgcaggtcggctcagccttgctgctcccatgctctgcaggtggcggtgcctagttccagggacagggcctgcagaagcagagaattacacagtgtgtgtgccagaacccccggaggagactaagcttgtgacagagaagagagagatgaggggggtggccaaagtcttcctggagttggaggcctgggtctgggccagaggaagcagggaggggtgttacaggcgaggaggcagcagctctggagcgtgtgggtgctggtgtgggggtgttggtaaggagcgtcctggcctcagcagagtttggcctcagcctggactgggagctggcctcctgctgctcccgccgcgtcccatgctgtgggggccttgacctggccttctttcctccagccgatctgcacaatgcaaccaacctgcggtctcggtccctgtcgggcacaggacggtccctggtcgggtcctggctgaagctgaacagagcagatggaaacttccttctctatgcacacttaacctacgtcacgttgccgctgcatcggattttaacaggtaatgctggcggatgtggggaagcagccgcaccttctcacagccagctctgcctccagggccttggtacttgtgagccacccggagtcatcccgccctgtcctgtcggttggttgggtttctttgcagggctcttggcctctttgtctcagactttgggtggagccgtagctttcccagagctgaagtcctccctttgttcacctttctggcgcacctgctgtcccctcttgagtggccacagatgcccaggtgtgtgttactcacgggcgaggggaggctctcaggcca

SEQ ID NO: 41377 - DNA, 1102 bp, Artificial sequence
  DNA replication origin
gggtcccatagcagcaggggatgttggacctaattgtcctggattcgaggctggcgcttcccttctcatgctcaaacatatccctttctccagagaaggatgttcgatgccctttttttcctgggtgggcctgtcctggcatagtgtacgaggcagagcccagccccctggttttcacaatgcagtgggtctcagaagtcagagtagaggagggctaggaatgagggttggtgtgggagtgggcatttccaaggacgttgcctgcggagagcatgagatcgagcaggggactgagacccctgggaaggcagagccgcagaagggcccagaaggtgctttgcatccttgtcctgtgtggtgtgtcgttgccttgcacctagtacatgtgggcctgcacactgagcacctgccgtgggccgggtgctgggcacaagggtgggtggcattggcggatgggtccagctgtgtgcctggctcctggctcagggcccgggcagggagtggaggagtgagggagcagctgaagcacatggcctgagttcctctgccagggtttggcatctctgcagatatcgtgagctgggggcgtgggtgggcctcaaggttcaagggttctgtgacttcctcgtgccatagagcatgctggcatggaggcgggaggaggtggaatgatgactgggcagtggctgggtggcctcaagcccaggcagtggaggaaagggcggggaagctggcagtgctggctcttggctgagatggggcacctttgcgtgagtgtcaggagaagcttgagaaattactcaggaagtggtcggtcggtcggtcagctggtcatgtaggaggccattttctgtgtctgagcagagcagtgagttaggatcttggataaggcccctgtgaggatgatctcacagaaaacaggaatttgaatatggaaccactgtttcagcttgatgattgtgcttaggagatattgaaactgtctggaaacagctgtggggtcggggcgggcagcaggtgcggtggtcacaggaggtagggggctttgtgggaattgttgcttagaggaggataaaggatgctttatgggagccccaatcca

SEQ ID NO: 41378 - DNA, 983 bp, Artificial sequence
  DNA replication origin
gatctttcgggtgagtgtttggtggtgtgggggtggagagggatcttttgggtgagtggtgatggcgggggtggagagggatctctcaggtgagtggttggggggtggagagggatctttcgggtgagtggttggggggatggggagggatctttcgggtgagtggtggttggggggtgaagagggatctttcgggtgagtggtgatggcgggggtggagagggatctctcaggtgagtgtttggtggttgggggggatggggagggatctttcgggtgagtggtggtaggggggtggagagggatctttcgggtgagtgtttggtggttgggggggtggagagggatctttccggtgaagaggtgatcatttgttggggaactggcccttgagcgaggtattgcccacacagggccctgcctgagcagaggcggcaggaaaagggcaatgaaggttcacactgtaatttgctgagccgcttctgggaagtcactgtaggcctctgggctctgttcccctttgcagagtagtactgcttgctgctctatctctgcctgaggaaggagcgagggtcagacctagagcctcagagcgtgtcatggaggctgctgtgacaggtggcagcgctgtgcctcagtttccttttatgaattagggagaagaaggttggcctggtcactgctcacagccaaggttctgggacacatttcactggtccacactcttaaccacttgaaaccaagccacttgtaaaaagcactgtgggtaggcaggaccagctgctcagggaggttgatgctgtgtgtgctggggatcggggacatcagaagtgaaggaagcaagacaagcgagaagaatcacaccccactctggccccacaaaatagaaatcgaaccctctcatcccacaaccctgtgaactgtgacttcacactttgggtcctagatttcctgccccaaacccccagctctatctgcaggtc

SEQ ID NO: 41379 - DNA, 1221 bp, Artificial sequence
  DNA replication origin
attacaggcatgagccactgcacctggcccacgttcacacctttaagaacctcttgatgtctgccaggcatatagtccaagacccttggtgacctgccccagctgaccccctgagccccagccgtaagacttgttggagggggtttcccgaggtcccctccacacttggcctggaatcaccctcctcaacccgttgttggcggagaggggggcccttggctctagggcccttctgtggcctcttcctgacccgttggtggaatcagccactgctacccttgttcttggtgccacctgtcaattcctgcccctgtgctgtgacactgcgtagtccctcgtgtgtggctcctgtccctctcccacctgagctcccctccacggctctgacttttcatccctcgcaccagctcagagacggatgcctgggcgcaggcccctgggagtgacaggaggagctgcctaggcgcgcgtttggtgatgggggagtggagagggatctttccggtgagtggtggtggggatgtggagagggatctttcaggtgagtggtgatggcgggggtggagagggatctctcaagtgagtggtggttggggggtggagagggatctttcgggtgagtgtttggtggtgggggggatggggagggatctttcgggtgactggtggtgccgggggtggagagggatctctcaggtgagtgtttggtggttggggggtggagagggatctctcgggtgagtgtttggtggttggggggtggagagggatctttcgggtgagtgtttggtggtgggggggtggagagggatctttcgggtgagtgtttggtggtgtgggggtggagagggatcttttgggtgagtggtgatggcgggggtggagagggatctctcaggtgagtggttggggggtggagagggatctttcgggtgagtggttggggggatggggagggatctttcgggtgagtggtggttggggggtgaagagggatctttcgggtgagtggtgatggcgggggtggagagggatctctcaggtgagtgtttggtggttgggggggatggggagggatctttcgggtgagtggtggtaggggggtggagagggatctttcgggtgagtgtttggtggttgggggggtggagagggatctttccggtgaagaggtgatcatttgttggggaactggcccttgagcgaggtattgcccacaca

SEQ ID NO: 41380 - DNA, 1421 bp, Artificial sequence
  DNA replication origin
ggagactggccgtttggaagtgggcggggcaagggaggtcagggggcggggccagggagccggggtgggtccgggccgttcagaggcggggcgggaggggacaggggcggggccggggcggggaaggggcggggccggaccggggccgggccgggccggggcggggcgagcggagccgggggcgcgcgggcggcggcggcgcggaggtgcgctcgccggtgctgtgtttggcgggtggtggcggcggcggcggcgacggcgacgcgcacagaggcggactgtggcttccttggtgctcgcggcgggctgcgggccgggccgcccgccctccccgccgccgccgcccccgagcctgcgggcggcgccgaggccgaggagcgctcgctgcagcacatgctgcgtgccatagcggaggagcgcggccgtcttagcctgcgccgcgaggtctgcggcctcggtgagtgggacccgggggcgaggccgggccgggagaggtgagcgtctccggggccgcctctgcgcgtccgtgtttctgtgcgccccgcgcatctctgtctctgcgcgggtgtcgtggtctctgggtctgcctgggtaccctgtcttcctccatggccccccccccaccgtccctgcatctgggtctgtctctgctttccgtccgacgagcgccccgcacccctgtgcccgggtctcattcggcgtctccccctgtcagtccgtccgggtgtctgtctcatcttcctccttcttcttcgtgtctctgcgggtcttcttccttctccaggaagcccgccccgggccctcagcaccgcggtagggagtgtgggcgtgggatctgggtacacccttagcccagcgcggcagggtcgggccctcgttgggctctgggtggacctcgctgcgagcgtgccctggccactgtctcctgctacccgaagcctttgtctttccgcacccaccggcccctctcatcccttagctgtatccagggacctgttgggcaatggccccccgaacccgcccgcttggctgaggggcagggcctgctgcctctcggtgtgattctgggctttaagtcatggatctgctggggggcgtgggatgggggtgcctcgtattgtttggaagggcctgggactgcaggtgtgggtggggtctcccagccagtgaggtaatccattactgatggatcatgcccagactgaagcccaggagaagccccctcttttgtcgtctcaggttcgtcattttctccatggaaaagacccctccctcctccgtgcagggaatgacttcataccacattgtcagccaccccccaccccacccccaggctaggctggggatttctgagggggtgacagcattgctgagtacggaatgtcagccttccagattcaccccttcattcaccgttgggg

SEQ ID NO: 41381 - DNA, 1561 bp, Artificial sequence
  DNA replication origin
ggccagtggcacaaaactggggcagaggcctgaagcaggatccagatcccatctcccttctggggctctgcccaaccccacggctccttcctgctgtgcctcccaggaagacccctgcgtccccatcagacctctccatcattcttcgtttatgcagcctacatttttttttcttttcttttctttttttttggggggggacagggtcttgctctgtctcccagcttggagtgcagtggcgggatctcggctcactgcagcctccgcctcccaggttcaagcaattctcctgcctcagcctccagagtagctgggattacaaatgtgtgctaccatgcccggctaatttttgtatttttagtagagatggggtttcaccattttagccaggctgttctggaactcctaacctcaggcaatccacctacctcggcctcccaaagtgttgggattacaggcatgagccactgtgcccagcctgcagcccatatctatttattgggcatctaatgtgtgccaggcaatgttctgggtactgagacaacagctgtgtagtagacaggcccctccctcggtagagaagagaacaagtgaacccataggtatccaatgtgtcgggaggaggtaagtgtcaccctgtgaaggagaaacagactaagggaagagagagggagggaaggcggtcaggggagtttctttgaggatgtgacactcgggacacaaaggaagcaagttacacaggaatggggagaagaggactccagacaggggaaagggggaccttgatgggtctggggtccacacacaggctgtgaatgcagggagtgatgtagatttagctttggagagacctggaaatcaatgctggtctctccatctccccctgttcttggaaatggaccaccaggcgtgaggtttggggaggccactggctgcttctccggtgtcttcctgtatcagccacaactagcacacggagggatgctggccagacctggcttcatcaggatgacacgcccagctaacctcatacctcccccttcatcaacactcccccatgttggggaggcaaggcagggaaaggtcccccatggtgcagctgaggaaatggaggcgcaacactctgcactgtgccaggtgcagaggaggggggccggaagggctttgccacggtgtcccccaggagaccaccttctgggagcaggtgacctcttgaggggttctgcggaggaagttcccagaagtcagccgaggggacttggtggaggtggcaacgcacagggcgggtgacaaagtacacatcccgtggggtagcagcgggggaggggagaggtgccctgaaggggcggcgggaggggctcagaggcgtgatcccgttggtggggcgtttaggaccttgggtggaggcgggaccccgcgagcggtttgagggaggctgtcctgggcatccgaagattggcggagactggccgtttggaagtgggcggggcaagggaggtcagggggcggggccagggagccggggtgggtccgggccgttcagaggcggggcgggagggga

SEQ ID NO: 41382 - DNA, 1220 bp, Artificial sequence
  DNA replication origin
tgctttattacttttttttataatggagggagggtcccgcccagtgtctagggttcagggcccgcggcctccacgatccgggtacgaccacaggcgggtgcccacccaactccatcctggccttcttcgcctcacttccaggggctgcaggggacaccgagctccttttcctctcaaaggtgcaacaaaaacccagcgagcactgctgcgtgcccggcgctgctagggacatcaggagagggcagaagcctgtgctcccggagtcgcctttcagcagggacgcggtcagcaaacccacggcgctctcctgtgctgggagagacgagggcaggagatggggcgggcgaggggcgggaggaatgggggcgggcgagggggatgggggcgggtgaggagtgacgggggtgggggcgggtgagaggtgaggggggtgggggcgggccagggagataggggagggtgaggggtgagggaagcgggtgaggggagtggggcgggtgacggggatgggggcgagtgaggggtgagcgggtggaggcggggcttgcgtcggtggcctcaccagaagggactgtgcggggacctggaggaggggacagagggaggttggggagactgggaagatcttccaggcagagggaacctcaccggcggctgtcaggaggagggaggggagagggctgggtgatgaggtcagcaaggggcagggggtggaggatggggggcgacggggcggggcctggcagcccaggacggttttggagctcggggaaggtctgagcggaggggcaggggcagcggttggaaggctgcaggctggcggggagggagagggggacaggaagcccagcagtggcggggcatgcatcctctcccttccaccccctctttcggaccccctctctcctaggctcccccactcagctcccacagatcctcttgccccaggtccttcctctgtgtgcggcagagggaaggaccatgcgtggacatgggcgggaggatcatttgagcccaggagttcaagaccagcctgggcaacatagtgagacctcatctccacaaaaataaaagattagctgggtgtggtggcgcgtgcctgtaatcccagctactcgggaggctgaggcaggaagattgcttgagcccaggagttcaaggctacagtgagctatgatagtgcccctgaactccagcctgggtggcaaagcaagaccctg

SEQ ID NO: 41383 - DNA, 927 bp, Artificial sequence
  DNA replication origin
tcccggccgggggactcactgtccactgtcccaggagaagaatacagagtgacagtgtggccaggggacctgtaggagcccaagggaggtgcctggttcagcctgaggctcgggaaggcttgctggaggcggtggtgcctcgactagatcttgaacggggaaggtattccgcgtgttcccggtggaaggaacagtatgcactacgccgggaggtgagaagtgcagggggtcgggtttgggtgcagccgggaccgcaagggtgggccggggccgggagagcagggtcctggctgtggagcgcggcttcgccgcccggggcctgcccccgcccccgcccccgcccccgcccccgcccccgcctccgcctccgcctacccaggctccgcccccacctcctctcagccccgccccgctggcgcgtggagcctcgcgttggtgtcgggcgccccctggcggcgcaacgcgggcggttcggccggggagggggcggtgccgcgcccacagcaaggctgactcccccaatttctattagcatcagaagaatgccctctcagggggaagcaattgttttcgcgtataatttcgacacatttgccattatggcagcgcagtcgcgagatgcttttgctttattacttttttttataatggagggagggtcccgcccagtgtctagggttcagggcccgcggcctccacgatccgggtacgaccacaggcgggtgcccacccaactccatcctggccttcttcgcctcacttccaggggctgcaggggacaccgagctccttttcctctcaaaggtgcaacaaaaacccagcgagcactgctgcgtgcccggcgctgctagggacatcaggagagggcagaagcctgtgctcccggagtcgcctttcagcagggacgcggtcagcaaacccacggcg

SEQ ID NO: 41384 - DNA, 1099 bp, Artificial sequence
  DNA replication origin
ccctggaagtgaggcgaagaaggccaggatggagttgggtgggcacccgcctgtggtcgtacccggatcgtggaggccgcgggccctgaaccctagacactgggcgggaccctccctccattataaaaaaaagtaataaagcaaaagcatctcgcgactgcgctgccataatggcaaatgtgtcgaaattatacgcgaaaacaattgcttccccctgagagggcattcttctgatgctaatagaaattgggggagtcagccttgctgtgggcgcggcaccgccccctccccggccgaaccgcccgcgttgcgccgccagggggcgcccgacaccaacgcgaggctccacgcgccagcggggcggggctgagaggaggtgggggcggagcctgggtaggcggaggcggaggcgggggcgggggcgggggcgggggcgggggcgggggcaggccccgggcggcgaagccgcgctccacagccaggaccctgctctcccggccccggcccacccttgcggtcccggctgcacccaaacccgaccccctgcacttctcacctcccggcgtagtgcatactgttccttccaccgggaacacgcggaataccttccccgttcaagatctagtcgaggcaccaccgcctccagcaagccttcccgagcctcaggctgaaccaggcacctcccttgggctcctacaggtcccctggccacactgtcactctgtattcttctcctgggacagtggacagtgagtcccccggccgggatggggctgggtcacccacgatcctagcacgtggtgagtgggtttcaggtgaataaatctgggagccgggagccccaggcagcttactcagatgatcgatggtggaagtcctgtccctccacccacctttgcttagagcctgggaccacagacgctcagtaagtaactgggctccctggctcctgccccagcctgtcagcccccatctataacttctgagggctgaatcttcctcctgcagaacctcgggctctgaaggtgatccttagtaggccagcttgcagcccagcctttgcatctaacaccctccccgcttttcacagtctctccct

SEQ ID NO: 41385 - DNA, 1317 bp, Artificial sequence
  DNA replication origin
acagtaggcgctttgatgcgggctggagaaggtcctgcccggtgggattgcgccctggggcaccgcgcacgggtcggggaagcccggggcagggccgtatgcaaatagcgcgcgaggaggccgcggattggccagcccaggcgggggcggggcgcgccgagggcccagagctggcaggtgccctggcagggacaggtctggtgcccgcgcctgctcgctggaccgcccgccccgcgctctggcggctcctcccgggcgatgcctccgctctgggccctgctggccctcggctgcctgcggttcggctcgggtaggcggtgaagggcaggagggggctgagcccagaaagagcgggcagctctgccctggggcgcccgccgcctggaccctgattcctggcgctggggacccagatattactgttatgaataatagtgatagccaacgtttacgggcctcctctgttgggaatccgagggctcacagatggctgcagccctgcgatgtgtgttgcaagagaccaacatgcaggggggctgcggtaggacagagaagggactagccccagccccatggtgacgcctggacgggggcagatagagagatatttcggccgaggaagcagcatgggcaagttcatggaggggagacaatattgggctgtcctgggaactgccagtccatgggaccagctggagcctggggtgaggggagcctgtgggggaaggggtgaggctggagaccgaacaaagcaaagcccagaacttcaggacctcactgcctttccagagaggctggacttcgtcagggggcgctgggggaccatgggagggccatagccagagaatgaggcagtcagacttgcatgtggggggagggcccaggtgaggaaggtgggacggaggagggctgggccgatggcatggagagatgcttaggaggggcagtggagttcttggcaactgagtgtctgcagcagggagagaaggcagcagtttggcccgaccgctccatttctgagcaggatgactgggcagggggcagtgtctgagacagcttatgcggtggcccagggggagggtgaagcccagggcctggcacacaacacgtgctcagtaactgcaagcagagtgggtgtggacagttctgccggaggtcagttcccatcctcactgcctcctccagctgtgaacctgcagccccaactggccagtgtgactttcgccaccaacaaccccacacttaccactgtggccttggaaaagcctctctgcatgtttgacagcaaagaggccctcactggcacccacgaggtct

SEQ ID NO: 41386 - DNA, 1236 bp, Artificial sequence
  DNA replication origin
tgacagtgtgtggtgtatatcaggggtccccaacccctgggccatggaccagtaccagtccatggcctgttaggaacgggaccgcgcagcaggaggtgagcagtgggcgagtgaaacttcatctgcatttgcagccgctccctgtagctcgcattactgcctgagctccgcctcctgtcagatcagcagtggcattagagtgtcacgggagcgcgaaccctgttgtgaactgcgcatgccagggattaggttgcatgctcctcacgagaatctcatgcccgatgatgtgtcactgtctcccatcaccccagatgggaccgtctacttgcaggaaaacaagctcagggctcccactgattctacatgatgatgagttgtacaatcattttattatatatggcaaagtaataatatagaaataaggtgcacaataactgcatataaggtgcttgaatcatcccgaaaccacccccagcccactcccgtctgcagaaaacctgtcttccacaaaaccgatccctggtgccaaaaaggctggggactgctggtatatgtggtgtgtggtggggttgtgtgtgtgaatatgagggtgtgtgtggttagtgtgagagtatgtgtggtgtgtgagtgtgagagtgtgtgtggtgtgggtggtgtatgtggtgtgtggtgggggtgtgtgtgaatgagggtgtgtgtggtgtgtgtggttagcgtgagagtatgtctggtgtgtgtgagagtggtgtgggtggtgtatgtgtgtgtggtgtgtgggtggtgtgagagtgtgtattgtatgtgtgtggtgtgtgtggtgtgagagtgtggcaggtgtgtgtgtgagtttgagttgtgtgatgtgtgtggtgtgtgagtgtgagagtgtgtgtgtgagttggaatgtgtgttgtgtggtgtgttagagtgtggcagtgtgtgtgcgtgtgtaagagtttgagttggtgtgtggtgtctgagtgtgactgtgtgtgtgtgggagttggtatgtgtagtgtgtggtgtgtgagagtgtggcagtgtgtgtgagttggtatgtgtggtgtctggtgtgtgagagtggcagtgtgtgtgagttggtatgcgtggtgtgtgtaactgtgtgtgtgtgagttggtatgcgtggtgtgtggtgtgtgagagtgtggcaatgtgtgtgtgtgtaagagtttgagttggtgtgtggtgtctgagtgtgactgtgtatgtgagttg

SEQ ID NO: 41387 - DNA, 793 bp, Artificial sequence
  DNA replication origin
tcgcgctgccacctcttcgcctccgcagccggctacgcctccggggtctctcggcggccgcgcacccctgacgctgggcggggcaaggggatggttctcggggaggggactgcgcaggcacgcgggctagaagcgagagcgagagccggagtcggagccagagcggacgccacgccgcctccaggcgcccctccgcgttagccggcagcggcgccgccgcaaacccttcccccgcgcgcccgccccagccgcgtgaacgttccgtcccgaaaccaacggccccgcggtccccggaggccccgccccggggaagggcgaagccaggacgcgcgccccgccccgccccgccgccagatcctctggcaccgcccacctcggtgaccacggtcccgcccaccggggaggccacgcccccggggtctccagcgcaggcgcggtcggatgtgcgggggagggcttgcgctggggagcgcttgggcctagagtccgcgtcctagccctacctggcccggcgagccgcgcgtcccgtttcctcatttgcagaaagggggcgggagcactttgcagggacgtggcgagcatcaagtgcgatcggaagcgctcctttgcaactgcatcctgcaccacacttaggcacagcttctgtccccaacccagacctgaggctggtctccgtcccccagcagactcctgcccgcttaaattggccagtcaccagccctaccttctttctttttcagagtacttgtcactctccgaaattaggtacgcttgtgactggctcccacttccc

SEQ ID NO: 41388 - DNA, 1507 bp, Artificial sequence
  DNA replication origin
ccaagattttctctggactccgagaccccctgaggaccccggccgctagtgggccctgagaactgttggttccggaaactctcgaggttcccttgggacttgcttccagcaacctcctcagaagcccccaggcccggggcatcttcctgtggggagccgtggttcccagtgtccttagccccgcgagaccccgggtccccgtgccgcccaccctgaggctccctctccgacctgatctcagggctaggtttctccaacttgaggtccctggacctgcggggcgtgggtggaagtgttcccaggtctggtgataacttaagacggtaacagcgcgcccgacgaccacctcctaagctgtggtccccgcgcctgcaggtgcagggccgggtttaagttttaatgttctgctgagactcaggtggccccacaggacagtctatagagcaggagacctgaggtggccgagggcggccgaaccggggagggagcgagttagggcacatggggacgcttttaggttgtctcctccttaattttttcattcaaggaactaacattttgtttttgaatgcctgataggctccaggaattgacactggaaatagagatgagacggtccctgctgtcagggcctagggacctggggcataagacaagtaggtcgtttttatctggaggaagctgtgtcgtcgctggcagggaacccatctgggtgggcatgggattctgggaaggggtgggtgttaaggagggcgtcttaggagtcgtggggaggagatgctaagcagcaggtgagctgattcttgaaggttgagctagaggagaagtttgccagggtcattccaggcagagtttcaggggacagccagtatgtcaaaaggcagagaggctgccacggcacacagtgttggaaggcgggaggtgtggctggagcacacctaatgaaggtggcgtgggagtgaatgctaactgcggagaacccagctttgctcccggaggcccaccgtgcccttggccctttcttgaacgactgcacctgccattgtcctgagaaatgatccagctgagctgaaggaaggtgggaggtggtcagggggagaagtgagggaagtgtctcgctagagacctggtatgggagaagctgggacttttgcagagtactgggtttgaggtgggagtgacaagaaagagggtgtgattctgagagccagtcaggaccaaagcatgcccagtttaagctgagtggagggtttggtacttaaagggagtgggtggccattgaagggctttgggaggagaggggcgggagttggtgtgtttttgaaccatccatgtggctgtggtggggagacttttttggaggaagcaagaccctatgagagatgggggtgacctggaccaaggcggtggtagtgggggactgtggctttctggaacggggctaagcttctgaaagcccaggcccagaagactggttcccgctctttcctgtctgagcctggggtct

SEQ ID NO: 41389 - DNA, 1152 bp, Artificial sequence
  DNA replication origin
taacctggcgtggtggcaggcgcctgtaatcccagctactcaggaggctgaggcaggagaatcgcttgaacctgggaggcagaggttgcaatgaaccaagattgtgccattgcactctatcctgggcaacaaaagtgaaactccatctcaaaatattttctctctggcccttgtagacaacatttgctcacccgtcataggaagaagaagggaggagtcgaagggaggccagggaagggtagtggggtcgctgggcagcactgagggcccttgttgtccttcaggtgaagagagactgtttgtctagaatgagaatcgtttgtcttgaaaacaagtagttgagcatcattcaactcttctgttcacttttgcgtgtttttgaaaacctccatcaggaagcgttgaggtgaggctgtcgacacagctgtgttgagagtcggagaacaggcatgggggaagctgagagttggttgcatcaggaattccagcaacaccagagaagggtgaggggcttgcaagtgtattgggggaagttgtagtgatccattgtagactctaagctgcttgatggaagaaggcaggacaggacagcagggcagctagtgactggtcagtgatagtggggtcagtagctcacgggcctcaatgggcttgaagtttccctgggagccagggtgctagagaggtgggcagatgggagggagtggttggacaggggaagctggcccagaggttctggaaaggatccaggtcttggtaacgataaggccttgggggctgtatgtgtggatggctgagatggaccaggactattggaggagagtgatggctggaatttagaggccatgatcccagggagaatcatccaagcggacatgagaatcaccccaaattatgacggcacagctggagagactcagccctcaccttcatcggtgcagggagtgcaggggagcccccaggaagggtctcagggatgcatagagccaggtctcaggtcggggagaaggtgagcattcccaggagatgatggagatgtgggggttggctgatggcagaccccctgggaacagtgggagggtttgggtggtgggagagtcagaagagctgtggcgatgagtgggaacctatgagtcttggttttcttgtgcc

SEQ ID NO: 41390 - DNA, 1571 bp, Artificial sequence
  DNA replication origin
aagacaagcctttagcgcagttttccgtcgggctcccagtgacgccgcagaggtacagacgctcccgctctctcggaaatgtcaacaactcgttgctaaggaacggctccgcgcttgccgcgtctcgctctcttctcgcgacacttggcgaatcccttcccgcgctttttccgcgggcgcttgataacgcgggtgaggcgtggagggcggcgccatggcccacctggagctgctgcttgtggaaaatttcaagtcgtggcggggccgccaggtcattggccccttccggaggttcacctgcatcatcggccccaacggctctggtaactgagcagctcagggcgccaccggagcgcctccgccgtcccaggcgtccaggccacacgtggcctgtggggtgtgggcgtctgccgcgggcgcctggccggccttccccttccagtcccggagcctgaccgcgaccggatcccggcctggccctggcccagcccctgcccatcaccccacctcagccccggtcctcgccgtccacctcaggggtcccgacccttgtccctccgccccacctcggaggtcctgacccttccactcggccccgcctcgggccccgctctcgccctccacctcctggctcccgaccctcctccgacaccctgagggaccccaccccacctcagctccggccctcgcccttcatctcaggggctcccaaccctcgccccccaccctgggggtcctgacgcttcctctccgccccggtcccgccctgggccctgttctctgccctcactcctgcttcggggactgctcttgcccttggccctggtcactcgcgtcccttttcccttctcatccgaagttgaagtgagagggagctgtcgaggaggtaatgggttccaagcagccagaaccaccatttggatccaagggagctttgacccaggaatgtagtgatgatgacccagtttactgagcttttcctaagttcctggcgacaccgtctttggttagccatggcgcatggctgctctccccattttatagttggggaaactgaggtctggagaggccagaggacctgcggaggtctctactaataataccaaaattagctgggtgtggtggcacacgcctgtaatcccaactactctggaggctgaggcgggagaatcgcttgaacctgggaggtggaagttgcagtgagccaaggacacgccattgcactccagcctggcaacacagtgcgactctcgtctcaaaaaaaaaaaaaaaaaaaaaaaaaaggctgggcgcggtggctcacacctgtaattccagcactttaggaggccgaggcgggtggatcatgagatcaggagttcgagaccagcctgaccaacatggtgaagccctgtctctactaaaaatacaaaaattaatcgggtgtggtgacatgcacctgtaatcccggctactgaggaggctgaggcaggagaatcgcttgaacccgggaggcagaggttgcagtgagccaagatagcaccaccgcactccagcctgggtaacaagagcgagacttcgactctaaaata

SEQ ID NO: 41391 - DNA, 1532 bp, Artificial sequence
  DNA replication origin
gccaagggcaagagcagtccccgaagcaggagtgagggcagagaacagggcccagggcgggaccggggcggagaggaagcgtcaggacccccagggtggggggcgagggttgggagcccctgagatgaagggcgagggccggagctgaggtggggtggggtccctcagggtgtcggaggagggtcgggagccaggaggtggagggcgagagcggggcccgaggcggggccgagtggaagggtcaggacctccgaggtggggcggagggacaagggtcgggacccctgaggtggacggcgaggaccggggctgaggtggggtgatgggcaggggctgggccagggccaggccgggatccggtcgcggtcaggctccgggactggaaggggaaggccggccaggcgcccgcggcagacgcccacaccccacaggccacgtgtggcctggacgcctgggacggcggaggcgctccggtggcgccctgagctgctcagttaccagagccgttggggccgatgatgcaggtgaacctccggaaggggccaatgacctggcggccccgccacgacttgaaattttccacaagcagcagctccaggtgggccatggcgccgccctccacgcctcacccgcgttatcaagcgcccgcggaaaaagcgcgggaagggattcgccaagtgtcgcgagaagagagcgagacgcggcaagcgcggagccgttccttagcaacgagttgttgacatttccgagagagcgggagcgtctgtacctctgcggcgtcactgggagcccgacggaaaactgcgctaaaggcttgtctttcccctgcccgaccgaaggagccgaccttgcctgcgctacagcttccttattttcgtcgcctgttctcctgatcctgcgtgttctaaaaaccccttaggctttccatgggttcccagaccatggcggtggcgctgcccagggacttgcggcaggacgccaacctggcaaagaggaggcacgcggagctgtgcaggcagaagcgggtcttcaacgccagaaacaggataattggggtgaaagggcaggggccgggacggggttagagcggcagatgcgggcgaggggctgcgtggagggggaaaggagatgagttctaggatgaaacatctgagccaggaggcagcaaacggcctcctgcagggccaataatgctccctctcgagctcgcctggagtcaccaacggttctcctcccctgagccagattttctacaactcgtttacagtggggcagagattaaaaataataataagtaggattgttattactgaataaaatgatctggctctaacccttctcctctgtttttccatttatagggagacactgaagcctgggatgttcaagttcatgaccagaagataaaagaagctactgaaaaagctagacatgaaacctttggtgagcatttcctgaatgcttatctattggtttaggattgtgtggctttagactccagtcttccccaccgtccccctgccccgcctttt

SEQ ID NO: 41392 - DNA, 987 bp, Artificial sequence
  DNA replication origin
tctgcctcctgagttcaagcgattctcctgcctcagcctccccagtagttgggattacaggcatgcaccaccacacccagctgctttttgtattttttgtagaggtagggtatcgtcatgttggccaggctggtctcaaactcctggtctcaagtgatccacccacctcagcctcccatagtgccgggattacaggcgtgagccaccatgcccggccctacagagagtatttaaagctgaggactgagtcctgctcccacctccccagcaccccccttctcaccaccactgttgataaagagcaaaggcatctgagaaggggccgccagggaggtggacagatgcaagccgtggtttcctggaggccaagtgaggaaaggtgtttgggagggaaggagaggggaacccctgggtcaaacgctgctgccatgctcaggctaaacgctggatccagcaccatggcagtcaccagggaccctgtcaggaaggagcatgtttggcagaggagtggggctgccagcctaatgggctcaagagagaacaggcaggaaacgaatggagatggcacatgcagacagcacttacaaggcgtttgctgtaaagggtgcagagaaatggagtaggagctggtgggggccatgaggtgaagggaaagtttttgtttgtcttgattgtagaaataacagcatgcttgtcattcagccggagtgatgcagtagagggggaaattgatgccagaggagagacttgctggagccgtgtccctgggctgcaggagagcgagggacatggagtgctagttgagggcttggtgtggcctctgggagctcagagccatcactggagtcacgggaaggggcatcagggcgggagcttgcgggtgaacagaattgagacctgagttgatctgtactgggggctgtggctcaggaccactgaagtgaccgtcattttctaccttttagaagtagaactgagcagggccgg

SEQ ID NO: 41393 - DNA, 1256 bp, Artificial sequence
  DNA replication origin
cgcgggcgcggtcctggggcagcggcgcgggctccacgctccggccgagcctcggcagccaacgctgggccagggccgcgccgttcaattatcccgcccgggaggagggcgcggcggaggcggggccgcgggtctcctggtcctccctccccggcgccccctgccgggaccctccctccccggaccccggctgcgaggggcgcgcgcccacggctgggggcgagggcctggatcccagacttccccggagggggcacagagggggcgccttcgggccggatgcccccagtcctatcccccaacactccgtgaaacccgatcccctcctccccccaccccctctcgaggggagggctcgggatcaaaggttatccccgcccgactccgcgcggaggagcggggacccgggcctgcagtcggaggcccggctgctggggggcactggggcaggccttaccgccaaccccgcaccctcggccgggaggctgcaggtcggtggctaaccccaggcgtgtcccgggatgggacccgactctgccctcagagacagggacagtcgggccaggccaacaaacaaccaaaatcccaacgtgtgctgggctcacccgggacaccagggccggagggagagacccgggaagtcaccgaggctgcaggggaggcagctttggcgctgggcctgcgggagcctcttgtataggaattcatagctaccggggttactgaggatgagttaggctttggaaccacaagtagatttattttccaaagaagaagaataaaatggtgcaggtgaagatgcggaggaactggatgagacgcataggaacgccactgggcagctcaaagcggtgttcctgtgagttcaccatggaccccttgagccaccgacgccccgcccagccttacactcagcagaaacgcatacaacatgtgctccaaaagacagaaagacatgtagccgcacattcataattcctccaattgggaagcctagcgtcatcaaggcagatgaatatcgtggagtattcgggcttaggagcacgacaaacggaacaggagtgaatgatccgcaactcacataacgggtaaatctcacagacgtaagtcagagtaatagagtcagccacaaaggaacactcgctgcatgattccatttacataaaaggcaagaacaggccggtggcggtggctcacacctgtaatcccagcactttgggaggatgaagtgggcggattgcctgaggtcaggagtt

SEQ ID NO: 41394 - DNA, 1363 bp, Artificial sequence
  DNA replication origin
ccagggagagttttaccacgccttctctcaggccctcagcttcctcatcgacacaatcggggcctctgaggctccttccttttctaacaggagtctcggatgtcccacccacccatcacccagggcccctcggggttttccctccagctggcagccacccggcctgctgcttgctggaatgccctcttcccgcgctccccttacatcaagctccatctcttctaaagagcctccagggagcccccaggggctgcgaaggctcctggtgccaacactgagctctgcgcctccccacaccatctccaaccccacgaggtgcccaggccgtgcccagcaccgcctgaacaatcagagctccacagggctctgctgcagccagccagtcaagaaagctctgtagagctcagctcccagcctcccctccccctccagcccccttcagcccccttcctggaatcccccagtgagcattagttgggacaagcgaccttttgactaacaaaggcggtcaccagaggttaaaaggaactcaactaaaccagggattaagactcggattctgagggtggtctagggcactcccctggacctgggccactggagaaacaaagacgccaggagtgccgggcctggctagtggctctgagaagccacgggtcagcagagaggtcacaggtcatagctctgccgcccagcagctgctctgatcagaggacctcgtggcagtccccccagggaccaggccttgagggttagaggggagaaaagcgcgggctgggtgggcactgtcccggagctgtcagtcccagagttggggcctaaggtctgggccatcgatcagatctgctcttggaaaactccatcccccttgccgttggtggaagtgaccagtccccagtccccgctgagcaccgagcccggcagaaccactgccttgggccctctgtcccgggagggaggcagggaggaggtggccaggtccgcatcccctccatcctcccagctacgccccaaaaacctccaggctgctccctggctttctcatttcttcctctccagcccctatcccaggaccgctagtgtctcctggggaaaagactgcttcccaccctccaggctcaagtttcacatccgcaagctgggtacaacagctcctacctgggggtggaggcgggaagcggtgaggaaagatagccgagggcgcttccagcgtcaagtgcaaggcgccctgggctcggtaacccccagccagcgtcccccagcccagctagcgcccctgaacccccagggcccgggatgcggcccccggagccggctggatttgctaggactggggtaggacggtgtgtttgaggggtggggg

SEQ ID NO: 41395 - DNA, 1595 bp, Artificial sequence
  DNA replication origin
ccaaggcagtggttctgccgggctcggtgctcagcggggactggggactggtcacttccaccaacggcaagggggatggagttttccaagagcagatctgatcgatggcccagaccttaggccccaactctgggactgacagctccgggacagtgcccacccagcccgcgcttttctcccctctaaccctcaaggcctggtccctggggggactgccacgaggtcctctgatcagagcagctgctgggcggcagagctatgacctgtgacctctctgctgacccgtggcttctcagagccactagccaggcccggcactcctggcgtctttgtttctccagtggcccaggtccaggggagtgccctagaccaccctcagaatccgagtcttaatccctggtttagttgagttccttttaacctctggtgaccgcctttgttagtcaaaaggtcgcttgtcccaactaatgctcactgggggattccaggaagggggctgaagggggctggagggggaggggaggctgggagctgagctctacagagctttcttgactggctggctgcagcagagccctgtggagctctgattgttcaggcggtgctgggcacggcctgggcacctcgtggggttggagatggtgtggggaggcgcagagctcagtgttggcaccaggagccttcgcagcccctgggggctccctggaggctctttagaagagatggagcttgatgtaaggggagcgcgggaagagggcattccagcaagcagcaggccgggtggctgccagctggagggaaaaccccgaggggccctgggtgatgggtgggtgggacatccgagactcctgttagaaaaggaaggagcctcagaggccccgattgtgtcgatgaggaagctgagggcctgagagaaggcgtggtaaaactctccctggccccggagtctctgcgttccctctcactgttcttttctgtctgcggtttgcgaacaatttctccctatgtgtgtgtgactgaatgaacaccccaggacttgcgggcccagtgtggctcactgctgagccacagagaagtttgtaattggaagggtttaaaaaagcctcctaattgcacacttcgataaaagcagctggatgtcctgtgggccttttgtttcttttggggagaagtctctttgagtttcaacaggtttaatttggtacagtttgggaaggggcttttgaagactgcctggcccctatctgcagctgtgaggcccccgaagccctgtatgtaaggccacaagtggcaccgcccctgctctcagagagctgtggggccgcagatggtgagcctgttagctgatctgcagaaactcctttggcgacggccgcttaaatggagaagggcgctgatctttcttgccaaacggccgagaggagccgcctgtctgtcctgtgtctgtccgtcccgttgggctttactgagagctgggtgggagggagtggagaggaggaggtgttaggaaaagacgattgtgttttctccaaggctttcttggcctctggctgcagccgggcagcgtttccgactgattaaaagaaagttgggag

SEQ ID NO: 41396 - DNA, 860 bp, Artificial sequence
  DNA replication origin
tcacctgaggtcaagagctcgagaccaacctggccaacacggcaaaaccccatctctactgaaaatacaaaaattagccaggcatggttgtgggcacctgtaatcccagctacttgggaggctgagacaggagaactgcttgaacccagcagggtggaggttgcagtgagccaagattgcaccactgcactccagcctgggtgacagtgagactgtctcaaaaaaaaaaaaaaaagaagaaaagaaggagggaaagggggaggcggggagggagagaaggggaagggaaggagggggaggagggaagtgggaggggagggggaggggaagaggagaagggagggggaggatgggagggggaagaggaggaggagaaggagaaaggaatacagcagcaggaggagggaatttgaagaaaagagcaaagaaaacccgacaaagccatgctggtctcaaagccctcggtgacccaaccttaaggttctagaaaattctccatgcatgataggggcagagacctccactttctgggaccctgacccatcccttgtactagctctgcaggaagagctcttctgctacaggcaggaggctcggatgggctcttggggccccaggatggttctaggagctccaggaagatggattctggctacacaaggaaatcaacgcttcccaccacggaccatgctgttcctgggtgagggagcgggtaccatgggcagaggtgtgggagcagaggacccagggtgcgtgctgggggaccaggacctgacatagaaccttttcagccctctcccagacggcctgaaactaccttctatcttgatgtattttctccttagaaagacgtatttctg

SEQ ID NO: 41397 - DNA, 1459 bp, Artificial sequence
  DNA replication origin
atcagagtctgtaggatcaagtggatggatggaaccaggcccctggtggcagctctcatgtttgcgatgctgcatgtgggcagcgagtgttccttgctacttcttcctccttcccttgcctccctgtgttagagaagttggtggtggttctgaaagaacagtggtgtagaattcgtgatggggaggcagccaggaaatgacccagcttcttggttctctgagactgacgaagtgaggtcctggggcagtccccaccagatgaggcacgtggctcagcctcatctgcctgcctctccccaagattgacaccgttcccagaaccggcctgaaacttcatatttttgggctttgcacttgtccttcctgcttccttggctcatatttattcctcaaaacccaatttaaagcttcctgtttaaagctcctctgtgcagagtagcctctaatggatgggtgggtggattcatgggtgggtagcatctaatggatgggtgggtggatccatgggtgggtgtgtgggtggatggacagatgggttgattggtgggtgaatggatggatggttggatccatgggtaggtgagtggatggattggtggatagatggatggatggatggatggatggatggatggatagatggatgggtgagtggatagatggatggatggatgagcagatggttgggttgatgggtgggtgaatggatggatggttggatccatgggtaggtgagttgatggattgctgagtgggtgggtggatggatggatggacggatggatggatagatggattggtgagtggatggttgggttgatggatggttatgaagctatgaagaaaagtggtatcagaatcttgattctgcaggcatttatttggcatctattatgtgccaggaactgaggaccagctgaactgttaaggtcctctttcatgaagtcctccctagccactggcctgggttcagtcgaggtgagggcaaggaggtggaagtcatgcttgaactagcctggagatggaggaaacctgttccccaaaccagagcccaggaaaatgtggctaggctggaggagtgtgggcaggtccgctgacagggcatggcctgggaaagggggtcctgggttgagtggggttgtgcacagactgggagatgcagtgtggacttcaggtcagaggggagggatagagaagcggatttggaaggtcaggaaggggtgcacattccttgagcgcctgctgtgtgcagccgtacagtctgttgttcaaccctcgcagcatccctacttgttctaccttaataacttttcttgttaaatgcaaagaacctgagaaaatccaggccccgaatctgaccatcagtgattcagcctagcgcctcccttccccttcacagcacccttttccctagtgtggtccttcctttctagttgctcgtctcaccacgcagctgttt

SEQ ID NO: 41398 - DNA, 1329 bp, Artificial sequence
  DNA replication origin
cgcgtctccagcgaggcgggggcggcgcctgggtccaggccggggccgccgcgggagtcccggccgccctcccctgcccggggcagccccccggccggacccgttaccggttccgctgctctttgaagagcgccgtgagcgcgcgcagggcctccaggtcttggatgggcgccggcaccatgacgcccgacagcctggcaggcggcggcctgggcgccgccatcttgccgctcacagctgggtcgagcctgacgaggaggaggaaggcgaggaggacgaagggggaggatgacgaggagggaggagtaggatggcgaggaggaagggggaggcctcgccctacacagccctaaccgccgccgccgctgcagcccgcgctgccctgaagctgcgccgccgccggagagctctaggctgagcccagactcgcctcaggcgggaggaggagacggcgccgcgggggagggggcgccggcggaagtcccgcctgaggggagggggcgcggcggaagttctgggtgagagcggggagggatgctgggggtgattgactgggaagcgtcgcagacggggctcctccgaggggaggggacgccggggggagggggacctgtgttgatgtggccgtaacagggtctcggtcttgggagcgggtatcgggaaccagaggttcaccctgagaaagaggggcgcgtcctataggagggtgcccgcggacagaggggtctcccccaggggaggggatccggggggtaaggggcctgtggagggtggggccgtaacaaggtctcggtcttgggagcgggtatcggggacagaggttcaccttgaggaagaggggccctcctgtgggagggggcccgcagacagagtggtctcccccaggggaggacattctgggtggaggggaccctcttgggaggagacgctgactgagggtctcgggaacgaagggggccgggcagaggctcccactgctaaggctgaagaccttgatcccactgctcaagtgggttgatcagtgcccccgcccgggtccactggaagctggagcggtctgtcactagcttgcaagtctcaggccctgaaaacgcacttcccagtacttactgatcattgctgatcaataccagaccacttaccaggcactttgcctctagtgagtatacattgctccagctcctcaaagccttaaaataccgttcgaagtcaagaagctaagttacacagcaatagggttagaattgttttttttcctaagggaaatgaatatatttcacaggaatcagacaaggcttctctagctggtgttgataactcacatatttt

SEQ ID NO: 41399 - DNA, 1095 bp, Artificial sequence
  DNA replication origin
tcctcgtcaggctcgacccagctgtgagcggcaagatggcggcgcccaggccgccgcctgccaggctgtcgggcgtcatggtgccggcgcccatccaagacctggaggccctgcgcgcgctcacggcgctcttcaaagagcagcggaaccggtaacgggtccggccggggggctgccccgggcaggggagggcggccgggactcccgcggcggccccggcctggacccaggcgccgcccccgcctcgctggagacgcggagggcgaggcctgcgcgggctgcctgagcgccacccaggcctcccgactcccaggcaccgcctcgtgctcgtgggtccccgcggggcctggggcgggcgccccgctcccccaccgcagccagtccgggtgcgaagccgcgatcccgggagcccttgccgcggcgtgccggtgatgttgacccaacacacggttaggcctcccctgtcatgtgcgagggctgcgccaggccctggctgcaagacccacgcggcccccagagtcataaagcgtgtgttttagcgggagagacccgtgttacggacgcgggaattgggcagttgcggggatggcagtctctaggcatggagtgggactggcactcctttctcctcggcgttagagcccaggctgcaccatctgccctgggggcagcgctctgtgcagtgtggaagagcacgggcctggagagaccagtccagtcctgatgccactgaggggcaagatagccaggcaaaaagagaaggtgcccaggagtcgacagttgtggatttggttcctggccttgcaagctgcgtgttactgtgcagtttctccaggccttagaattcttgtctaaaaatgggactataatacacagcttagttgctggattgtacagaggaataaatgaaataaagtacgtgaaaatataaaatgtgcgaagccctcagtcaatgcttgtttgatcttgttctgtcctctgggcctcagttttcttgtctatttaatgggagtaaagttgaacagtacctccctggtgatagtgtcataaggagtaaatgagatataatgcatattaaatccttaggacatacct

SEQ ID NO: 41400 - DNA, 1006 bp, Artificial sequence
  DNA replication origin
ctttgctccacttcaccaaagcatgcaagggtttgataccaaaaaagagaaaactctatcttagcttcaatctacccacaaaggatgatggggtaaaaagtcaacgaaactaccactggtaaaagacaaaggctcatgaagagcgagttggattctgaagtctgaaaggatgaggccaaacaaacccggattagccagacgcaagggagatgtcttttgagagttgagactcaaactcatggggaagggaggggagttgtaaacattttatagaacagaagccttgctaagggaaacccttccacggaaacttaccaggagccctggtaatgctgagcaggaaggcagtgtgacaggagggaatctgagaggtctgggcctggggcaacaaggcttgcctgagtgggagtgggggtgggggctggggggtagcggtggatctaaccctgcagagagggaactcccctgcgatgggggagggagaagatgattcctgcagagaatgtggacttagcaagcaagcgtatgaagtcagggtcagatgctgcagtattgaagatgagtgtgcaccgtgaggaaggatttcaagcacacgctgcaggatcagggagaagcagagaggctgccggagaggccggggagaaactggctggccgaattctggaatggaactcacaagtcaggtattataattttctccaataacacgtagcagccttagataagaagggggcctggaagacactgggggaggtgggggtaagagcctaacacagccggcacctcaagacagcccatgctcaccagctcactcagtgagcccactccaccaccatgctatgctgttcccagcaccagaatggtgaagagacaaatggtccctgcctatcctccttgtacttacattctagggttgcgaagagcagagcagacaaaaccaaccacaaatgtgcctgtaaatgcatgcatatgaagacagtctgacctgtggcagtgaaggaacaga

SEQ ID NO: 41401 - DNA, 1037 bp, Artificial sequence
  DNA replication origin
cagggccctcgcagtccgccgctttgtcgcccgtctggccccgcgcctgcaggggtccctcccgcgctgcaggacttgatcggggcttggggtgggccgcggcgggtctggggtcctctggctcccgcgcttacgggagcggcggggaagggagcccgcctcggaagggccccctttgccgggcacaggcaggccggtcctcccgcgctcctcgctcccgggctgtggcctcgcgtccccgggccacggcgctgcagccacgcgggcggcgcgaagtcgtggaaggcgcggaccgtcctccccgggcactgtgggactgcgggccttcccggtccaagccaaagcacgtgccgtggagctcggccccgcgcggggcagagggagtggtccagggctcgggagcgcgctgtctccacctccccagcacccgcctgccccgcgccagagctcgtcccttcccccatggcctacgggaagggagctgggtgttctcagagggacccggggaagggacggcagggacctctcgacgacatggaaggaaagaggggaggagagggagggtgggcacgggaaggggagcagctgaggggctgggagggaagcggagagtagcgcggagccaggcggaggagcggacttgttatttacagttattaattgctgggaacagattgcagctggaaacgctctcggtgccagctctcggtgccagctgaacctctcggagcaagccccattcgcgcaggccgctgtgagcgaaggctccacgcgagcatctcctgggtgtgggatctcggtaaccccaggcctcacatcctaacatccaggccctggagcctgtgagcctcctgagggtctctaaccgactccggctggacagtgcgggccctcaacttgccctagtatgagtcatcgtggcaacacctcagaaaatacccaagtcactccaattacagcattatcaatcgctgccatcgctctggaactcaacccaatgaaactggcgagaatgccagccgagccgggccaggccg

SEQ ID NO: 41402 - DNA, 1643 bp, Artificial sequence
  DNA replication origin
gggtccgcccagggttcagtctcctgttgggctgcaaggagttgttagcaaagttgaggaccccggctccataaccggtggcagcactagcaagtgtgtgtgtgtgtgtgtgtgcgcgcgcaagtgtgcacgtgtgagtgtgagcatgtgtggtagcagggactcccagagctccgagtccaaggctgagactgggcccgccgatgctctccagttctacaactgtcacaagaatgtggcagccagggctaagctggggagctaatccggctttgatgctgaccctctggccatccagggcgctgaggtcaggaccacccgctccggccctggatgaaatgcagtgggagtggaaggctggagtgccctgggactgacgaagactcgcccctgggaccaccttgttgcaactcctgcttctgagaacggagcacggggccgtccatgtgctattcactcagcagctgcttgccaggcacctggcatgtgccagggctgcccaaggcacagggatgcagtggtgagcaaagggacccacatactacccttgtgagccagatagtgcatttaatagaccctgggccagccagatggctgcaagtccaagacaaccgggaggcagggcaggggagacaggccactgcaggaaggaggctgcaggtgcaatttcatggagaaggtgacattttagcagactgggaggaggtgtgggaatgaggtggcagatgtctgagggaggagcgtccgggtgaaggaagcttctggtgccttgggcctgaagcaggaggaagctttgtctgagtgaggagcacctcagcggccgcggcggcagaaggggaagccagggcagtgccccttctgtgggctccaggagcaccgggctgtgcgctgagcaagctgagagtctttggagggttttggcagaagaatgatgtgatttgacttaggttcagaaaggatgatgggtggggacttatggtggccacaccaggggcagggagcccagggaaggtgcagccgtgaccatcaggaagagcaaaggcagcttgccttggcttagcccgggaggccgggttctggccatgtctggaagggagagccatgggattttctgacggaataaacgtgagactggagagaaagaggggagtcagggacaagtgtaaagtttgcgtggggagaaaagggaggaaaggagttgtcattttctgagtttgggaagttgcgggcggggacaggtctgggctggggcgggtgccaggcgaggcatccggcttggcctggagttggatgtaggagtctggagctcagggcaccgtccaggctgcacatatttgggggtcataggagaattattgtgtctgaagaactggatgggtttccagggaatgtagaagagagaaacccggtggagagcacaggggagaagccgccagtggggaaggcagggaacccagcaggagggcaggagaaggaggagtcgcagccagactgagggacatgaaaggcttcagaggaggggctgtggggtgggagaagggggatcccaatgggagacgcaagtggatggcacttgaagggctttactttgagaaagagcagagacacgcagggctgtggagtggtggggggcccgggggggc

SEQ ID NO: 41403 - DNA, 971 bp, Artificial sequence
  DNA replication origin
ccagaagagaaatgtggcaggcttttttttttttttagagcactctctgaccctggccggggtggaggccacagcagctttgtgtcatgggaaggtcacagagcaggggtccaggggtctgggccttggccacggttccgtcgggcgcagcacgattcatgcaaatccctgttgctgagttcttccatttgggaactgggccagttgggcccaggaccagagcatttgaggtctaagagtctttgactctaaagtagagtctattttttgcccactagatgatagcaaggagggagggagggaggaagggggggaagggagggaagggagggagggagggagggagggaggggggaagggagggagggaggaagggagggagggaaggagggaggaaagaaggaaggaaggaaggaagggcagaagtgtgtagggaggagggagggaagcagggagggaagggggagggagggaaggagggagggaagggggagggaaggagggagggagtgtgtgggaaggagggagggaaggccggagggtgtcagctgtggggaggccaccctgtctgactggctagtggtcgtcatggcccagatgccctctgctttgggactttgcacatgctcttctctccctgtgtggggaccacgggccatctccccagcccctctgctctctcttctagaagtgctgggccctgggtctaccccacgacccctctgcctctccccaggctgtgagctccccgaggacgacgccccctctgcttacaccacctgcaggcgctccagccccggcactggaaggccttggccaccgacacagcagcctcatcttctggctggatgtgagtatcctcctgcagggacctcgtggacacaccgtgtttgcagagatgctttctcaggaagggcagctggctgggaggccaggacccagccccattcagctccccaggcccgctgcga

SEQ ID NO: 41404 - DNA, 1273 bp, Artificial sequence
  DNA replication origin
agcctgatggccagcgacccccagaggagcccagccagcaacgctaaagccgatgtctcagaaagagtccatgtgcttcaggggcagaggggacagcagaatggcgaggtggggtggcaggtagtctttggggccgcggctgggagcccctcatcctcaccgctctgttcagggacagcctgtcctggggggctcagtgctgcccctggcataggtggccaaggagtgaccacaggccagaagccaagccaggcccctgccaggccaccttctgctccagatggcagtgtgcccctctgccaggggtcacagtgagacctgagatgcagggaagggtgggcggaggggggcccagaagaggagcccgcagcgggcagcaaggaccctggagcccgtcccggctcggacacctggagcgggaccatagcaggaggcctctggctgccccaagcctcacctgcctgagggttttttgaggatcagagactgagccctgggcttgtcaatgagcaggcgaccccatacttgtgcccagggtccatggcggacccgggcaaggagggactgcggggagtctcgggccaacagcaggtgtggggttttgaggggccaggcagggagagggaaggagggaggtcttggagggcacatttgagtgggcattgggtgggtggcggccctgctgtgagagcgcccagggggcttggtgagagccgagggcagggggcgtgggctcatttctgcgtttagaaaactcttcccaagctgtccagggagagccagaatggaagtgcttggtgggcctgtgagggccgctgcagccattctaagagctggtgtctattcaagaggagagagagtggggagctggggtgcccgggtgagctggcacagggtgcggggcatgtgtgtgaggggcaggggaggtgtgttgggatgtgtacagtaatcaggaagaaggcctcctctgggaactggggtgcccgggtaagctggaagaagggtcaggtctagggctgaacaaggggactgtgcctggaaggagcatgttctggagaccagaagagcaagcgggtagccccgccgtctgccagcctctcacgtgccatgattacattgccaagtccgcaaaagtgcccctgtgggtgccgtgtcacttacatccagggaaactgaggcacaaagggactcaccagagccagagctagaaacaaggtgggccccccttcagctgggactgacaccacaactcatcctgagacctcgtgccatc

SEQ ID NO: 41405 - DNA, 2560 bp, Artificial sequence
  DNA replication origin
gcggatgcagcccattcactgtttggataattcgaccacaaaaagcgtgtggccctttcgcctccatcggcgggactcggcaccccgcccccacggcctttcagggctctcgggagggaaaattcccacaggtcccacaggcaggcaagggccctggaaagacagcggcttcggcctccagcggcccctgcccaaatcccggtaccggctctgcggcccgggcgagggaccgattctccatcggaaaacaggacgagaggcccccaccccagaggcagggtcctggggccctgaggagctctgcccttcccctctcccctgggaaccagcgccaggctctgggcaagtcactccctccctccggcctcaacttagttcttagagctgcaaaaacgggggataaatcatgtttgcgtcccagggggtcacaaggcccgggtgggaccaccagtcccagagcttggcacgtggtgagaattggaaagccgtcagcccttcctcccacacccacggggctgcgctgtgccccacaggctgcacagggtgcggggcgtgtgtgtgcggggcgtgtgtgtgaggggcgtgtgtgtgaggggcgagtgtgtgaggggcgtgtgtgtgcggggcgagtgtgtgaggggcgagtgtgtgcggggcgagtgtgtgaggggcgtgtgtgtgcggggcgtgtgtgtgcggggcgtgtgtgtgcggggcgagtgtgtgaggggcgtttgtgtgaggggcgtgtgtgtgaggggcgagtgtgtgcggggcgagtgtgtgaggggcgtgtgtgtgcggggcgtgtgtgtgaggggcgagtgtgtgaggggcgagtgtgtgaggggcgagtgtgtgaggggcgtgtgtgtgaggggcgtgtgtgtgaggggcgtgtgtgtgaggggcgtgtgtgtgaggggcgtgtgtgtgcggggcgagtgtgtgcggggcgagtgtgtgcggggcgagtgtgtgcggggcgagtgtgtgcggggcgtgtgtgtgcggggcagggaggtgtgttgggatgtgtgcagtaatcaggctgccacactgagaaagggatgcaccgctagaccccacgagcaagggccctccacgtcctgtcagacctaaaaccaactttcggcccaagaccagcctcatttctccagaggatgttgtctgagaaaccgccttcctccctgctccgaccccttcccagctccccgcacggccctcgcctccttcctcccaggagctctggccgcagccccgggctctcccgtacccaccgttctcccagcccagcgtctgtccttcaggaaccccgccggccccacctccgcggtctccatcgcgggtcccagcaccgccctccctctcctggtagctgcagcagcacctgccccacgtcccccggccccccacagcctctgctagaggctcaccccgcgtcctcaccccgcgtcctcaccccgcgtcctcaccccgcgtcctcctcaccccgcgtcctcaccccgcgtcctcaccccgcgtcctcaccccgcgtcctcgcgccctcacacctggcttcatccaccccagccacagatgttttctgggcctcagtccccctcatcctctgctgctcctcccacggcccccccaccctggggcccactccctccccgccttcaggtcttggctgtggggacacttctcggtgaggccccgcttccaccccatccctcagggccctgccctgcgccagcccaggggccccgcaggatgttcaccaccgcccagcgcttcccttcctctttcgcgttctgtgtctgcactggagcggccggcccggcaggtaggctttggtctgtcttgttcaccgcggtggcccagtgcccacacgcgcccgcgccccgcgggaagtagctaagtactgttgggagtgagtgtggacacctagtaccccacccccgggatcggccacacctgtgtgcacagcgccccttccccacccagcagcctatccctgcctgatctgtctccctctgcctctcttcccctccaagccatgagcccctgtggcccccacaccaggccagacaccccaagggccaccttcaaatgtggtctgtgtgtgtggaatgaacaaaggagcaggctgagcccgtgccctgggggatcagtgcctgtagcaaccagaaccagcagagtcccagccccacccacctcacccggacagccccccgaggggtgcgccgaccggggtgcctccaggcctgccgtgactctcttgactgaagtgggcaacaacccctccatctccttggccacacccgggccccgggcactctcaagcccccatctctgcacccctcggtgtggtcacgctgctccccgggccatgcagacagccatttgcagggaccctctctggaaggagaagggctggcccagagccccaagacctgaacaccccagaccctcgcccacacgcagcagcctctggagagagctcctgcccagcccggggcatccctgttcaggtggccctctggcgtcttggtagcggctgcctggagctgcttta

SEQ ID NO: 41406 - DNA, 1114 bp, Artificial sequence
  DNA replication origin
accagacaaggagcccgggcaggtccagggctcagtgaggtgcggaggttagcgggccacagagaaggcagtgctggccccgctgcccagggcagaattggaccttcccagcctgactggtggtgacaagggaaggaccccagggagctgaggccggctggtttctgccctgggtgcccgcaggggaggggagctctgggaggcctgagggtccccagcagctggggctgggtccagagtgtgcagggccaggaacaccatacctgggccactgcctgccccaccccagggccagggaagcacttgggcaggtcccacccgctggctgctctaaaacccctcacatgggcctcacacctgccgtctgccactgctgatcacctcctttgtgggaaggtccctccttgtgagccccacaccggcacctgccgaagcctcctgaacagtgaaagaatggattgaacccaggaatgaaagaccagtgaaagagtgagtgagtgaaggaatgaaggagagagtagggtgaaggagaagccacgagggaatgaagaaatgaatgagcaagtgaatgaataagtgaatgagtgaacacacgaataagaacaaatgaaggtagaatagacaaacggaagaacaagtgaatggatacgtgagtgaatgaatgaattcgcgaagctccaattctgccttagaagagagcaggagcattctccaaagagcagaccgccccattcccctctccacgccacgcaggaccacacaggggtcagtccgggtccgccgcagggcgccatggctactgggagtccaaacgtctcccaaggttccctgtgaattgggccagtgaggcccatgctcagacccacaggaccgcagggccctttcttcgggccactgctcccggccaggtccaccggctcactgcctcttgcccaaggtgagcatcctgccttctctgtctgctaaactgtgcatccttcgagatctgttcacgtgccacctcctccaggaagccccagtgctgcacagacgagctcaggggcagggtttccagggcccagtccctgctgacctgctccaaggcctgtgagggccgtgcggtgcaacctcccag

SEQ ID NO: 41407 - DNA, 1094 bp, Artificial sequence
  DNA replication origin
gtgttgcatattgtgcgtgttggggttgagttttcttcttaaggctaaaaataggtgcatctccgcgtccccacagggattcctcccgccccacccagagttgtgcaagtcctggtctggcgctccggatctcatgccaagttttgacttcaccgccagcgatgggtgtaggaaaggtggcagaaaacgattatgaggtggaggctgcccactgcagctgcagaaggcttggcagggccaggcaggccacgcccaggcaggtggcatcgaccctgttctggaagaggcatcgtgcccactgaggcctgaagggcgaccgggtgaaggggctgtgtctctgcctgagggaactgccaaggtgaggctgggacagtcctggacttactggccctggctaggctggtgtggagactgagggggctagtgagggggagccagggagcactggaggatgagaagtctgcagggcttgttggggggtgtggggtgtggggtccagggtagacatggggaaatgatggtcagccacttcacggggtttggggaagacactgcagccccgagtgcctgcggggacagaacagtgtgggggtgcagcttggcatgaacatagggacccccaggagaggggcctgtggggtccagggggagcccagggcaagtggccccaggcaatctccagcagggaggggcagttcggggaaggcgcagctcttacgagatcatgataagtacagaggggatggggggttcaaggaggagctctctggctggctggggacaggaggggacccaggggccagtgaagggagagagggccctggggaggaaccgaggagaggtgagagacaccagctgaggggcccttgaaaactagcagagaggctgggggcttccaggcctcaaggctgagccagataatggtcacagggggaattcataaactgtaaagtgctgttggcacgtgggcaaggggctctttgaatcttcaccaggaagcgatccagctgccatgaaaatccccttctggagccccaacttcccagaagccaaccctgggctgcctccaggtctgcagagctcccaggacacag

SEQ ID NO: 41408 - DNA, 1035 bp, Artificial sequence
  DNA replication origin
ggtgtgaggatgggagggacggcccacagaggggcaggaggaagccagacagctgggggcacatgaaggcctcgggggctcgtcctgggtgggcagagcatgtgtccccaccggtggggccgcagctgcaggtacatcgcatggggattccacacacactcacttttccgattccagcttttattgggccgagcactcccctccaggggaggctgccgtcagaagggtggggacgcagcaccttggtcgccatcacccccatctgggccaccctgacccccgtctcacccaggcaaagggcctgttgctggcagactttggggtgggcaggggctcagtggggtgcccggcagccaagggacagtgcgagtgtctcggtggcatcaggggccccaagggtctgttgaagcaggaggagcctggttcgggagatgggggatgggatggggggtgggtatggggaatagggatgagggatgggatgggggatggggtcagggatgggatgggggatgggatgagggatgagatgagggatgggatgggatgggggatgagggatgggggccgcagccatccccctctccggtacccagtgtaggtcacaataatttaaagacactatagacatttcgacgctatataacaacataagttaaccaggttccttgcagaggctgccgggcctatggactcaggtgtgttctgggacttggggaaggtaaggggatggggccaggctgagggtggggcattcacggtggcccggagactcagagcgtccaggcatggttagaggcacatgggctggaccacagggccagagcccaggagggacccacttgccccaggctgagcccaggcccttggcttgtcggctgctcaagaacacattcctacgggcttccaagagaacacaccctaaatgggggccaggccgtgggcagtgggggtgcaccaggagccagctgcagaccatcctctctggcctcggacaagttcctccctctgtcactcatgctcctcagagacagg

SEQ ID NO: 41409 - DNA, 1141 bp, Artificial sequence
  DNA replication origin
tgggtattgatggatgagtcggagctcgttagacaaagaggacagcattccaggaggggttcaacatgagcgaaggtctggagaccactgagcatgaaggaaaaggctgggcccaaaggctcatcaggtgggtgccaggtgggccctaggctggcaggtgggtgctgggggtcccaaaggctcatcaggtgggtgccgggtgggccctagactggcaggtgggtgccgggcgggccctaggctggcaggtgggtgccgggggacccaaaggctcatcaggcaggtgctggggggcccaaaggctcatcaggcgggtgctgggtgggccctagagtggcaggtgggtgctgggtgggcccaaaggctcatcaggtgggcaccaggtgggccctagagtggcaggtgggtgctgggtgggcctgaaggctcatcaggtgggtgctgggtgggccctaggctggcaggtgggtgccgggcgggcccaaagtctcatcaggcaggtgctgggtgggtccaaaggctcatcaggtgggtgctgggtgggccctaggctggcaggtgggtgctgggtgggcccaaaggcacatcagatgagtgctgggtgggccctaggctggcaggtgggtgctgggtgggcccaaaggctcatcaggtgggtgccgggtgggccctaggctagcaggtgggtgccgggtgggcgcaaagtctcatcaggtgggtgctgtgtgggccctaggctggcaggtgggtgccgggtgggccctaggctggcagcctggagctggggtgttttctgctctgcatcagtgatgcccttggacaaagactggagagactggggagactggagagacttgagggaggtgggagagggaggctgatgtccctcccaggatggcagagggtgggaggagcccgggtgtcctgagaagagggcggggcagctttggggaattgcagggctaaggggcatctgggccaaggtcatgggccagagcctggactgcgtgtctgggcgacccccagagagtatattgggacctcctccctgcctcctgtccctctcccatcctgtccatcaccccagctccctgttcatctctgctgggatctgtcccctcctggaaaagcccttccctcc

SEQ ID NO: 41410 - DNA, 1034 bp, Artificial sequence
  DNA replication origin
gggtgggtgggtggatgtacagatggaaggataagtagatggacgaatcaaaggatggatcagtgggtgggtggatggatgagtggattcacgggtggatggaaggatggatgggtgagtgggtggatgggtgaatagatggatggataaaggaatgagtgacacaggctttgcctccaaggaactcacagacagcatgtgagcactagtctccaggtacaggcagatcacagtccatgccataaaggaggcctacgaaccttgagagtccagaggaaagtgtggttcacctacctggaggcatctgggaggactccctggaggaggaggagaaagaggagaaggcaaggctgagccctcgtgggaaccaccaccatcctcgagcctctgcagctgcttaggttctgagcagagcctttcccacacccccggggaagaaactctcactctccccattttaaagataaggagagtgaggctcagagtgagcagcagacctggatgagtggctctggaggcttaagctcgggtccctgcttgtggggaagtgtacacagcagagatgcgggcaagagcactccaggcagagggaatagcacaggtaaaggcatggggaaccaaggtcgtggtatgtcgtggtatgcggtatggggaaaccagggccaggatggccgggtagggtggtgttggtctctgggctacaggtgccattgcagggccctggggcagtgacactgaccaactcagggaccagggttgtgtctgatttagctctagggtgctgtgtgaaccccagggctgacttggtgtgggacttggaggtgtctggtgactcacaagtgatggaaaggcagaagggaaatggagacaggaggtgggaaaacaaggcggctggtgatggtccccacgggtgggcaggagacaaagaggacagccacaggaaagggctctgatgatgccgccagtggccaattctcctaccagccttgtctcggatggccggtggggccctggctgacccacgctgctgctga

SEQ ID NO: 41411 - DNA, 1488 bp, Artificial sequence
  DNA replication origin
tcctgcatggggcgggacggagtgtggtgggtggcaatggaggaaattcaggcagggacacaccggggaagaagtcagagcaagccgggccccgcccactggagatgagggccccagatactgggctgggaggagcagctgcacggcggcaagatggcctgagatagggtggccagccaagtggaacgcccagccggctccggctccgaggcctgggggctgcacccagggcagcagagcctagggggcttctcaggtgtgggacagacttgccgttccaggcaaagtggagctgaagaatccctcgggcccagggaccatagctgaggccactggtcactcactgcccttttctgtgccaggtgctaggctgggcacggggcagagaggaatcagggccctggctgtgggaactgggtccacatgaggggtgcaggggtcacacccaggacggtgagggcttggttgtgtaggagagtgtcagagtgaagctttgatggccacagggcttgggaagcaagtagggcctggcacagaagagatcttgaacaccaggccaggggtttgactttctcttgtagatgtggaggttatcatgcaggtggttattaagttattgttggatggatggatagatgtatgagtggatggatggaaggatgagtgggtggatgggaggatagatggatgggtagatagatgagtggatgagtgggtagatggttggatggatggatggaaggatgagtgggtggatgtatagaagagtgcatgggaagatagatggatgggtagatggttgagtggatcggtgggtggatggaaggataagtagacagatgaatgaaaggatggatcggtgggtggatgggtgagtggattcacgggtggatggaaagatgggtggatggaagtatggagggaaggatgggcgggtgggtggaaggatggatgagtggatgcatggatggaaggatgggtgtatgggcaggtggatggatgcatgaatggatggaagtatggatgaatgaggggatgggtggaaggatggttggaaggatgagtgggtggaaagatggacggaagtattggtgggtgggtgggtgggtggatgtacagatggaaggataagtagatggacgaatcaaaggatggatcagtgggtgggtggatggatgagtggattcacgggtggatggaaggatggatgggtgagtgggtggatgggtgaatagatggatggataaaggaatgagtgacacaggctttgcctccaaggaactcacagacagcatgtgagcactagtctccaggtacaggcagatcacagtccatgccataaaggaggcctacgaaccttgagagtccagaggaaagtgtggttcacctacctggaggcatctgggaggactccctggaggaggaggagaaagaggagaaggcaaggctgagccctcgtgggaaccaccaccatcctcgagcctctgc

SEQ ID NO: 41412 - DNA, 1441 bp, Artificial sequence
  DNA replication origin
cctgggctgagcactgtccctgttcttcctgttgctgagatgggcagggaggttcccactcactggagtttggctcttggtcctccagctggcatggttgagcctgctcggtgtccacatggaccaggcgctggggacatagaaatgacatggactcagccaggggcaggttgagagggacccaagagtccagagccaggatggaaggatgcacagggcctggcctggagatgggggaaacaaagaggaaatgagagctgaacctgcccatctcgggtcttcggacccatatggaagtccccgctggtagggctcaccagggagagggtgtccggatctgggtcaaatcaggaactgaagggtcaggtaccaagtgctcccttctggcggggggggtctgggaaggctgcctggacagggaggcctcagacccgggccttggaaggtccttgggatttgggtatgaagtgggagggaatgccaccaaaaagaccacataatccccaggggatgtgagcagcgcctggaaggactgagtcactgttctgggcagaggatggggagagagggctgaggcagccagtaggcattgacctgggaccctcccctcccagctcagccgtgggcttggctctaccggcagaggggagcagtgaaggtgccagcgagggacctggccagactgcccttggagggaaccagctggtggctggggagatgaagcagcagggaggactgctgcccaagtccaggcagttctggggcccctgggtcaggcaggggtattaggaggaagtgaggaaaatgggccgaggatctggagacggactgaaggcgggtggaccaagagggagatggcaacaaagagcttctgagctgtgtgacttctgcctgggttcctggctgggggtggggacgaggccccccatgctccccgtggccccaggttccatcagccatgcatgcctggtccccacgggggtcagtgcaaatgcccgttcatgaggaggggctcctgggaggctggcagaggggaggagcagaggcatggacacccatccccctccacaggtccccaccagtcactctcagggctggagaaactgggcctctcctgcccagtcttgggaacagggagagaagctgtcggcagcactgcatgctggagggcagtcgcagggtgcactggggcctgctgtgtaccaggcactcacagggtgacctggggcctgctgtataccaggtgctgcccctaccatagccctgagagatggctcccatcagccccgctttggtgagtcagaggcacagagggggcgagcgatgagcccagggtcacacaaccagccaacagcaggtggatcgaggcccggcaccctgtcccctgagcccacctggcccagggcctggggtctcaccttctgcacctgtctgtccccgc

SEQ ID NO: 41413 - DNA, 885 bp, Artificial sequence
  DNA replication origin
accccagcctgccctttgaccctagccagggctcagtcccagggggacaactcactgcctgagctagtctgggatctgcatccctgacacacacagagctcaggctggggacatcggggtggaggcagagaccaaggcacaggcagagaagcctccaggccacggcttggccccaatccctgcttgtgcagttgaaggatcagaagcccagagccctcgcctgcctggccctgctgcaatcctgacctggaccagccggggccaaggtgcactctggccagggagggctggacaggctgcctcacaccctgcacctaattctgcggcttacacgaaggtgatagcagcacgcacctcatggggtcctacgtggatgagttgaggcagtggagggctcaggacgggtaggaacataaaagtgctggatgcgtctgggccgcttttattaatattacccgtctccaagcaggcctggaccctgggcctcatggtcctggcctgggtgcagcctgagtgggtgctgtgtgtgtgtgtgtgcgtgtgtgcatgtatgtgcgtgtgtgtgcgcgcgtgtgtgcagtgtgcacgtgtgtgcatgtgtgtaggcgtgtatgtgtgcagtgtgcatgtgtgtgtgcgtgtgtgcagtgtgcatgtgtgtaggcgtgtatgtgtgcagtgtgcatgtgtatgtgtgtgcgcgtgtgtgcagcatgcatgtgtgtgcagtgtgcacatgtgtgcacgtgtgtgcgtgtgtttgtgtgtgtgcatgtgtgtgtgtgccaggtgtactgctgtatgtctctccacacatctctgtccttccccccctgtttctccctctccctctgggtcccttggtccctctctgtccctctgtct

SEQ ID NO: 41414 - DNA, 1996 bp, Artificial sequence
  DNA replication origin
gctactgattaaacctcagagcctgctctccctccccttctcttcccttccccctccccctcctttacacgcgggccacgtccggggtcgcctgacgcggccagagggggcagccgctgccttcccgctccctgcgccaccccctccccccatgcggttgcagtcctaatacatcgcctcgcccccacccccatttaataaagacgcagccaatttctcctcttgctcctaggaaattactatcctaccagttttccttctataaatagtcgcgcatcttgaaacaaaagttcgcaaccgcagccagatgctgcgaggcccgcggtttcccgggctgtgggacataattacaaggtccgggcacagagagcgctccaggcccggcgggcagccccggctgcggaggcatcgcctgaggggggcggggcagcagggcgcatgcgggtggggaccgcctgagcagtggggacccaggctgataaagtgccagggtccctgggtcctgcttctggtgtcctttccaggaactggatcaaccaggggactttggaatttcagcgtctagcggttggaggccaggaagcctccccctccccagaatcctggcgtttcagccttaggccttgctagagaattggcagctccggtgcttgggaaatcagttttggagccggctggctgaggttcggtgttcatagagaggtgtccggggtgggagaccaggagtcctgcggaggtggaggcaagggaagtgggggggttgggggttggggtaagggtcggagagagggaggtgcgcaggggccccagaagcctggtgggagttgatgccaaggcagcagtgaggggcctctggggcaaggtggtgcccagtgtacctctgcagaccccgggtttacctcagggctggcccctcatccgggcctgcagtgactacccccgccaggcttgctcctggagtgtgcactgcccagctgtgttggcagaaattctcctaaggaaacagtttttccaggcatccctgggccagtgctggggtctggcctgggtcgtcggggacaggaaggcagactgcatccctgacttgccctcagtagctcctgccccacagggaggaagacgctgacgccagccttccccaagcggagaggaacccagacacgttcccggagtgaggggggtgggtctcagatttcccttgcccggtttgtttggtgggcgcaaggctgaccatagatgggagtagggcctgcgcgattcggtttgaatgaaagcatgcaaagtgagaagaccttggtttcgatgtctctgacccgatggctgcacttgggggaggcagccagcagcaagtgcttggagagctgtgagaggtgggggtgagtgtcagccgaccctcagcactgcaggcgcactcgatggcattggcctttggatctgaggatgcctgggctaggagggtcgctgggtggaggcttcattctgctccagagaactttcaggagctttccagatcccattgctgggatcccagacgctggctgacagctgatcctccccctttcatctggactgctcctctagctccctgtcctgggctgtggtcggtgcacaccgaatcccagacgcatgcctgggcccctgccactgatcaggttggacgggtgtgttggcctggaagcgccctgcgcccctgctacatgctgacttgcagccgtgctaggcggctctggccagccctcgccttctctgtgcagagctctgttgtcagtgcaggagctcccagggccagcgggggtcagtaagggcccaagggagggcaggtaggggactgcaggccaagaggaaggcttgtggtgctgggtcagctgcaatgggggcctggctgaggccttgaccaggaccaggctgcgcttctgtcccaggcaggtctcttccgctctcagtcttcctctcccagatgtgggggttggctctgacgacccccccaggtcttccg

SEQ ID NO: 41415 - DNA, 1736 bp, Artificial sequence
  DNA replication origin
ctccacctcggcagcttaggctggcgaggcgacctaaagtcccccggctcccgcgcgcgacggtcacccggtgccccgcccaggggcctcgctgccgcgttccctgcccgcccggttccagcgctggaggcccggggggagcccacccgcccaccccgcacgccgcccgcggcactcacaagtagctgccgctggacaggaggagaaagatctgcgggcaatagacggagacgagcgcgctgcgcggcgacagtagaagcatggtgggccggcgtgcctggcggggctgaacaggctccgcgggccgggcgcctgggccagctgaggccggggtccccgcggagctccccgatgcagggcggcggcgctgggcgctaggggccgggtctcgtgggcccgggcgcagttgtcgcccgtgccccgccgctagggccgcgcatggcgctgggtctggggcagcggcgggagctggggctggagtgcggggcggggacccggccgggggcagcgggcgcgccttggctgcggtctggacctccgtccgtctgtcggtgcgaaccggctctgtcgctcgctctggctcacttctccaagtctcccgaggcgcgcagctgccattggacgggccgcccctacatccgcctcctcccccggcgggtttttttaaaggggaggctgaccggagcgtgcggtgggagccgcctccagggcttgcccaagttgccttggctgggacacccgtacccccacctttagggagccacacagctctggcctggctccagaaggtgcacgtgggggcggctccccgggggaactgcgcggaggcttgtgctcctcttggggggctgtgctcggcaacgtatgcgcgtgtgtgcatgcatgtgcctacatgtgcctgtgtgtgcctgcgggagcgtgggcagtctgtgaggacaggtgtgtgtgcacagatgcattgagtgtcctgagcctctgcccccgtgtgccctgggtttagggaggctggctgtgggtcgcacacaggcactgccatggctaaccaggcccagccttgtgctggtgctgagcttgcacgaccctgcctgggcacctctttggagaggccgccagtgggaaggcatcgccagcaggtgctgctctcctcacacagaggcttccccactctggcttccccatcctgcttcttttgctctcctttgagcggttggcggggatgggtttgtggagaagtagacctacaaagacgttctccctcctcgagttccttttattttttgtttaagcccagaaacataggtctagtgtcccacctcctgtcgttagccaattctggttccacatgaccatccctttacatctgaatcacagcacaaagcaggaagatggcaagacaagggaaggctgggcggtctggcccgtcgtcctgaggaagaggattttctaacttctagacctggtgtggaggctcatcatccaggaggaagcagccacttcctccaccttcatcccccctagtccagggctctcgggcccctctgcttctggccccaaaggcagggacaggctttcggcagggctggtcctagaactgcagcgactccagttccagtgagcagagagtgtccagactccagacgggctcctctgagttctgctttggcctcctccaaggctggagctgaaggccgctcagtccaaaaagggccctgggtgagaaactgactccctgaagc

SEQ ID NO: 41416 - DNA, 1389 bp, Artificial sequence
  DNA replication origin
ctctatccatcacccagacgtgttgaaattaccttgacaactcgtccggctggctcgggatgggccgtggggccggccgggccgcctcgggctcggtccggggcccgtgccccgcccgcccggggccctgggccctgggcccggccccctctcgccgcgctccccctggcgcggcccggcgggcgggcgcccggcgagccgcgctagctgctctctgcggtagctgctccgagtcgtatttccacattcctgaacccagccgagtccttacctgttgagccgcgatctcctttagacagaatctgtctcggcttcgctcgaagtgggggtggagaaacggcgtgacggagagggggtgcggtgcacctcgcctggggcgcccaccgcccgctgctggccccgcgctcctcgcacctgcggggacccgggccccgccgcgccctgcgcgcctactgtgcgccgccggctgccccgaggcgagccccgtccaggccacaggcaaggcggtgaacagacccgcgggaggggcaggtgcaggtaccactggtgggagacgcggcttcccaggcggagaggtggaagcaggcgctgggaatcgtctctccatcaccctccatcccatgtctgccccgccattttacaggtggagaaactgaggcccaaggcctgcagagacaaagccagtggcttcagaggcaggactggaagcccccgtcctagcctgagccctgcaggtctgggcgggcgtgtctgcggctgccggtagccccgtttatcataggtctgtgggtaggctgtgtccctgggtgtttgtttatggaggtgaggggtgcggggcattgagcctgctgggcggggggtggagtgggcaggctgctcttttcctgcatcttcagcagtcctgcagtgactcccgctgggcccctcaaagtgatggcaacccttaatgaggctttgtccctgcagcctgattctcagcgctgaggccttccccctcctggcacccctagagtagttaggtgcttttactctcccggattcaaggattaggaaactgggcacaggacctaagtcactgtcctcagaattcagtgacagagctggggctgcagttggctctgaccccccactgtgggctgctgttcctagcgtccattcttctgcctcagtcatcggaaagcagcccttcctcccacgagtgagtgggtgggaagacctctaggaacccccatagacagcagaaggagctgacggtccaccctagcccggctcctggggctgcttccagggcttgaggtctgtatgcccttcccaagcctcctggtcccttctgtaaacagggattgcagctctggccatcctgaacaggatggtggccagtgtctgaga

SEQ ID NO: 41417 - DNA, 1671 bp, Artificial sequence
  DNA replication origin
aggctgcgaacgaacccgggcatcccgcccaccgaccgtaaccccctcctctcccggatgaaccccgcccggccggtcccagagccgaccccacctcgggccggaagaagatcgggtggaggttggcgcggctgggtcggggctcaagcgcccagacccgccgcagggaggccgccggtgcagtccttgtggttccagctccgccacagcccgacagctcctggcgatccgcccaattaaagggcgccgagactgaggctggcggcagtggggacagggtcccgggctccgggaggggatggggttcctgcctcatggccccggggcctggcgtggctccgccgcccgccacctccagcccctgcgcgcctgagtcccagctccctcagtgccgccgccgggtggcagcatccgcccgcgcccgagctgcgcccgcgcccgcgcccgccactggctgcgagggccaggccagaccctcctgctccccgcgtccagcttccaggccgtgaaatgggggtggctgccctagagtggggctctggggagcaggggccacccaggggtggagctgctattgccatttcactttttcctgtgtctcggttcccctgtgtgtgctgatccccaatgtcccttttatctgggaaccctccccatcggcgcacggggctcggcggcaccgggggcctcagatcgaggggcccaggaatgacctgcaccggggtcgtggcaaaggttcagggatttggagggattaagaagggatcaggggcgggggtctggcgggactgcggcgggcaggggaggcaggctctgagctcgaggtccctacccaggcttggccaggtgggacagggcagccggatgcatacacagactctcgccttggtggccgcagtccctgctggtcctcggggactgagctcttccctgtcccatccgcctgcagcaccgggagccatccagggctgagaaagcacagagcaggcagggagcctggcctggacagcgatctggctgtgggtctgggtcttgcccactgaggacagaccaggcttggcgcagcagggtctgcgggactctggcgctcgttcgccctgaatcaggctagccgaatcaggctagatgggctttgggtgtgcgcggcaccgagtcaatctgacttcgggctctcctcagggaaactgaacacagctgggcgctgcagaggaagccacgaaaaccatggcgcaggggcagggactctgggggccaggagcctcccccagtgccggggaagcccctcaacctccttccacaggcctccatcacggcgcttggccaatgggttctgcaggaggtcacgcatgccatctccctgcatgtggccaggttagcccgtctgtcatctttcaggtcccaaagctgggctagcgcaggtggcagcagtgctgggacctggggttgtgggaatctcccattgaggtttgctggagtggcagcgatgcctggactaaaaggatggccccagagtaccccatgcggataatttttgggggtcagggaagtgcactcggagaggcaatgggagtgggtggtctctccctcccccaccggaaactggaagccaagtggcaccgcgacctgtaccagtagtttcccgcccccacctgtacccccgcccctaccccc

SEQ ID NO: 41418 - DNA, 1686 bp, Artificial sequence
  DNA replication origin
cccacacaacacacaacacacaaacacacaccacacacacaccacacaaacaacacacgccacacaaacaacacacgccacacacaccacacacacaccacacacaaaacacacaacacagaaacacatagcacacacaggtaagaagtagctgagttccatggagcccagaggtgaccatctggggccccagggtgtcctgactttggagacatcaggccttgacagttctccatgctgactgggaaccagagaggcttccactcccagcagaagcataggctccacctccgcccactcaatcaccccctacccacaacaggcgtggggacccttgggcctggatcccggccaccctcacattcgagatgatcagagccatgatcccatatggggggacagtggacctgcctgtggtcatgcagacctctgaggcctgggaccagcctttggagtcccagctgggtggaggctcagacacagctgccctgttgccctggggactcctgctgcctgtgtgtggtgtgagtgtggtgtggtatgggtgcatggtgtatgaatgtggcgtgtatgcgttgtgttgtgtgtgtggtgttcatgtgttgtgtgtgtggtgtgttgtgtgtgtatttgtgttgtgtatgtgtggtgtgtctgtatggtgtgtgtgtgctgtgtatgtgttgtgggtggtgtgctatgtgtgtgttgtgtgtgtggtgtggtgtgttcatgtgtgttatgtctaatgtgtgtgtgatgtgttatgtgcgttgtgtgagttgtgttttttgtgtttgtgatgtgtgtggtgtgtgttgtgtgtgatgtgtttgtgcatagtgtgttgtgtgtattgcattgcatgtgtctgttgtgttgtgtttgcgtgtggtgtatgtgtgttgtgttgtgtgttgggtgtgtattgtgttttgtatgtgttgtgtgtgtgttatatggtggctgtgtgttgtgggttgtgtttgtgtgttgtgtgtgctgtgtttgtgtgctgtgtgtgtagtgtgtgttgtgttgtgtgttgcgtttgtgtggtgtgtcgagtgttgtgtgtttgtgtgatttctggtatgtgctgtgtgtatggtatgtgtggtgtttgtgtggtgtgtgttgtgtggtgtatgtttctgggttgtgtgtgttatgtgtgttgcatgtgttgtgtgatttgtgtattgtgtgtttgtggtgtgtgtgtgttgtgtgtggtgtgtgttgtgtgtgttgtgtgtggtgtgtttttgtgtggagtgtgttgtgtgtggtgtatgtgtgttttgtgtcgtgtgttttgtgtgtgtgtggtgtgcgtggtctgtgttgtgtttgtgtgtggtgtatgtgtgtgtgttgtgtgtggtgtgtggtgtgtttttgagtggagtgtgttgtgtgtggtgtatgtgtgttttgtgtcgtgtgtgcgtgtgtgtgtcgtgtgtgtgtgtgtggtgtgtgttgtgtttgtgtgtggtgtatgtgtgttgtttgagtgtggtgtatgtgtgctgtgtgcgcgtgggctgtgagctcctcccaccccacatttccccaaccttggagccattcaaagaccttcggagaccacgacggagaaaccggaccccgtggtgggagcgactcgctgggttgagagcagcccggaccccgctcagcccc

SEQ ID NO: 41419 - DNA, 870 bp, Artificial sequence
  DNA replication origin
catacacaacacaaatacacacacaacacaccacacacacaacacatgaacaccacacacacaacacaacgcatacacgccacattcatacaccatgcacccataccacaccacactcacaccacacacaggcagcaggagtccccagggcaacagggcagctgtgtctgagcctccacccagctgggactccaaaggctggtcccaggcctcagaggtctgcatgaccacaggcaggtccactgtccccccatatgggatcatggctctgatcatctcgaatgtgagggtggccgggatccaggcccaagggtccccacgcctgttgtgggtagggggtgattgagtgggcggaggtggagcctatgcttctgctgggagtggaagcctctctggttcccagtcagcatggagaactgtcaaggcctgatgtctccaaagtcaggacaccctggggccccagatggtcacctctgggctccatggaactcagctacttcttacctgtgtgtgctatgtgtttctgtgttgtgtgttttgtgtgtggtgtgtgtgtggtgtgtgtggcgtgtgttgtttgtgtggcgtgtgttgtttgtgtggtgtgtgtgtggtgtgtgtttgtgtgttgtgtgttgtgtgggtgtgtgtgcatatgtggtgtgtgtgtttgtgtgtgttgtgtgttgtgtttgtgtgttgtgtttgtgtgttgtaagtttgtgtgctgtgtatgtgttgtgtgtggtgtgtatggtgtgtgtgcatgtgtcatgtgtgcatgtgtgtggtgtgtgtgtgtgtggtgtgtgttgtgtgtggcgtatgtttgtgtgtgaccgcaggtagaactgtcaatgtccccagcct

SEQ ID NO: 41420 - DNA, 1479 bp, Artificial sequence
  DNA replication origin
tggggcacattgcctagatcaccctcctccaaacttctcaccaggaaactcctcttcagcctactgaggtggctggcacctcctccagggagccctcctggttgttcaaggtaaccttagatgctcccttcccttgcctccacacaccttctgccttcccatctcagcctggacccactgcacagtgtctgtctctgtctcttcaggagcagcttctgggaaggtcttgggccagtgctgttgcactctaccttcccctaacacctcgagtgcagagcggtgcctgaggtacttgtgggagacacacaaacatggccgcggctaccatgggctacccagtgatgaccattgagagggcttctttggcaaatgttgttgttcttgttagcgatgatgatggtggtggtggtagtgaaggtgatggtggaggtgatggtaatgatggtggtgatggtaatgatggtggtgatggtgacgatggtggtggtggtggaggtgatggtggaggtgatggtaatgatggtggtgatggaatgatggtggtggtggaggtgatggaatgatggtggtgatggtgatgctggtggtgatggtggaggtgatggtaatgatggcggtgatggtgatgatggtgatgatggtggtgatggtggaggtgatgataatgatggtggtgatggtgatgatggtggtggtggtggtggaggtgatggaatgatggtggtggtggtggaggtgatggtggaggtgattttaatgatggtgataatggtgatggtggtggagatggtggttatgattgtgatggaggtggtgatgaaagtaagggggttaatggtggaagaagtggtagtggtaggggtgggggtgatggcaatgatggtggtgatggtggtgatggtgatggtgatgatgatgatgatggtggtggtaatggtggtgatggtggaggtgatagtaatgatggtggaggtgatggcgatgattgtggtgatggtggtggtggtggaggtgatagtaatgatggtggaggtgatggaggttatggttatggggtggtggtggagatgatgggggaggtgatgacaatgatggtgatggtgctggaggtgatggtgatggtggtggtggtggtggaagtggtggttatgatagtgatggaggtggtgatggaggtggggggttgacggtggaggaagtggtagtggtggtggtggaggtgataataatgatggtgatggtgatggaggttatggttatggtgatggtggtgatggtggtggtggtgatggtggaagtgataataatgatggtgatggtgctggaggtgatagtgatggtgatggtggtgatgatggaggtagggggtttgacggtggaggaagtggtagtggtggtgtttttgttggtagtagtgctgttttagagaattaaaaagaggaagaagatctcttctccacccactgggtccagtttgga

SEQ ID NO: 41421 - DNA, 753 bp, Artificial sequence
  DNA replication origin
cctctgtttctccgcgtgtgcccgggggcggcgtgttctcagggcaggggcctctaaggatcagagtgaggctgcaggcccaggctgaggcctgcaccacctcggccgggagatgagtaaatgtctgggtccccctggccactccagagtgaggccgccaagcctccggcctgaagtccggctcctgttctcagcctgccaggcccttgtgcggtggcgtcgggcaggcagggcagggaggccacggcagccatcttcccggggagctggggcctggccagcagcgtttcccagtggcctcctcctgtgctccgagctgcattacctcatcgggaagccattccagaaaggagctgcggagcccctgggagtgggagtggggagagctgcgtcagcgccctcctggcagcctcggtgccagacgagggcaggcgtcacgcctccgggtgtctgcctgccgagcgactgctgggagagcagctggcttttgtcagcgtttcggggtgaccgggctgggctgcagcaggcaggtggcgtggcacggcccatggccggccagctaccaggtgggcagaggatctatttcaagagccggaaccaaatggccaggcatgaggggaagccaggtgcaaactcagtggcagagaccaagccctgaccccgcagtcccaggcctcagtttcccctcaggccagccctcctcccagcacctgtcctctgcttcctatagccacaaagagcaccagacacgag

SEQ ID NO: 41422 - DNA, 653 bp, Artificial sequence
  DNA replication origin
ctgggcgacaagagcgaaactgtctcaataaataaataaataaataaataaaaatacaagaaaggaaaaagaaatattggaggggacttggggtccagggctgggcagggctgaaggcgtaaacatgtgagagtctggagccggatgaggtcacgagaagacaggcgggacagggacagcgccgtgggtgccactcgagacacagggtgggcggggccggccaggcctggagctggctgccaccggctgcggcaggagggagctggctgccgccatttcagtggagggtggcgacaaccccagtctggagggggctgagacctgtgctgggggccgcccggggtagatcctgtcttgaaggtctggcggtgggagggagggaaggtggccgcgggtggaggtgggcgtggcgccaagggcggtgttccctgaagagcgagagtcggagcccgccggctgccgcagggaagggagcggcggaagatgcggagatagagggaggttcccaggaaggcagagggaacgggcaggcccggaggagcaggcgggaatgtggaggggggttggaaccgcagcacagagggtttgggcgcacaaaggtgaaggatgtcccccgggaagccagagggcacggcagcaacttgcccgggtcc

SEQ ID NO: 41423 - DNA, 2354 bp, Artificial sequence
  DNA replication origin
ctggtaggagggggctcccggcagggaacgtgaggggctcccaggccgggccgggccgcccgcccagacgcgctgccaggctgattagcatgggcgaggggcgctggcgcggggacgccgccggccgagctggcacgtccctcgcgggcccagctggccggggcgagacacaaagcacctcagacggtggcggcgctcggccattcacgcgcaggggcgtcccgggcgcgggcggcgaggaattcccgccgccggggcgaagaccagccccgcccggcgctcctgaccttgaacctttgtgactggagcgcatgcaaatcgcggcggggccgcgccaagccccgagggcgctgcgccgcccggcgtgtccggggaacaatgcgccactgtccccacgcggcgccgcgggctgggaactgcgcagaatgtcaatgcgggcccccggcgcggcggggcgcggcccacgggcgcgtgcgtgtgcgggtgcgtgcgggtgtgtccgggtgtgcgcatgtgtccccgtgttggcccgggcttagctggaccctgggcctggtcccggaccctgcggccctggcgaccctcctggagagagagtccctttgcgaccaggtccaaaagatcttaggcccttggaggtgactgcttctccctccttcctgcccttcttatttttcttttattaggttgatttttaaagatcctgtaaatgatcagtaaggaaataaaggctgcccccaatgactgtcccaacccagggagagctctgctgcgtggagaggaactccctcgcctcctctctccccttggggcaaattcttcctcacagcccagggtgaactttcaattcagcgtcttgactttttcctggaaaataacatttgtcatcaacctcttaccaatgtcccttttaaaaactgcatggtactgttctgtgctgtgccacagtccctgccactgggtttcccggtcacagggacaacagcttgtcaacagggtcttccggggccgtaagtggatgtgcaaagagaaaggacagggacctcaccaagagctgctaaactacaatgtgctcaactgagcccagaaaggcgccaggcccacatgtgtgtcctgcggcacccctccccacctgctcagacatggtttaaacagacaagacagaaaaagcacacgtgccaggtaggcagctgcagctgatttttatgtacatgtgcctgaccaggtgattccagcaacttctgtaaatttggattgggcacatttgtgataggtgacagagccacaacccagagtctgatgtccccgccccgcagctgactggcgacccatcacttgtcctccagagactcggtatcctcacctgattaggggtctgtgagcactgcctgcccatcttgcagaggcagtggctgtgagggtccctgcgcacacgcacacctgtgtgggtggggagcgtgcacacaggttcatttctgccaaggtgctggggagctcagctctgtcatggcaagggctcaggacaggaggaagaggttcagagaaggcgatcttgggcaagatgctccctgtctgggcctcagtttcaccagagctaaaagaggaggttgtagagacgctctctaagcatccttccagcttctccagatatacatgaataagatcactctttcaaggatggggatggtgtacagggctggatccttcccagccagggtgcctgggattattggctttcagcagccgactcacggaggcctcctttgggctaggcactgggacagacccctgcctccccaaaggcatgagaccctggtctgccatttgggagctcagagcctggctagaggcaggagaggtgaggagggaagataaggacacagatggtgaatgtggtgagaaaggaagcatgagggggtgggcatggtgcatgggagaacagaggaggcgatggaggagtccaggaagccttcctgggaggcggtcgcctgagctgagcctcaaggagtatgagcagcttctcaacaggagaagagagtggagagcactttgggcagaaagttgcaggcagagggagcattccaggcagagggagcattccaggcagaaggagcactgcagggagagggtgcactcaggaagcaggagcactcagagagagagaacactccagggagagagagcaagagggtgcagggtgcactgcagggagagggagcactatggggagaaggtgcactcagggagcaggagcactcagagagagagaacaatccagggagagggagcaagagggtgcagcgtgcactgcagggagagggagcactcagggagagggagcacccaagggagag

SEQ ID NO: 41424 - DNA, 1339 bp, Artificial sequence
  DNA replication origin
cggacacacccgcacgcacccgcacacgcacgcgcccgtgggccgcgccccgccgcgccgggggcccgcattgacattctgcgcagttcccagcccgcggcgccgcgtggggacagtggcgcattgttccccggacacgccgggcggcgcagcgccctcggggcttggcgcggccccgccgcgatttgcatgcgctccagtcacaaaggttcaaggtcaggagcgccgggcggggctggtcttcgccccggcggcgggaattcctcgccgcccgcgcccgggacgcccctgcgcgtgaatggccgagcgccgccaccgtctgaggtgctttgtgtctcgccccggccagctgggcccgcgagggacgtgccagctcggccggcggcgtccccgcgccagcgcccctcgcccatgctaatcagcctggcagcgcgtctgggcgggcggcccggcccggcctgggagcccctcacgttccctgccgggagccccctcctaccaggccccctcccccagcttcccctgccgccaggagaccccacttactctgccaggagctccccacgaccctagctgccaggtgcctccacccgattccacctccactcctcctgccagaagaccccctctccggctgccgtgggtgccttctgcccagccagaagggcgggtgcaccttgcaggaatggctggctggggagcctggggcgtaggacccttctgggactctgacaggactctctgtggggcctggggcatcttctctcagcctcgatttcccctgaacaatgaggcaggttgcccttcatgatctccagaggcacttccagagctggggtctcccagcaggtgcagggaaggtagtggtaaagatggcattcccccagctcccgcctgctctgccattatccagcctgctggcctggggacagtcaccctgagccctgagtctgggtcaccgtctccagagatgccttgaggactaacggagctgagcattccacgttgggaccagccctcagagtgttctgcccttatcatcatccttcccacagtgtagccctgctcaggcaatattatcatccacccgctagactgggagcttcgagtaggcaaggacttctgaattcccacagcacagtggcacccaggacgcactgaatgacctcacagttggataggtgaaggcccaccagtgtgggtcactctgcacgatggtggatggggacaggtcaccgcatttggcatttccagtacttggaaagaggctcagagcctttcttgggaggtgggagcaggcttctcctgggagctccccactgggtgtgtgggctccatt

SEQ ID NO: 41425 - DNA, 1196 bp, Artificial sequence
  DNA replication origin
aacccaggaggtggagattgcagtgagctgagattgctccattgcactccagcttgtgcaacaagagcaaaactctgtctcaaaaaaaacaaaaacaaacaaacaaacaaaaaaacagtccttgctgtcttgtaaccagaggcaggaagagcctatttctcaggagtggcttgtcatggccaagggatccatcctggaaagctccctggaggaggcggtagctgagtggagcctttcacatggtaagtgctcactagtgtcagctgctgttgttattcccagtaggaataagaggggagaagctctgatcaccatgcaggtgggaagagcatccccttcagagggaaaagcagagaaaaggcaaggagttctctcccagccaagtggggggtggggtggggagttggtggtcagtgatggggaagtggggggtggtggcgaggctggaaagagaagcagggggccaaccctgctttggttcttaaaacaaaacggttttttgtttttgttttttttttttaaggtggggataggacctgtgtggatttgggaaacgactctggcagcggcccagccccgggggaggaggctgcagttagggaggccactatttgggtgaggggaagtgtggccatggggaggggaggagcccaggctgaattacaggggaggttttaggaagaacagccaggacttgtacatctggtggccccagggccctggcttgtgctcaggattgacagatgtggaacgggtaccccaggtcagccttggtatggggctgaggccctgtgtgactgggctgagtggggtggccactggaatatcctgcaaatcacccctgtgctgccgtgacggagggacctgatggtgggaggctgcagggggatcctagtcgtggccgcttcttacgggggtcctgcttcccagcaaagatgcatcaaggaatatggagcctgcaattgtggggctgccctccacaccagagtgaagagccagaggggcctcgtggaaatgtgcagggcatgtcacacccacacctgagaaaagggcccagtcctgacagcaccagcaaccaagcagttaaaagtattccgtggcttccagggtcacagagtggagccttccccagagtccagagcctggatccagggtcattgtccctgcagagctcagagcccagattctccctgccc

SEQ ID NO: 41426 - DNA, 1854 bp, Artificial sequence
  DNA replication origin
cttttacagatgagaaacgtgaggcccagagaggttaagaaacttgcccaaggacacacagcagtgggtactcagtccaagaatgcccattctttgcagacacaggcttctcatctgagttagaggtctctgcccatttgtggctagcaggctccaaagaacacacgttcacttggagctagctcgggtagaaccctaaacaattctagtgtgcttggaggacacaaatggtgcagacccccacttcctgttcaggtctctgaggggccctccctcctcagaccacaccccactgctgagcagacctctagcacttgtcctggcccccattcaaaaaggcaaatgtcagctgggcgcggtggctcatgcctgtaatcccagcactttgggaggccgaggcaggcggatcacgaggtcaggagatcgagaccatcctggctaacatggtgaaacccgtctctactaaaaatacaaaaaaaaaaaaaaaaaaaaattagccgggcttggtggcgggtgcctgtagtcccaggtactccggaggcttaggcaggagaatggcgtgaacccgggaggcggagcttgcagtgaactgagatcgcgccactgcactccagcctgggcgacagagcgagactctcaaaaaaaaaaaaaaaaaaaaaaaaagaaggcgagtgtccggtccctgagttgagcaaagaagaatcacctcctctcagccctcggtccacagtctccatggtcttgaagtcagcgggcctaaggaggcctctgtccacgggagatgaaaccaggaaaggaagggcccattctctcagaaaacatgtgttttctgtttacagagggacctgtccagttcccatgctttgttctttaatatggagccaaaaaaaaaaaaaaaaaatcaaatgcgcagcttccgctctgaggtacacttgaaggctagaaagtccggattgctgcgggctcattgtgctggggtgtcctatctgctgctgacgtccagcatataccaacctggaaagccaaggaaaaagccagactgccccctccgcattacaagggaggacggggtacagaggggagaggcagcctcggcaccctgggggctggcttgacactgtgtgagcacactgggggtgttctgttgtgcacttgtagccctggcaccacaggcccagcaggcttggcgccacacaccggccattcagatcctgggcagagggcatcctttcccaccccaagcaaagggaggcagagtattgggagatctggggtaaccagtgggtgggaatctccaggcaacctgggtcaagctgagggatgctgagcaccttcagagttgggagaggggcttagctctgggtaagcgggtcttccaactcgaggaggcagcagtgagctaaggtaatcaacagagctgccagccagctacacctactgaagggaaactattatcacaggatgccggctcagcacacaggctaacagctgagattcagtatcaaggatctgggtccaaatctaggctgtgtccctttgccctccagggcctctggcaagctgcttctctgacctcggcccctcatctgtgaaaaggggtggcatgcacgtttatacagctgccaggagtactgagataacacatttacgtctaagtccaggatggcctggcacatgcttttcaatacacggcagctgccgttgacatctcggggctttagacttcaccgaaggggcactctggctagaaacagctcaccagcttaggctgtcacagccagcggagagggggtcctacaatccctcccacccagggcagaccccgactaagacgggaggatgcctcgctgggcc

SEQ ID NO: 41427 - DNA, 1143 bp, Artificial sequence
  DNA replication origin
tttaagagccctgatggccgcagcgcagagcccgaggggagggaaaatgtcgggaaagattctcttccgaactttgcgagtctttgtttgggaggctgggggctgacttcgccgggggccgggccgcgggctcggccgtgcgctccggtgcagcggccgaggagccccggcgcccgccaccccgggacacgccctcgcagtcgagcccggaccccgacccggaccccagcgccgccgggcgagggcgggagggggagcgcttaccagatcgtcccgagcgcgccgcggtccaggcgggcacagcgcagggtcaagttcacgtccggcccgcgggctgcccgaggtccccgggcgcggctggggcagcgggaggcgcgggaggccgaggtccgggtggccgccgcggccgcccccgaagcgctgctgtcaccccggccgcgccccccaactttctgcacagtcgcggagctggaagtttccgggcttcgcggacacgctgggctgggtttcagtcgcggctccgaggttggcaacaaagagggaaagaaggaggaaaagcaggccggggaggggaggaagagaaccgcgcggaggccgcggcgccgagagccccagaacttccaattctacccagaagcttttttcgtcgtgtttttctcttaggtaaacaagcaagttccacgccccagtcctgctggggccttcgccagccaccgctctgggctcatctcccggcgcctcctcggggcacctgagcgttttaagccccactgccaagtgttttggacacaggtttttttgcggggtggtgaggttgggcacaagatgcttcctaaaaggttgttggcacgcagaccatggccccagtgacggagcggtaggcaggggcttgaggaacacgctgtctttgtctcgtccccaaagcacccggccgtgggtcacccgtgatccctggagtggagggactgttgtgacccctggtgctccaggagaaggggttccatgctgggtcccgggcccaggcccacggtgccctcagcctgcagttctccaccttgcggaatgatttgctggcccggcccagctccccggcaccaccattttctgccctcttttccctgcctggcttcaaaccctcccagg

SEQ ID NO: 41428 - DNA, 2221 bp, Artificial sequence
  DNA replication origin
ccccggcctgcttttcctccttctttccctctttgttgccaacctcggagccgcgactgaaacccagcccagcgtgtccgcgaagcccggaaacttccagctccgcgactgtgcagaaagttggggggcgcggccggggtgacagcagcgcttcgggggcggccgcggcggccacccggacctcggcctcccgcgcctcccgctgccccagccgcgcccggggacctcgggcagcccgcgggccggacgtgaacttgaccctgcgctgtgcccgcctggaccgcggcgcgctcgggacgatctggtaagcgctccccctcccgccctcgcccggcggcgctggggtccgggtcggggtccgggctcgactgcgagggcgtgtcccggggtggcgggcgccggggctcctcggccgctgcaccggagcgcacggccgagcccgcggcccggcccccggcgaagtcagcccccagcctcccaaacaaagactcgcaaagttcggaagagaatctttcccgacattttccctcccctcgggctctgcgctgcggccatcagggctcttaaaagagaaccgagagctctctggttttctcctggtgttttcttccctgcgctttgccccccacctttggctggagggaaggaggagggggcatggatgcccctcgggccctcaggtgttgaccctccgaggccaggctgcccaggggcagcacaggaggtgagggcctgtgggatgagggacccccgacagcacaaggaggcaagcccctcgccgctgcaatgctccggtcctggggctcaggtggaagttgctcctgatccccccacacccccagcaccatcctgagtgacttcccttgaccgtcctgggtgaccatcctgagcaagactccctggccaccaactgtcctgtcggctctgcttggggcaaccacagtgccaagtgagcctggcaggtgctgggtcacaggacagccatggacagggcctggggaggaggagaagctggggccctgtagagcctgttccttggggagcaggtgagggaccctgctgcctcccctattcctgtctgcaacaggcccagcccatacctccagctagcttctctgcatgccactctctccgcctgagacaaggcctctgtccctgtgactggtctgatccctggggggcactcctgggatagaaacctaccccaccagtcggcggtggcaaagccctggaaactcacagacctgtcctgggcctgggcctccacaagcctcccagtttgatcaggtgcccccaaccacagcagggaccatctgtcaggtcttactcccagtggtggccaggtccccagccttccagagagcattgctaacttgcctccatccctgggtgcctacgctcccaaagtcctcctcaggggagcacccaagccgagagggctggccagccagaatctgagtgggtcaccccaccatgtccctggactctctggcagggctgtcacagggcagcctacaggcgtcagttggagcacagagggtgtttgcagtgacggcaggggacagagtgcccagttggctctagcctgttgctgccatgaggataagggctgaggctgttagagcttctgacttcagaagaaatccagatttgtacatgaaatgtccaaaatttgagcacattgcaggacagaggaaacactctggggttgaacccaacccatgcccccaccccgagactgcaactcctgtgtacgcctgaactggttagtgttcaaagaaagcagatttcttagtgaccctggccccagcccaagatttgagcaggagaccccggggatctggggagcagggaggcaggagagtctgtatctcatggacccagcaccacagggagggtcggcctccacaggcatgaactgtccaggtaattaacacttgctcgagcccacttaaagttaaaatctccctaaaatgaggaacctgacctgccccatccccaaaccctctgggggaccttctatacccgcccagggtataatgaaggaaagataggatgcagaaagtgaacctgaacttgaactttcttcatgtcccaggcagtagagtcgcagcataccaaaaatcctgggcttatagggaagttctgcattgaggcaggcctgcctccacctgccagcgctacctcattctagctgggtaacctcacctctctgggcctc

SEQ ID NO: 41429 - DNA, 1249 bp, Artificial sequence
  DNA replication origin
cagcgatgcctgcgtcggccacagctgcctggcactgccctcctttgtgcctgcctcctctgccagcctccgctccaacctccccccccaaccccgcaacgaggcctgctcctgggcccggccgcagggcccgttgcccacagagcgcccaccctgcgcccacccggggtgccctcaccttctgggcccctggctcctggcctcgggtcctgctggtgcccaggtcgcccggccccgtcctccgtgctccgcgtttgccccaccctgctgcccgagctcggcggcgagcctggcacggtgccaggctgcctgggagcccagcccgggcagggcgaactttccagcgagggtgtgtatgggggggagctgcggggtgagggtggtgcctggggagggagagggccccaggtgcccggcggccggcccccggcccccagcccccagcccctggccggcctgcgggggcctcccctgcctcccgtccccagagtcccacagaggcgcagacaacacgagcgcttgagtcccagcagccatgtgcaggagccggcaaacaaacaaaagcccttatttatttatttagttcacactcccagataaggaggcgccttttgtgcacataatttcacacacatcagaacggaggcgatgccacggtactccccacagcccgagagccccggacagccgcccggccctcatgaataattgcatcgcctcggcctgggcatttccatatttaaattgggcagcagcgtatgattaattaagaaggaaaaaggcaaaaaggaagaaaagcagtgggggtggggagccggacactctgggcagcgcaatgtgccaaggtgcccgcggcagcttaactcctcccatgccagggcccagggggaggccacagcaggggctgggaggggaggctcccaagaccctcagcctggagggcggcatgtccttgcctgctgtcctgtgtcgagtgccaccccagcctcacatgctgcctggggaaggttctcttcctcctgttcgtattccgggcagctcaccattgctcaggtcaaaatgtgccatgccagtgctggggaaagagacacaccgaggccccccagtggggcacttccagcgggaactgacctgtcttttgccctgcacagcttcaccctacatccctgccacatgcaagctgcaacgctgccctgcctggggaggctctgcggcccatccccactctcacaagcctcctcctccaaag

SEQ ID NO: 41430 - DNA, 1161 bp, Artificial sequence
  DNA replication origin
aggacccgaggccaggagccaggggcccagaaggtgagggcaccccgggtgggcgcagggtgggcgctctgtgggcaacgggccctgcggccgggcccaggagcaggcctcgttgcggggttggggggggaggttggagcggaggctggcagaggaggcaggcacaaaggagggcagtgccaggcagctgtggccgacgcaggcatcgctgcccgcctgcccctagccggcctccccgccgaggggaggacgcgtgtgcaggggcccgggcaggagcggcagacaccgagccgcggccacagggccagccgcacagtcggaggaagggccggagcgaggcggggcccggggctgtcaaggagaaaaacatcccaaggcctgcaaattgctgctctcagcttttttcccccctcctcctgcttcgcggggtgggggggttggggggggggtggtggggggagaaagcagcgcttcctctggaggcggatgcaaaaaggatgcagaattttaaccatctcctgcaccggcccgtccttcctgagcagggtttgggcccaggcctggcgccgtggctccctgggaagggaaaggccagagcagccgatgccggttctgggggacgccggaaagcccagcctcctctgcacctccatccagaaccgggggccccgcagcacctgcagcaggggtggagggtgggaggcagaaggggcctggtgctctcggaggctgcacctcacggtaccagtcgctacccagagcagcacgcctgtttgctggcctgctcttgggtgttaaacatggtgtccaggtccccggttggagaccccagccctgtaccgggtgagggtcttagctcccactgacttggggccttcaaccacactggcatcccaggccttcctcctgactgacttctgttttaaaaataatgtggaacgttttctggcatctggtgagggattcacacactgtttactgagggcaggacttaaggaatgagttcagaaggtatctatctggtcactggacaaacggcaggcaagccccctgtgctcctcgctgggtgagactcaggggcatgggtttgggcatgggagctcagagggatggtctgggcccacaagcccacgaggcatagagcctagggcccatgaaatg

SEQ ID NO: 41431 - DNA, 1066 bp, Artificial sequence
  DNA replication origin
ctgcacctcacggtaccagtcgctacccagagcagcacgcctgtttgctggcctgctcttgggtgttaaacatggtgtccaggtccccggttggagaccccagccctgtaccgggtgagggtcttagctcccactgacttggggccttcaaccacactggcatcccaggccttcctcctgactgacttctgttttaaaaataatgtggaacgttttctggcatctggtgagggattcacacactgtttactgagggcaggacttaaggaatgagttcagaaggtatctatctggtcactggacaaacggcaggcaagccccctgtgctcctcgctgggtgagactcaggggcatgggtttgggcatgggagctcagagggatggtctgggcccacaagcccacgaggcatagagcctagggcccatgaaatgttttcattttaatttcttttaaaatcagaagaaaaaatgactataaaaataatgaatatacgacaatgaattcgacctggttttattggcctttagtctgatgtagtcataaaatagaatttttagtatttatggaggaagggaaccaggaagccaaaagtgccccggcccatggaaggcgggtgtggcctgggttggtcctgtctgtcccaggacaaagggtcagatgtctgggtccagggggggtttggagggcatctgggtgccctgtgaatctggcttccacgaaggctagctgggacaggttgctccagcctgcggtggacaggagccagggctgtgtatgtctgtgcgtgtccgtgtatgtgcacgtgggtgtgcaggcatactcgtgtgcatgccagtgtttgacaaaggattcctagacacctgcgtgtgtaagtcccaattctcaaaacggggaatgcaaggccagggtcaggagacagtgtggctgcaagggcctggtattcctgacaatgatgggtagggagtgccattgtctccctaggagaaagcagccttcaaggtcccagcacccccaaacccacgagctcacacaaaacaacgcgagccacaaatgcaagccacatct

SEQ ID NO: 41432 - DNA, 1057 bp, Artificial sequence
  DNA replication origin
cgggtcggagttggcgggcgggtccggggcctgcgtccgagggcgcgtcccaggcagagtccagggtgcggtccgggcagaggcggcggcacgcgccccaattagccgcaggccgggcggcggggctgccccattgagggcgaacaaagggcgcgaccccggggtcaggagtcgcgggctgcggccgccgctttgttcggcgcctgtttactttgcccaagcggagctcataagatattgactaaagcggattagggggtcgcgccccggaggcccaggcgggctgcgggaggctccagggcccgcgggacctcccagccgggcgcgcctggccgagtcggccccttccccgccgcccgagcgtccccagcctcgcctccgccccgctctgccggggaaactgaggctccggccgggcgggcccgggagagggggctctgcggccggcgggcagcccgggaccgcccggagccagccgggaagtgatggggttgcccggggcactgcattttaaagaattctgcccgtcccgatacggcaggtcctgggaatccattttacagtgaagcaagtcgcacttgcctgaaggctaggaaatattagttggaaacacggacagatttttccgtataacaaaatcctggcacattatggttaagaaagaaacttctagtctcttaacgcaagcgatgcgctcctggcgtgaataggcaggtgacctaagagtgcagagaaatattttaagggcaatacaagcttacgaaaataaatgttttctttctttttaaaaaaaagaataagacaactgatgagtctaaataaaccactaggattcccactcaaagaccacaattaatctgatactatgaatccaggatctacggacttctccagtaattaacttgcagaatcttttaaattgtccctagaaaaccaaacaggggaagcagaaagccccaactgaaaatcaggcaccatgtctcaccaccggagggttgtcacccaaccaaggatccaagaagaagacgggcctttttccacccttcttaaggctatt

SEQ ID NO: 41433 - DNA, 889 bp, Artificial sequence
  DNA replication origin
attggggcgcgtgccgccgcctctgcccggaccgcaccctggactctgcctgggacgcgccctcggacgcaggccccggacccgcccgccaactccgacccgaccccggcctgggaccccggctcgaaccctcgtccctgcccaggcggaccccggccccggcccggaccctctgcagcggctccgggcccaggctccgactccaggcctcggttcgaaccctggggacccgccccgccccgctgcagaccggcctccccgcccgccgcggaccccgagcctcaggcctggtgccggactcggccctgcctcgcgtgcccgccctggggctgcctggaggaggcgcaccgaggcctccctgccttcagagccgctgcgggcctgggccctgtgtccccccaggtccgcagctggccggctgaaactggcccgcacctcccgccccggggccgggtgctcctggtccgcgcaaggtccccacgcactcccgcggccacgtgggtgcctgtcccctggagcggggttgggggaggccgcagagacactgctcccggggtccctgtgcaggccccgtaaggatttcagacagccgtgatgcagaggagacgtgtattagttcttgtttttctttttctgctctttatttctgcttggaagcctgtcacacgggaaagaaaagacgctccatctatgcgaaccccactcccctggtgagggaagccggaacccttcagaccctctgcacgtgggctccctccccgacaacctctttttcctccacatcacaacctttccagcacctgggaacggttctaggccagaggaggatgctgaggccatgaatgcatccgttgacacgaaattcaggccttgaccatttcacgtcttt

SEQ ID NO: 41434 - DNA, 1583 bp, Artificial sequence
  DNA replication origin
cctcccgccgcccgccccgggcaagggcaccgcgtcgcggagacccagcggccttccgtttcgcgccccggggcccgcgcggccgaggcgggcgggcgggcgcgagctcccggcccggcccgcccccgccgccctggcaccgaggcggctgctggggcgcgctcggcggctgcgctccaaggcgccggctgccatgattgcgggcagcgggacgcgcgcgcacgctcgggcccggctctgggacccctggctgaccgacggtccctgcagtccccgcaacctggtgcccgcagccccgagcgcgccgcggacagcggtcaggctctccaggctcgtccccgcggggaacagtgtgcgctgcggagctctcgacgcggccccgggacagcgctcggggccgacggtggcagcgggcttcccccagggcggagcgcgcgcacgggcaaccccgcggcggcttccaggacaccgccggccccgcggagcaaggggtgcccagaggggtgggagtccggactcggcacacgggagccggccggcggaggcaggggtcagcgcacagtgccgggagatgtaagaggggcgcgcaaggtgcctggaggagttgggttggggggtggttcacggtgcccggggaggcgtgggatgggcaggggcgcggtgcctggagccgctgcccagctccgagcgcgctctcttccttcccggtggcaacaacttcctgcttccccgactcagggcacaggagcttcggggagaagttcaaggccacagctttgctctctcggagcccgatggcgacactgctggccccgggccacacggttccctcccaggccctcccggtggttgagaccggccggcctctagggtccggacacgggttagaatgccaaggaggccgcggcgtcttttcccgcccgctccacagaggcgcctgagtggttcccaaaccgcagaggggccggcctgggcctccggctctcggggacgcacgcggacacagagtcactattcgcagaccccgtccccctgcccgagcatgccctggcccagagccgcatggagctgatgtccccagacgcctgcgacggccctttggcggccagggcccgagagaaacaaggcctcccgggtcccaacccaatgtctgtctgtgcctgtctccccccaaccccccgccgccggccttggcattctaaccagtgtcccttgacgtcacatctcgccatttctgccaaccaattgaaacttgcccgttgtcataaaaatatatatactttttatgccattggtaaattcaaaagttcctcgtgtgccctgcttcccaggaaacttcatttcacattggattagactgcccaggagggcaacgctgggctggggcagccgggcaactctgccagggcctcgctgcccactgagctgccttccacagctcgctagacccccatgattgtggctgtgaattgtgccagccaccctgataaacacaccactgcctccaccccatgacacacggaatttggggggagggaaggaagaactcagggtatgttaagaaaccttcccaattgctttcc

SEQ ID NO: 41435 - DNA, 766 bp, Artificial sequence
  DNA replication origin
gccctgcaagtcctggctcgcgacgcccgccccggaatgcacgtgaacttggagaaagtcgcggggcgcgccggccgggctctccgcggcagggcgtgggcgtcccggggccggcgcgctttcgttttcgtctgggacaaaggtcccttgcggcgcgcggacgccgtgaccgggtcctgcgggccactctgtggcgcagtcgggtcgctaagcgcagggaagccggagcccgaaggcaaggagagacgcggcgcggggccggggaagtggggcctgggccgtgcgcttcgcccgcggcagtccagagccgtcccaccctgcgaagagttgcgggaactggcaccgctctgccgtccgccgcttcgacgcgggaagagggtgagcgtttggaacccaggactcagaccgctagctgagggcctgtgcagctctgggcacgcgagcgcggcgccggcggcggccaggcacggtcctcccgcaagggcagggctgtcgacctgtgcgccccaggtcacgatcgggttcacggcgactcctgaggacggtaagtgcatttctcactttcgctgcttagtgagtatttaaatattaatgaagggatctctaagagggacccttccgtagggcaggccttccacagaccagggaacgcaccgaggaggttgctcttgaacctgaagccgcaccagcttgcaagaactccactcggcattaatctggatcttggaatttgtgaagcacagcttctaatctcaggtgtgcaggc

SEQ ID NO: 41436 - DNA, 1216 bp, Artificial sequence
  DNA replication origin
cggtccagtgggcccggctgggcctcggccaccccggcacagggggcagggctgccaggagccatgtggtgctgggggaaggccccgctgccagccccggagtacgaggaaaatgctacttttgtctcctgctctcatctggcactggctgcccggggagggggggcagaggcggccgctgcagctcagccccgcccaccgggaatttttgaaagatgctcgtgggtgcgggaggatggcagacgtggcagtggcgggtgggctgggcccccaaacccaccaccaaaaaaggaggaggctggccgggcgggagagggaggaggaagccggcgtctggccactcagtggccagccagggaggacacggggagcggcttgcctgggcctggccaaggcgcccgcaccccgtggacggacagcgcggcccgggcgccatgctgtgggcgcctgcctggccgggctgctctgaagggctgggcgtccaggcggcctggctcgctccagggatagaggccacattgttcccacgccaggctcagcaggaggcagccagcgccccggctgtttccccagggtgaggccagagaccccaccctgaaagctgccctggctggggccctcgcagtgagtccccttctaatgcctgtggaggctggcgctgttgtagccgggagcccaggctgcaggtttcaatctggccctgtgtccgactggccacttcaccatgggcaagcctgcctcagtttccccatctacagaaagaagggggataatggctcctcccactcagggctgctggagtggcagaattaacacgtacagagccccaagccccaggcaggcacccagtcagcgcttgacgccgaggggtccgagagtggccagccagccacggtggacagggcgccaggggtggagtctaggccagtcaccctcccctctcagaccctcacatatccttcgttttcaccaaaccaaaccttgccaccgcctcagggaaacatccctgttctctggccctacaactggggttggcaggcctggggtttcactgtggctctttcatttggagacaaaatatcagaccccgttgctctctcctgcgggcatcaggctgggtctgctgggtcacctgtttgtccagctctcccctctcaccctctatgtgaccgcgagctgcagcagtgaccactggggtgtccttgtgtgggtgaga

SEQ ID NO: 41437 - DNA, 1311 bp, Artificial sequence
  DNA replication origin
caggggcagcctaggggaccagtgactacagggcaatttgcagtacctgctgggggctcagcaggtaagatgtcccctgcctgctgctgtctgtcatggctgtctggtggccatggccgggggcgggcttgtcatgctgggaactgctcagaggctgcggccagcctgaggcccctcgccctggcgagccagcccccgagtgcagactgtcgccgatgattcttgcctcctggggcatccgtgcggccatgtgggttgggcaggactggcattctcccctccccaccgttgccatggccaggggcgggcccacctcccgaggctgtgcggagaggaccccaggctgctgcatgtgagcagagcagccggtgtctggcccggacccctctgccatctggggcccggcgtgtttacaggtcggccttgcccgccagactctgcagacgctgccccggggcctttgtgtctgcacgcagggctgagccaccagccgagcggagagtggggagggacacaggtggggagtagggggaggcccctgggggaatcagggaggaggggcaggacagaagagaaaggggatgaagggtaacagaggaaggagaacagcgtggggacaggagaggggcagggactggggaagaggagacacaaggcaggacagggcagggcagcccttggaactgtggggctgtcacagggataccagcctgggggagcagctaaccccaggcatctgacagggacctagtgggtcttggccaaggcgatctggtcaacggaactggggttttcctggcacccaccataagcccaggcctgcccgtgggacctcatcccacctgtacccagccctccctgtatacacagctggccaccacctaatgtaatccctctgacatcccacaggcagcagtgttggtctctagggtccaaatgaaacagaccccacaggcgtgtccctcacacaggactgagcatggaatgtgcccctccctgagtctctgactcccaagcctggactgacatgtccagggaggctgcaagggtgtgtcccctggatcatgggcagggggcaccgtgtgcagctgctgaggctcaggatgtgtgggaaagggcctggagtggaggagaagaggcctgcaggggagtggacagtccagggctgggaccagcaccccaatatgcatgatccgtggaagatgaggctggtcgcacacagaaggtgcttactcagtgctcgtcagatgccagatgctggcgtaatcaccacaggggtcacacaccctccgttaggaccaccagcaaggc

SEQ ID NO: 41438 - DNA, 2387 bp, Artificial sequence
  DNA replication origin
aaggacagccacctgctgttgcaggtttcacctgggtgaaacaccttcttgattcggttcagatttgttaggagttcctgtgggccaagccctgagccagtcacatggagtcatccctcttcctgatggccctgctgagtgcccctcccctgaggctcccagagcccacggggcttgccctggccaccaggctggcatacagcagagcagggccctggccccaagctgccccgcagtagaaacacctctgggttccatgaacgttgtctcgccaaggtgtggggccaccagatccctcaggggcggggaaggtctggggtctgggccgagccttccgaagtctggctgtgcagtgggttcaggccctgccactcagacccttgccgggatggtgccggggtgggccaggcccccagccccagtgctcctggcagtggccaaggctgctgcctcctcagctctggcttccctccctggcctggttggttgggcacctggcctcaggcatggcccaggctgggggccttgctccccacacagtagtgagctgaaagcactgccatgtccagctctgggaaggagcaggctcccagttcatcccgcagcctcgtgtcgctgctccagctgtcccgggtacgacgtgcccttctccaaaaacacctcacccacccagctgggctggcctcgagaactggggagtcagaggcccttggctgtccctgaaaaaggaaaacgggcctcctgatgggggcttcctgggctcacccaacacagaaggacctcctagtgcccgtgcgccggcaggtaaacctctttgggtccccgttccctcatccctgaaacatggggagcacagttgctcctgcgctggctgtggctgtgggggaaggaagagccgctccattcctgcgtttgatcaggttgtcacgaggactgagtgagtcaccaggtgtgaggggctttggtgggtgtgtcacagtggcaaagcattcacaccggccaggtccccagctgggagcatgtgcccaggagcctgcggtgtgcagctggtctagccccaccgtggagcagccacgtgggagaggccccgggaacaggcgaggtggctgtgccgttcacacccagagagtcgtcagggcaactggtgacacggtgatggggacagtggcacctgcccttgatgctgccctgtgtcacccaggcagcccccaccccatgaacactgtgcaggcttttccctaatttcattcttgttttttgatgaaggccctgcccgtggctctggatcggcggtccccatcagaggcctgggctgagtcctcaggtgtgtgagtaccatcttcccctgacccggcggccccacaaacacccctctgccagccacagctcggccgccctgggccttggcctcccagtctgtgcagtggggttggtgacgatcacaggcttctgctctgtgcaggtcgggagggagtgccatgtggctgcacccccagcccaagagcagcctcgctgctggacctttgggttcccaataagatctggtgaagacacatggagaccactgctgggcgggggcaggaaggcgtccctgtggcaccctggggccgcccatctgttggatctggaggtgctgcctgccaggctctactctgcatccagcgagtgtttgttgggggcaatggggcccgtgccttttgtccagaggaggccggagaaggggacacaagaggggagtggacagacggtcaccaggcagataagcaggacggggctcggggcttgtttgggaagtggctggtgctgagcttggctggggcagggctccaggaggggccgagtgggccccacccccgacccttgtcggcagggccccgaaagttccacgctgttgggggggtgccgtggaaggtggagcggggagcagcctccgatccctggagcaggttccccagcgttcccgtggcagccacttcatggcacagtggtccccggagttcaggccaggccctcgagccgcctgtctggggaccactccaacctcaggcaaatgaggggcggccctccccgggtctgggggcaaaagaaggttttgaatccggaagcccaggctcagtaggcccttgccacctcccccagaggtcatgcctcaggctaggccacctgggctgcaacatgggagggcatcagtgccccaggcagcccccagtcccccggggccactgcaagacccttagacgggacgacaaggcctctagaagccccggctgctgggagcctaggcagaagaagggcccacctgcctgtctctggggccgtgcgcggggcgggcactgtgctgcttttccggtggctcctgctcctcccggccccatcaccactcccac

SEQ ID NO: 41439 - DNA, 1432 bp, Artificial sequence
  DNA replication origin
cactgtgctgcttttccggtggctcctgctcctcccggccccatcaccactcccacccgcggcggcctttgtcttccaagcgctctgcaaaatggccgcccggcctgccgccattttgtggctgaggtggccgtggccttggagaggcctgggagggagggcggccatggcctgcctgcctgcccttggcggcctggacagagcccagcgccggcccccgcccagtctggccttggccgtggctgccccaggcttggcaccagccagcctttggcaaggcagcccgggagtcctggcccctcacccagccctgccggcccctcgccaccctgaggcagccctgctgagcagacggagaagccttgagccagggccgggccagtacagcctcgctggcgggggagccctgggccgagggcagctcaggcgggtgtggggcccacctgggctcccggcacctctgcaggggtgacgccttcaggccttgacggctgcacctatcgcgctcctggcctggcccggccgggagtgggtctctcagtggccggcccaacttctggcttagagaggggcaccgccatcctcaggaagagggcagggccgcactctggccaggatttccctgtgttggggccagccaaagtctctgacacacaggagtggaggacctgttccctcctgggcccctccacagcccccactctcctgcaggccccatccccgcaacctcagccattccagacagcatctccctccccaccagagcccctcggcctctcctgagcctctgagcttgcttcctgccccgtcacaggcccatgcacctgcccttccagtagccagaggatcccaagtggcacatttccgaagggacggtctccaggaacccccaggggccagggtggctgcagagcagcatcagggagatgctgggtgttggccgtggaggacaattgtgcccctggccaggcggggagggggcaggtggaccctgtgggagccctgtgggagccctgtggggttggccacacatcggttcctgctatccttgcaacaagatcccctggagggcagtgtgcctcctagaagaaggcaggagaaatcaccacgtgaagcagagaatggcgtttgatgagtgtgtgctttttctaggggtcgacgcaggtcctctgggcagcatggggtggtgccgggtggaccccacggtggcctgtgttcgccacgtggccgtgggtcagttcctcgctggaggagacccttccccagacacctgccgggcacccagccaaacccttgaggcctgggaaggtctctggatgccaccctacaccccgcccagactcctctccctgtggttcctggacagaacattccgtcaccacgaaacgaagtttgcccaggccctgccttcaccctgggaaaacccagccgg

SEQ ID NO: 41440 - DNA, 1257 bp, Artificial sequence
  DNA replication origin
gccatcagcagaaatatctgattgcaaaattaaaaaagaaaatcaatgcagaaacgtccatgatctaaaaatatcaaacttaaatcaagatgggacgggtaagggttactgacctctcctctggcctcaggctgcaatacagctaggccgcccacagtctcacggtccccaacagcatgccatggggacgccgcggcaaagccacaactggaactgcactcctcagatccaggctcctcccccggccctgcacactgcacgcaggtgggaagggggtgcccccaggatggagcgtggcccggaccccagggctgccttccttccagggctgccttccttccagggctgtctggggtcccaaggtcccctcactggccctcctgttagcaccctccctgtctggcttccccaaaactgacacccacgtgctccgggtcagggtctccaccgtcgggggtctgtgccctgtctagcttcctgctttcctgttctctcatagccactaagttctcagtgggggtggggggcaggctcagggaatgtccactccctggggcaggggccaggcctgctgtggccacatgtcctgcacctagaacagggccagaggtccagcagacaccaacattgtggccacaggtgtcagcgtggaagctcacaagagtaacgcagcacccgagacacctgagggctggcactggcaggggaggaccctgctctgcagacacacctgcgtccatggggcacagccctgggggctgccaggcttggttctgacctgctctgtctccctcagtgatgggcctgggatggggtaggttaacccctctgggcctcagctgcctcctccgtatgatgggtcaggacgccagcccccagggctgtggggagaatccggggaagctgctctttaatgctcccgggttacgcaaacaggcttgcttggagtccaaaggggaaaagcaggaatgcggagcccgctcttctcctgtggggatctctgtctggtgtttaatcattaggcatacttttaacctcaaaggcgtgtacttatctgaaaacattcttaattcaagccacagtctgggtcacaaggtggggagggcaggaaagaatcgggggtggcagggggcggtgaccagatgcaactacatcattaaaaataccccagcctgaaccccgccctgtggtcaccccacccagcagcaactccccaccagagaccagcccttctgcggtggggggcttttcctgccg

SEQ ID NO: 41441 - DNA, 1072 bp, Artificial sequence
  DNA replication origin
aggaggatctgcacgcaatcaggagaactccagccgacaaccagggctttctggggtgtggggtggggaaagactgatgtttcagcttcgtgacccactcatggagccatttctgagctggtggggagaaggccagttgcacgtgttgtggggtgtgtgcgggggtgatctccaggcccacctacctggcagccctgggggtgagcatggggctcaggcctggggagacagcaggaatctcccctttctcaggaggcttcctgagacagaccagagaaacccttcgcagccagcctggatgagggctgggagggccatgcagcgtaaacggtgctccttgagcagagctgacggggagtgagcagtcggcaggcgctctgccatctgccagctgccacctcccgggcgctgccccggccccacggtgtctgcccgtgggcagggtgcccggcaggcccaggcgggggaggggccgggccagccaggacaggtgtgcggaggcctcggtgggcaggtggccatttcagggccgggcggatgtctggagcaagtgaggcagacagacggtgtcaccccgaagtcacctcgggcttggctcagggccactgggagccggacccccccaaggagcacacccccgccaccctgattgggtttctccccataaagcggccagtgtctctgctcagcaagccgtgccaacaatggatctgggaaaaagacagggaggggtggcgtccgggggctaggacgggaggcgggcctcctgcaaacacggcccagaaagctaacgagacacacacggggcagcctgcggctctggctcggccgcagcagggcagggaccagggcgaggtgtgggaagcatgttaaaaggaccaaaaacccagccatcagcagaaatatctgattgcaaaattaaaaaagaaaatcaatgcagaaacgtccatgatctaaaaatatcaaacttaaatcaagatgggacgggtaagggttactgacctctcctctggcctcaggctgcaatacagctaggccgcccacagtctcacggtccccaacagcatgccat

SEQ ID NO: 41442 - DNA, 2939 bp, Artificial sequence
  DNA replication origin
tgtccctgcgtctgcccccatctgcacccccgggaggtgccttgggggaggctgtggggtgggttgcaccctaagcacgcactctgggctcctgacttaatctctgagacccccaccccctcaggctggactggccacctgggctggctgggtcccctcacacctactgggttctgactcatggtcccagcaggctaaaaagggggtggggcaggacagcccagtgggcggagctgtgagaatccaggccggcctctgggctatgctctgggcaggtctcatgccctcgtgagccgtggtctccccactgaggcaaggggtcagctgccagggcccccgtcatcagccatcggagctggagtgcaggtggggaccaccatactgattccaatggccccagcctggcccccacaggtcccccaggccaggacttcagcctcctagagcctacagtgctcaccatggggggacccagcccacaggtcgggctctataacgtgtggcagagacagaatgggagacaggcccctagtccaccctggtcgtcaccacaagtgccctccccctgggcccccagccccacctgggagaagcagatgtgactcagtttccctcattcggcctttctcgttctgggctagacttacccaggtggcatcttgagtcatcctgggcgatggcaggtggcctcggggcatgagggctgcactccaggatgcccggtggctaggtgacaggagaggccagcgcaggagcttctgtccccagggagtgctcgaggcaggctgggccctgcagacaggcggtgcacacaacagagcccagggccagagagtgagtcttcagggtgtggaggtgaggctgagcctcttccactcagacgccctgcaatgaaccacggctccttcaggccctgtccagcctgaggggtgcaccaccagggtcaaagatcaccatgccccaagtgcacagtgggcagatgaggtgggccaacggggggagcttgctggaagagtggcgggaagacaagaagagacatggcttcaggggaggccacagcctgggcgaaggtttggctgtgagaccatcaagtccccacctaaggacctctgtgcctgagggtggggcctggagaggaccgggagtggcctggctctgagatagccctccctccctatcagacctcccacggctcctcctacctccagagccaggatggcaggaggcccagctcactgtgaggaaggccagccccaggcaggggctccaggtcagcgccacttcttgacctgttgggttttaaaaacaaaagtgacaagtgtcagctctggaagagacgtggccttacccagctctgaacccctttgtgaccttgggccttgcccagccgtcccgcaccagaaccgacactccagcctggcccgtctctcgcctagtggctcacccacccctgtaagggcctggatggaatgtggaatggcctccgtggccagccctgtgttggacaatgccaggtcagaggggaccaagacccaagcctgtccttgagtggtcagtggtcatgtccccctgctgggaagcctgtgccctgccaggctggtgcctggatgctctagggcccagaggagggcagcaggatgcacaggggggacagcctggtgctgctttcccgggtgcctggcctgtcagcaggtggctggactatggagggaggggttaagcccccattgcaccgaggaggatgctgagggtccaggggggctgtggcttcccctgggacccaggacgaggaaggcttggggttctcccacgagcggaaacccccgggaggggcccacagcatccagtctggggctgcagggcttcggcaaggtcttgtccagtgaatgaaaacttcacctcacgccagcccattctggcaggagtgcccttgcagggtgcgcacggggtgcaaaggccagggaggtgcatccaggcaggaagggatgtgggtccccggggctgagcccaagacgctggatgggagcagacataccgtggttccctgcagccctgtaccgtgtgacctcgagcaagagcagccctgctggggaccgggagagtcacccaccaggctattgaggggcctgtggggacactgggtggggggtgcccttccctcctcctccctgagcaccagccctgcccacgctcccagccagctaggccgtctaccactgttgacaccctctctactgtctctgcccctccccagcatgcccgcagcccgggctccccctccagcctcccagagcagcaagtgtcccgggcaggcctctgctcccagcattgccctggcctgtccctctgccaggcacaaccaccctgctttttcctgctcctttcccctgagggccctgtgttccctggtgagtcccagctctgcccgcaaggctctaggactcgcatctggaccacccaggcctgcagtggtcagggagcctgaatgtggcagtgcccgctccgggggactctgaggagggtgtatggacacatttcctgcacacccaaccctgctgtgctccacaggaccaggacacagatgctgtgacctcagcgggctccacccccaccgcaggaggatctgcacgcaatcaggagaactccagccgacaaccagggctttctggggtgtggggtggggaaagactgatgtttcagcttcgtgacccactcatggagccatttctgagctggtggggagaaggccagttgcacgtgttgtggggtgtgtgcgggggtgatctccaggcccacctacctggcagccctgggggtgagcatggggctcaggcctggggagacagcaggaatctcccctttctcaggaggcttcctgagacagaccagagaaacccttcgcagccagcctggatgagggctgggagggccatgcagcg

SEQ ID NO: 41443 - DNA, 944 bp, Artificial sequence
  DNA replication origin
ctgatctggtatcagcttaaatcctcatgggcgccctgggaggtggaagctacggtgaccccactgcgagatgggaaacaggtttggtgagcagagtgaccaatctaggcctgtcacccccagaacttccacaggctgccctcatcctatattttgggcgagttttggcaaccccatctctagggacggccagtcagcagggaaggttttggtcagctggagggtagggagggaagtggggtgagccaggcatcacctcctccaggaagctgcctctgactgcagggctgggtccagggatccttagggttccccagcccttgggctgctccactgtgatgttgaccccaacacatggccactgtgtgtccctggcagctccccgaccaggccttgagctctgcagggccaaaccctgctccaactacacagtatgggggctgggaggagaggctggctcctcgggacgttcacagtctgttcagacacagacaggggctgcggtggccagagatgggtctgagccgtggactgaggggtgggggagcggtggtgagcaggagagtcctggtggaggtgagcacaggcatgagggaggggtgctgggaggcagtgcaggcaagggtgtcagcagagatctgctccggagacagagggggctgctctgagactctgaggcctggcagtgggagtggggagggatggaaatggtgtttagaggacagaagtggccagatgtggctgctgactaattatggggtgaagaaggggatttggacagtgcccatgtgtcacccactctggccccagaggatgatgggagaagggaccatggggcacgtcactcatctccagctgcaaactcctacgcagctgtcaagacccagctcagatggtccctgctttaggaagccctccctgcccttgggcccctcctccacgtc

SEQ ID NO: 41444 - DNA, 839 bp, Artificial sequence
  DNA replication origin
gggtcagccccacacaagtcctggccccgagtaaagataccatatccaggcaggcgctgtggctcccacctgtaatcccagcactctgggaggctgaggcaggcacagcgcttgagcccaggagttcaagaccagcctggacaacatggcaaaatcccatctctacaaaaaaatacaaaaattaactgagtttggtggctcacgcctgtggtcccagctactcgagaggctgaagtgggaggatcacctgagccttgggaggtcaagactgcagtgagcccagatcgtgccactgcactccagcctgggtgacaagagtgagaccctgtctcaacaaataaataaataagtaatacagttgtcatatcctatggagcagctggcctggggggtctgggtgtggtggggaaggatttgaaggcagatgctgggggacagcaagggaagagaagggggaaacccagggaggcagcaggggaggggtggcctccagaggaaggaagaaagggggaggggaggcagcaggggagggcaggggaagagttgtggctggtgctaggcctggggtgagtgtgggaggggttcacctgggcagactcacgggaggtgcattccagggtcaaggaaggagttaacagagcctgtcagagcattcggggtgccgggtggggagggatggctggtccccgagtgaagaaggccaagctgtgtccacagaggtcatggtgagcccaggagtccaggaagggcccagccaggttgtccaccgcccctgccaggccagaggagttgaggctttgggtagcaccccgcaggcccagcagtagagctcatatggc

SEQ ID NO: 41445 - DNA, 889 bp, Artificial sequence
  DNA replication origin
tcagggacaaccctctccctgcagccttcccctgccaccctggaggacagggcatctggccgctgctcccgggaggtcctcgcctcagacaacctcctgctggccccgtccttggctcgccactgccctgggccttccatcctgtcaccccatcccacctgccagcttctgctcacaccaacaccaggcctggtgttatgcagggctgcctcacagactgtgacatctgacctccccaacttaatgatgaggaaactgaggtgaagggaggcagagaaaccttcccaaggtcccacagcctagaagatgcccgtcaggagcgcccgaggccccgacacacttgcacaaacaggcacacccagcctcacctccaccagccccagaggcttcctggccactggctgtcctctgtgcccctgtacttgtacccagacatccccaagtcctggcatcatgggcacttgtggatagctggaggcggaggggctcgtggcccggtgcagccttgactgcagactggccgtgacagaatgaccattgcctcaagcgatcagcgtggtggtgcagccctcaaaactcttatctccttcaacacatggcatgggccaggaacagttcagtcaagggaggaatgcccagggccttgggagcatgggataggagggaggacccagacagtgtggggtgaggggaaggcaagggggatgagctcatggagaacttcctggggcacggaagtcctgagttgggttttgcaggatgagtaggagtttgccagagtaggaaaagcagtgagaagccccaaatccacactctgtgactgtgtgtttgtcatggagcctgtgagtgttgctatgtggtatactgatgggatgggagggcaacagac

SEQ ID NO: 41446 - DNA, 1631 bp, Artificial sequence
  DNA replication origin
tgaggctgggtcctaaccccagcgtagcaggcagtgcaggagcgaccagtggacagacaggaggagcgaggcttgcgccttctgtgtcctgagaccctgaatctcgaggtagaggcattagggccaagcctccctgcacataggtggagccaggacgggagcccccatctctcctagcccacctgccctgttgctgccactggggatgccagcagggactaggagagcagctgcccatggctcgaagccttccaactcgtgggcagtggcccacctggtcagaggggcgagatgggtgtgggcagtcatgtgtggtcacagggggccacggccaggccctctgcagctgagggccccacctcccacactctgctttgggtctggccccatccacccctggggtcccagctggggggcagtctggccccagcctgttctcaagatgctgcccagggacacctgtggcccagccgcatgtgctcaggaggaggatggggctgggggtcagggcttgggggctggggtgtggcgaggtgactgctagcctggcctcggggaggttggggcagtgctgcagaggagctcagctttaactgagtggggaaagtggaagaatgagccggcggtggggatggggtggtgggggagtgctccaggcaggcgggtggcagggccagggcaggggaggcatgaaatgatctggggtgcctggcaatgccagtggctgggtgtggccagggcctgacggggacaggcagctggtgacacaggtgggggaccctcagggaagcagtgagcagagccggcagggctgagtttcatgagggcacagaaggggggcccagttttctccctgctagccccagcctgtcgggagaggctggagcccaggagatggaggcagggctgttgggcgagggttgggtgggtgacggtccttccagagacggaagagcagggcctggtcagggagaggctgaggcatgcctggaggtgtcgcttaccacaggaagggacttcaggaggctccaccaggggcaggggctgcctaggtctcgaggtcgtgggtgtggggccgggtagggcacccttgcccccatacagcctgggcagctgcccctgtgcaggcatccaggcagaaagggcttttagtcttgtactaggagtcggccccagatttggggcaaggggttcctaacttaatccaccctagctgagggtgtcactttgggccacctggcaccctcctgggcctcagtatccgcatctgtccaatgggtgctgtccagccagtagtgggggtcacatgggctgaccagggtgaggtcaggggcaggggcggcaggaatggacaggaagtatcatagtggtccaaagggggttcctggaggaggggtaggggctgcgagaggaaggggagccgtgagggacagtggccagggctgtgctggggagccaggacaggggacagactgcaaggccagagcaggggccgggaggagtggacactggtcctggtagaccaggacctgcttcttccttcaggtggaggggccacaacctcttcagcccatcccccggcccgtgccagcccatgcagagggtgggcagcaggaggatacacagagctc

SEQ ID NO: 41447 - DNA, 1029 bp, Artificial sequence
  DNA replication origin
tctggattggggtcacgagggttggggcagagagggcaggttggtaggtgggggcttccccaggcaggcgccctgcagtgtggacaggaagctggtggggataggacatgaggcaggggctgcatcccacggccctcaactctctccagtgatggatgaggggcgtggattcagcggccccctgcctctggcagagactgggtctgggattggtgctgccaggcctctggccccattcccaggaccagtccctctaccctcccaggcccaatctcgtcagccccggcacagggattcacgccggggatgggcctggctcagacggtgcccccctcctagcccacatccaggcaaacagccgtaagagcagtgagagcgccctctcctgggagcgctgggcaggtgccagggctgacgccaccgtaaggttacagggcaggggtcactcctgctaagccccagggaagcccctccctacaagttgggtcccaggtagcaagggcaggaagggtgtttcgggcatggggaacagcatgtgtgaaggctgaggtggagggaagtgggtgggtccggcagggggcactggtgggtttggggttcagagagagagccctgcgttcagtgtgggccatggaaggagggaaagtgctctaggcaggcagaggggagggaggcagcggaggctggggatagacttgggccctgtgcacatgaggggaggggacggaatgaagacactgagctggccacagaggtcaccgaggttgtccggaacacgcccaccatatttatgggacacctcctgagacccccaggcctatttcagggccttcagtgcagggccccgggatcagcagcgagcagcacaaatgagaccctgggctcagggagaaacacaggaggggaagagggggcgcagttgggggcaggcttccagaagcacctcgccttcaggagtgtgggtcggggggctgggctggagacaggccccagactggggcagcagtggcaggagctaagagtgtgggt

SEQ ID NO: 41448 - DNA, 1009 bp, Artificial sequence
  DNA replication origin
ctggctcatggggaatgacaaggacactgaacctgcagggttgggcatgccgggagctctaggtgcaggtccgctggccgcacctccgctgagggtcctgcacagatgcgcgtcctggctgcccaggcctcctgggagggttttcttgttgtgcactcatcgtttttggccccagacagtcatggaattcaaagttttccagacaccacaggccacggaatcttaagaggacaggaggaccgcatgtcaaggattaccattgccctctgcaggaggagggagatgcagagctgtccggggctggacaggggcaggtttgctctgggtgggggatgcggaggtgaccccatctctggcccagaccccaggatcaccaggccagtggtgagtgcactggttcgtggcttgggcagttggggttgggggtcaggaggcccctcccaggcatgaggcccgttgctttccaggtagaaggggtggggtggggaaggcgctgtggggagagggggcagcaggaatgttccagcagggagaacacccagaccagactggagcaatggccggacccccattctcaggttttgtaagaacttgctcatttaatctccacactggccctatgggatggcaccagtgatccccattctgtgggtgaggaaactgaggcagaggggtcacagagctaaaactggtggagccgggatttgaaccagggactcagctctggaggctgggcttctaagcgtcatgcagtcctgactttggggcttggggggtttgggggtccaagggcgaggcgggacaaccacagggtgccagggccagctttacactgcaccacagggctggggaggtgcaggtggctgggagacgggtgtctgggaggggagggcagtgaccaagagagagtgaggagcccaggatagcttgagccccaagtgagagctggggcctttgccctggaaggaggactgacagggaggtgtggggtgaagaggccagcagggcc

SEQ ID NO: 41449 - DNA, 1560 bp, Artificial sequence
  DNA replication origin
cgccgcccgctgcccccgccgcggggccgccgcgtccacggcccatgcccggcgccgcctccgcgcgtccgtgccagccgcgcccccgcgacacgcaccgcccctcggcccgccccctgccccggtccgcgcgagccagtgtcccgaggcccgacccggaagccccgcccgccccgcgcgccctccgggccccgggcctcggccccgggacacaccccccggagggcggcgcccgattggctgctcgcggtgggcggggccccgggagcgctcagcggctcccacctagcgccccgcggccgctgcagccaagggaaactgaggccggagaggtggagggaccgtccaaggtcaccgatgggacaccgctgagcgtcagcgcccctccagcccggcgcaccggggcggggctgaattcgaggcggggacgcgcggccgcggggcgggtggaggttcccgccgggcgcccgtgccacgctggcgagcccctcctgcctcctcgatgagcccggctctgctactctgtgcgatgagccggtctagacccgggacccgggaccgggtgcccttgaggctcagaagtgcgtagggtgggaggcggcccgggagggaccttgtccctggaaccccaggatgcaaaataaggagaaggggaaggcgagctgggaggacaaggaaacaggtggcgggaggtgccagggcggtgtggtgggcgggggaacgaggagggtgaagggcaacgcggacgggctcggggaggcgccgccagctccgaccccacaaccccacccctctccagcggcccaagagccatgcccgcccctacttcatgcgctggggggtgaggggctgactttgtgcctacgcaaggcgctgggactctgccagagcaaggagaggtcgcggcccggtggccaatggcgaggagtaggagagcgccctgcaaagccgctttgttcgggccgtgacgctcgagctgccggagcggaatgcacaaagcccctgggtgccggcacatcagggctcccctcctcgggaacgcaatgtgtgctatgcccgctccactgcctgccctccgctgccagctgtgcctgccactgtgctatttgtggcagcgggcgcccaggaggacccactccggaaagcaaacccagatctcattaggcaggggaactggagatcaggcgggaactggccctttcacaaacttctcttaaactcacccttgttgattagccaggcacctatggtgaactttgccccaccctccagacacccacatatccttcccactggcacacggcaacctcaccttctcttgcacatgttagccagcaatagctatcatttatgttgtttcagagtttatagggtgacctgtacacgtaatatcctgcatatctcgtggggtgtgcaggcagccacatccaagcttgtcatcctgttgtgtttggtgagggaagctgaccctgggctgcccacgcagagctcaggggctacatcctcatgaggacctccgggctcaaagacattacctggcatacccatatcccagactct

SEQ ID NO: 41450 - DNA, 1157 bp, Artificial sequence
  DNA replication origin
tgcccggaacccgagtccgcggctgtccctggggtttggcgctgcgcggaggtcgggtctggggaccgcagcgactctgggtcttcgggttgtcccctcggagggagggcccacgggcggggacatcgggacttgccctttcctcggcgcagcggagctggggcgtcgccgactcagaaggtgctttccgagacctccagggatctccgaggcgaggaaacccgggccccggacagaccgaccctgggtgggtgcgcccggcttctgccgtcggacggagacgcgcgtgtttgttcctccagctgcgaccacctttgaggaacggttcccactttgtgccccaacgcggcggggcgaccccggacaggctgcgctgggccgggtggcttctctgcggaagccgcgccacgtcgctcccggtcggggccgctgagggtcgggcgcccaggtctttccggagtcccgggctgcgcggcccgcgtggtgcgggtgaagctggaggggcgcggggtggtgccagtggaagtcaggagggtcggccctgccccctcacgcaccccaaccgggcacaactgcacgcctgtgcttttctgaagtcttttttaaaagttaaaagagaggaagtgtgctccaagtgtcaggattctttccaagaaaaacccacagttgtccaatggcctgggcttcgtgggacctccggggctgcacgcccacgtcagcctcagccgacccctgccaggaaaccagggaggcccctcctctcccagcctccttgggataagggtgccttggggaactgggtcagggcaaggacacgggattttcctgggaaggaccctgcgacacccgtgtcgttgcggggcagggtcagcatgactttcctcttccaaggtgaagagttggggggcatccagagaacaaccgtaatcacttcctccttcaccttcttactgccaggctgaagctcagggccctgtctgctctgtggactcaacagtttgtggcaagacaagctcagaactgagaagctgtcaccacaggtaaatagaaggtttaatttactgtttccagatggaaatatttaagtgttttcagtgtttacttctgttgcactacagaccagcaatctgggggttattactttgtgatgcaaggtt

SEQ ID NO: 41451 - DNA, 1545 bp, Artificial sequence
  DNA replication origin
tcttggctcactgcaagctccgcctcctgggttcacgccattctcctgcctcagcctcccgagtagctgggactacaggcgcccccaccacgcccggctaatttttttgtgtttttagtagagacggagtttcaccgtgttagccaggatggtcttgatgtcctgacctcgtgatccgcttgctccggcctcccaaagtgctgggattacaggcgtgagccaccacgcctagcccccatttttcaattgagttgtttgttttaagacctctttgtatattaccacatgtgtattgaaaatattttctcccagtctgtggcttgtctttaattttcttagcaatgtcttttgcagagcagaaggtttcattagctttcatagattccaacttatattttctctttcatggattgtgcatttggtgttgcccacacagatttttatactgtattctggtgccatttactgagttaacaattgcggaagaactggaagaaaggaagcaaacaaaacgagttctgcgtggcactgtcagtgcgggggcatggggagtcctgcagggtgaggtatgggcggtatggcaaggcgcgggcccatagatgtgcaggtctggagatgtgtgcagcggagatgtgcgggcccgagatgtgcgggtccgatgtgtgggtccggagatgtgcgcgtacccagaggtgcagatcggaaatgtgggggtccggaggaaatgtgcggatcaggagaagtgccagtcccgagatgtgcggatcggagatgtggagggctaggagatgcgtgggtccggagatgcgcagatcaggagatgggcgaatcggagatgcgcgggtccggaaatgtgcagagcggagatgtgtggatcaggagatgttggggggtcaggagatgcgggggtccagagatgtgggggtccggagatgtgcgggtctggagatgtgcagagcagagcaaagatgagctgatcggagatgcccaggtccggggatccacgggtccggagacgcgcgggtccggagatgcgtgggtccagagatgtgcgggtccaaagatgtgcaaatctgaagatgtgtggatgggagatgtgcaggtccggagatgcgcggggcggagatgtgtggatcggagatgctcagatcgaagatgtgggaatgaggagatgtgcggggcgggatgtgtggatgggagacgcgcgggcccggagatatgcggggcggagatgtgcgggtccagggatgtgtgatctgaggtgtgtgggtccggagctcggggtcagctcagcagcagtgagagcgagcatgctggctttgggagcacagcacaatggcagctgtaggagtgcaagagggtgtgacccagaggcagggcccggccccgcatgggtgttctgaggtttatgcctcagcactagaagcctcgtatgcgaaatcacatcctcatagacccggttcagacacaggatagtgatgcctggactattcatccgtctctcctctttttccccagacacgctttcaccagcttcgagcccct

SEQ ID NO: 41452 - DNA, 2129 bp, Artificial sequence
  DNA replication origin
ctggactccagctcccctgggctgcagtgctgctcccagtggtccagaaacaaggccaggcatggcggctcccagctcagcagcatccctggcgcaggctggcccaggagctctgtgcagggtgccgcccgatgacctagccccagttgcactcacgtccgagaaccgggctggctgggggtcctctttgatggagctttccttttctccaagtcttgccgaatttcctgaggaaaagcattgatgttctcccggacacaagggaggcagaatctcttggagtagaataaactgcattccttaaagaagtggacaaggatggaggcttgagtatcctgggaacatggtgcagctcctcccaggggccagcccttcccacacttggggggctgggctggggccccagcatgcacagtgtgggcaggtggccagagctagaccagcaagagggagagccaggcctgagggcctggcagggtgtccaggagaaaagcaatgcaggcctgggctaccctgggtgggaacagctgggatgggacagaaagactctggggcctgctctgctccatcacggggcagtgacaacaatggaaagctggagcacaggccatgccccgaaaatcccagagtcctcccgtcccagctatcgcagcacgaacagtggccacctggtgctgggagcggcaggggacaggaaggacagccccacagaccaaagacgccatggacgagccagctagtctgggcaggaggccagaaccgtgcagccatgtccgctctcctctctcttacacactagaactcccgagattcatcacggtgcacagcacgtggctaaggatgacattccccagccccctctgtaactgggcatcgccatgtgactcaggctggttaggggcgtcagcaactgtgtgtgccacctcctggtcatgccctttgaaggcatggactgtgctctcacgtcccttcccgctgcctgggatgcaaatatgatggtgggagctccacagccacaagggacccaaatagagactctgctgaagacaacaggggtgcccttccagccaaggccaccagttctggactcttacataggagaaagtaagtaaataactatttgctttacttaggccactcttatttttggtgtctgtctgttcttaaagcttagtgtgctcgcaaacataaggctgccctcctgcagttcttagaaaagacccttcgccatggagatccgctcactaacaacctactgtttaaacaaagaaagctgcagacttgtggtacctgcgtgcgccccccacccccgccaccccgctgctcacgaagagcagcccaaggccaaggtgttgcattcaagacctccacctccccacctggcccacccacctttgcagtcttcctttcccagcttctcctggaccaccagctcctccatgagcctcagatactcccatgccacactgcggaggctcctcccaccctggcccatctcgtccccctggctattgatacagctcccctttgtgtgtgtcaacctgtggcagatgctcagggacttctcagactctggggtcactctgagtacactgggcacgctgtgaaagccatgctgctccacttccatccgtccttgggtttacagctacccaggtgaacctggcccacccagcctctctgaagctcagttccctcatctataaaatgggtggaatataatactgctttacctgactaaggggcaggactgaatgaagcctcagcagtaaaacaggtcccaagcacaggacctggcacacaacaagtgctcatgaaaggacagtcccttctcctggagatccctccaagaacatctagaaagtaagtcaccatcctggtgagagggcgcacaaggactgtctgcactgttggtgggaaggggaggaaccctgaggggccactggggtgggtgcagagccaccaattacctatttccattcctacaccaggctgagaccctctaactgaccctagcttgccctctcacctctccccttcatcagctgaggggccccatctataatggggtgaacccgctgctccctctctcccagccctccctacccagggagagctccaggataacc

SEQ ID NO: 41453 - DNA, 1862 bp, Artificial sequence
  DNA replication origin
cagccgcaggcggaaggcccaggccaggcgcccgggcgagcgcggcagccgcacggaccacgtcagggagaggcggccgccgcgcgcggagagctgcaggtcgacgagcgcgagcgcgggcgcggccggccagggcaggcgttgggcgctgagcaggacgcgcaagtcgaggcagtaccagcgccgcccggtcccgccatgggggaagcagaggctgccgcggccgctcaggacagcgccgcccgcccgcaccgcgctgggccgcagactgaggagggcgcggccgccgcgcaccccgaggcccggggcgcccctgaggaggccaccgggcgccccggagacggcggcttgtgccccgcgaggaaccggcggcagcgggaggcggccgacgctcaggctcaggcccacgcccagaaggaggagagcgggcccaggcctcatggcgccggcccaggagaagctgggagaggccgcgaggcgcgcccaaccgccaccggggtcgcggggatagtgagggtcttggggacagtgggggtctcgggcgtcgaagggcgctggcagaggggtcccagggacagagtcccagagagcagctgggacctcggagcttggggtcagtcggcactggggacttcttgggtacctcttccctctccgtccccaagtgtgtgcaggcccagggtcaggatggctcaggagggcagttcagccccgtgcagaccacagagctgaccacggagaaggggcttcagcaggaacccttgggaaagccagtcacaaaatgggagatcaggagggaaccgtgagatccctgggcgcccaggaaggtctgactctcggtttcttactttggggtcgctttgctcttttctttctagttggtttgggggttttgttttttgtttgtttgtttgtttgtttgttttttgagacggagtctctgtcacccaggctggagtgcaatggcttgacctcaagtgatccacccacctcggcctcccaaagtgctgggattacaggcatgagccactgtgcctggcctcattctttaactctgtccatttttgctgtatattttgggacttgattgatggattgaatgattttagagacagggtcttgctctgttgcccaggctggagtgcaatggtgcaatcatagctgactgtaaccttgaactcctgggctcaaggaatcctcctgcctcagcctcccatactacaggtctacaccactacacctgactgatttattttttatttttgtagagatggtgtcttgctgtgtttcacaggctggtctcaaactcgtggtcttaattggccctcccctgtattagtccgttttcatgctgctgataaagacataaccaagactgggaagaaaaagaggtttaattggacttacagttccatatggctggggaggcctcagaatcatggcaggaggcaaaaagcacttcttgcatggcagtggcaagagaaaatgaggaagacgcaaaagcggaaacccctgataaaagcatcagatctcctgagacttattcactaccacagaacaatatgggggaaactgcccctgtgattcagttatctcccacccggtccctcccacaacatgtgggaattatgggactataagatgagatttgggtggggacacagagccaaactatatcattccacccctgccaaatctcatctcctcacatttcaaaaccaatcatgccttcccaacagtcctccaaagtcttaactcatttcacattaactcaaaagtccacagtccaaagtcctgtctgagacaaaggaagtcgcttatgcttatgagcctgtaaaatcaaaagcaactggctgggcgca

SEQ ID NO: 41454 - DNA, 842 bp, Artificial sequence
  DNA replication origin
cccaccgcccgtcctcctctcctcttgttttccgtttccggtgtcgctctgtggtgggagccgcagggatggaagggcagtcttgagagacacaaaccagagtaaacgatgcagcccctgatggggccacggtggagagcgcacgccacccaggctccccagctagggcagatgtgcttgaggaaggcgcctctctcctctgactcccctggagccctcccctaaggccttagcttcaggcctggctttcctgctacctgccccttctctggtccctgtctctcccccactcctcgcaggacagtggcctgaaggacctgaccgggttctgctttcttccccggggcagctggtgtgagggtctcccgcgcagggtcagaccccgcgggccgagacaatgaggcgttctctaaggctctggcatcgtgtgcgccggctgtgactggcggccgagggtgccggtgggcagccgggcccctaccctggaagcaaagtgtggggtgaggccgggaggccccagggcccgctcaggacgtctgggtacagcttgggccaccgccacttctgctcctctcacggctgccgtcttctcatttcagagcatgggcatgtgtttcatcgggaagaggaattttgaacatttccttcttcaggtgcgtgctgctctttgacacaaagagatggggctgcgtgtctgccctgggcctagatctccgtcggtaatgacatgtttgttttccagtatctgcagcctcgacctggtcactttatttccatagaagacaataaggttctgggaacacataaaggtgaggtgcagactctgccacttgtcatctgaa

SEQ ID NO: 41455 - DNA, 1214 bp, Artificial sequence
  DNA replication origin
gagggacgcgtctggctctccgtggctgcccctcaccagcccagaggacacgccgagcttctggatcccttcatccctagagaggccagggagggtgggctcagtatcatccgtcagggaacaggaggtgctggaaagttctctggaagattctctgcccctaccccttctgtgttcccaacaacagcacagacaaaacagcctcccgagtatgtgggggaaaggtggtggggggaaaggttgggtggggggaaggtggtgggtggaaaggttgggtgggggaaggtggtggggggaaaggttgggtgggggaaggtggtggggggaaaggctgggtgggggaaaggtggtggggggaaaggctgggggggaaggtggtggggggaaaggttggggggaaggtgctgggggaaaggttggggggaaaggttgtcaggggaaaggtggagggggaaggtggaggggggaaggctgcggggggaaggtgcagtgcggggaaggtgcgggggggaaggttgcacgggaaaaggttggttgggggaagttggtgggggaaaggttgttgggggaaggtgcaggggaagggaaggtgcgaggcggggagggaaggtgcggggcagggagggaagttgcgggtgggaagaaggtgcgggtggaaagttgggggtggaaggtgatgttggttgaatggcaggacacaggttggggtggcaggggcaaaacctgagggagttcgagagccacctccccgaacccggagctgcggcctgacctgacgatgctgtccagcgaggcggtggactcgcccaagtctgtgcgcagcatgtcaggcccgtcaccgaaggtggtgttgcagttgagggagcgctgaagggaggggaggggctggtcactgccaagtggtggccaccacatgaccaccacggggaatgactctgtccccacggcaagccccccacacccacaccctggctgggcccctgcctggcacacaggaggagctggccccaagcagtcaaccctcactgcaaacgagagcctcctggcagctgagggaagcacatcctggcccgcgctgtggtcaggggctgccgccctccctacggccactgcttctggtcaggatcctcggtggtcctgaccctctctttctaaggcctggaagagcagggttaggatgcgacccaggccccatctggccgattctgtcactt

SEQ ID NO: 41456 - DNA, 861 bp, Artificial sequence
  DNA replication origin
agggaggaagggagcaggtggtggcgatgggcacaggcctgatcctgccctcccgcagctccctgctgaggaccgcattcctcctgctgctgctcatcagcgccacctggctgctggggctgctggctgtgaaccgcgatgcactgagctttcactacctcttcgccatcttcagcggcttacaggtaggtgacggccgagttgcccgcgggacccctgcctggccgccgtgacaccatcgctgtgatgcgaagcagtggaggcctctgcggtcccaaaccagccctgcctgggtcccgcgtgggggcctcctgtggctgtgaggactcagtcccttgtgcagccggcacgggggctggtgcctcctccccactgtgtctggggacgatgaccctagtgccaggccagcacaagtccacttgtgtctccagggaacagaagtggccatttctagtcataccaagggccacacagcaagtggacttacgacacagtggggaccccagaggggccccaaggactgtggaaggagtgcccagaagactggcctgagccggggccctcactgcctccagcacaccgggggtctggcccaggcatctcagtttctgagctcccccacctggcctccagatagcagcagtccctgaggaggggaggcctggccgtgtcctgggccgtgtggccggacatgttgtgtgcactcaaggctgtatgcgcatctgtgctggggcgcctaagggcaggtgcctagggaggcagcagcaggtgctgaccccaccttcctccctccagggccccttcgtcctccttttccactgcgtgctcaaccaggaggtccggaagcacctgaagggcgtg

SEQ ID NO: 41457 - DNA, 927 bp, Artificial sequence
  DNA replication origin
caggtggcaccgcgggaggactcagcacagcgtccaggagccacgacagggtcaggaggggttgacgggggcatctgtcagacaacaaggccagcccctggtgacctggtagctgagatgggactgagccagggatgggcgaagggataatgcttgcgcaggggctgggtgtcaggaggagtgtgaggctcccggcccgggaggagagagccgagtctgaaggggggtagggcagagagggagaggcagtgagtggcctggaaggccggatatgggggtgcacggggggtctggggccttgtcagttcctcgtcttcagtgccatccacgacctgtggaccttgcgggctctgtcacccggattcactccatcccctctgaaccctgggaggggatgcgcctttgtcttccccttgtacacatggggagactgaggcagagctcaggaagctgattgcagggtcacagctcaagggcaggtcctgggctcttcctcttgcctctccacagggtatctcacgggagctagtgcagccatgggcatggctcaggccccttggcctggtgtagtcctcacagctcctgttttctcatttgcttcctaatgtattccaccaccacccccactaacacgagctctgtctggttcccggatgagtccgtacctggctacgaggggaggaagggagcaaggtggatgatggctgggtggacaggtggacggacagatagatgggcggacgggcaggcaggtggacaggtggacgtgcagagagggagggaggaagggagcaggtggtggcgatgggcacaggcctgatcctgccctcccgcagctccctgctgaggaccgcattcctcctgctgctgctcatcagcgccacctggctgctggggctgctggctgtgaaccgcgatgcactgagc

SEQ ID NO: 41458 - DNA, 1169 bp, Artificial sequence
  DNA replication origin
tggggcagtgggtggacaggtgtgcttcgccccacaggccagggttcgggtcctcctcacccagccacccctccctgacagggcgaagggcctcaggcgcttttggcagttggaggtctgcagtgacgagagagaagacattgatcggcttgttttgttttcagatcaacacagtcacttctgtcctatctgcaaaggtttcctgccaaagaaagcaccattattatgggaaaaaagggatcgtgtaagtggggctgaacctgaccggccagccatgtcggctgggccctgagaccccgacgtccagtctctgcggggtggggccccatgagagcgtgtaggcctcatggaggagggctgggggcagcctgggtgagccccagggctccagagaggtttgccacgttgcacctgcaggggctgggggaggttagctgaggggagggggctggaggaggttagctgaagggagggggctggcagccagtcctgggcctcagtccctcccgcctggcacagaagtattgggctgtctggaatccccagagtggagatgggtggggtgggggagatgaaactttctggtgggtggtgagggtgttgctgaggccactggaggggaggagacccccccaccccactgtcagagggtgcagtggaacaggggcccagcacagagggaacctccagtgttctagggaggagaggggaccttcgaggccccaaaggagcaggtggcaccgcgggaggactcagcacagcgtccaggagccacgacagggtcaggaggggttgacgggggcatctgtcagacaacaaggccagcccctggtgacctggtagctgagatgggactgagccagggatgggcgaagggataatgcttgcgcaggggctgggtgtcaggaggagtgtgaggctcccggcccgggaggagagagccgagtctgaaggggggtagggcagagagggagaggcagtgagtggcctggaaggccggatatgggggtgcacggggggtctggggccttgtcagttcctcgtcttcagtgccatccacgacctgtggaccttgcgggctctgtcacccggattcactccatcccctctgaaccctgggaggggatgcgcctttgtcttccccttgtacacatggggagactgaggca

SEQ ID NO: 41459 - DNA, 1526 bp, Artificial sequence
  DNA replication origin
cgtggagagcctgcatgtctaccgcatgctgaccgaggtgcgcaacatcgacacggggcccatgcggttctactacgtcgtgggctggggcatcccggccattgtcacaggtgaggatgcacagagtggccctgcataaaaccacagatttccaacagaccccagctgtgcaggaacgctgccctcctttctcttccctgcccagccccaatgcttgtccagcccccagcagaggaggcctcggccctgcacactgcgagtgcatgcacaggggcactcgcagacacctggggcgacgtcttctgtgaggtgtgagctcattgagagctgggtccaggtctgttcagggttatttctgcagcacttaacagacaaaagttccacgtctacacatgggagggatggagggaagagcgagtgagtgcatgagtgtgcaggtggatggatggaggggtgagtgagaggatgaatgggtgggtggggggtgagtggatggatggatggggggtaagcgagtggctggatggatggggggtgagtggatggatggatgggggtgaatgagtggatggatgggtggaggggtgagtgagtggatgggtagatggggtgagtgagtggatggatggatgggtggggagcgagtggatggatagatggggtgagtgagtggatggatggatgggtggggagcgagtggatggatggatgggggttgagtgaggatggatggatgggtggaggggtgagtgagtggatgcatggatgggtgagtagatggatggttggaggggtgagtgagtagatggatgggtgaggggtgagtgagtgggtagatgatggatggatgggggtgaatgggtggatggaggaatgagtgagtgagcagatggatgggtaggtggatggagggatgggattagtggatgggtgggtagatggatatagggatggagagacgagtgagtagatgggtgaatagatggatgagtgggtagctggatggatggaggagtgagttgagtggatggatgggagggatgaagggctgagtgagtgagcagatgggtgggtgggtggatggagggatggagaggtgggtggatggatggatggatggatggattggataagtgagtggatgaataggtggatggatggagggatggagagatgagtgagtggatggatgggtgggtggatggatgggatatgtgagtggatgaataggtggatggacggatggagaggtgagtgagtggatggatgggtgggtagatggatggatgggataagtcagtggatatgaataggatggttggagggatggagagatgagtgggtggatggatggatgaaatgggtgggtggatggattggtagctaatggatgacaatgaaatgagtaaatggatgggtgggtgcagtgggtggatgggatgagtgagtggatgaatgaattagtgaatcagtgagtagaacaaacagtacttcctcagcacacattttgcttaaaatcagaaagt

SEQ ID NO: 41460 - DNA, 1257 bp, Artificial sequence
  DNA replication origin
tggccaatggctgagagccaggaattgaaaatcaacatccacggagcagctgagccagcaggtgagccagccctgcctgcctggacacagaaagcagtgtgagaatgacagagagagactagtctctgaggccatgaacacaaacccagtcccacatgccccggaactgcacttgaagatgtggccccaaggcagcttcacacccagtgctctgggcggggcgggggggcagcttcacacccagtgctcggggttgggggggcagcttcacacccagtgctctggggtggggggggcagcttcacgcccagcgctctgggaggggcagcttcgtgcccagtgctctgggagaggctgccccagccagtgctcccaaagctgccgccagctgggagaggatggcaggctcccctctgggtcccgggaggctgaaccagccaaatgggagaatggggagatgggggagaagggggagatgggggagatgggggagaagggggagatgggggagatgggggagatgggagcaatgggagcaataggagcaatgggagggtcccaccaccctgaccccacccccaaccggcctgctctggacacactgtctaatcctcagcagccatcccatcagtccaccctaccagggggtcccagggagataccctttaacagacacagaagcgtaggaggagaacgagggcccccgcctcaaccccaggcttaaggccactttgctcaggcactgggtcacggcaccctaagggtgcccctgctgacacatcagcctcgaagggccagccaccctccagaaacaacgcccccgaggtggggagggccccaagtcagcatcgcatctgtcagatacggaacagagcaggaaccgaagcagggaacgcaggctcaagttatgccagagacaggccctttgcctcagactgtggcctcggtcaggaaaggaggcgcgagcgtgtggctggagaactctacaccaaacaccctggtttcctgagtggaaatcacactggctcaggaaaaggaagggggtgagaaggttggttggctggatggctgcttcaagtaatgcgaaaagtaaacccacgaaaccaccttttgaaaacaaagtgcgagggctgtgccatcctggctgcagcagggtcgtacctgcttccctaaccaatgtaccaccttttccagaaatagaacaaagacaaaagcggatgcataataaatcatttcagcctgccagcgctctgagag

SEQ ID NO: 41461 - DNA, 1164 bp, Artificial sequence
  DNA replication origin
agatgcagggagacgcatgtggtttacagagaatgctttctctgtcgagtcgctgggcttgaagtcatttctgatgtgtgcggagatcctagtgtggttaggacaggcagcagcgtgctctctgggctctgggctctgtaccctttgcacggggatcgctgggtacaggtgcgtagtcatcacaagcgtcactttgtccaaggtggagctgctgggttcttcataaaccaaggttccaggccgccgtggaggtgatgcccctgtggctcattgtcctcagctgctggtggccatcaggtgcagggacacctgctatgctccgttctttgtcctcccgagcctagagcaggtgctgtgatcccggctgtgaccccatgagtgggaagcagcctgtgccctggagctggtgacctcacgagaagatggcaccacatcattcttggatatcagcaagatgtgatgccagggagagcgccgcggaggtgccctgggagtggagagggaggtgggagccagtgtggctgaagcgggagggcattctgggagcgaaagcaacagagccaagctggagaggagtaaggggatgaggctgatctagagaggcctgggtggggacagaggtgggcccgcaagccaggaacagaattcggctgtgtggaggccgtgggggcccagcactaaagtggcaggacctggtcttagggaacccccacctgccgcatggagcacagcttggagcagggggagttgccaagaggctgatccagcatctccatgcccggcgccacagtcaccactgctgcagggggatgaaggttctggggcccccacgctgcacacacacatccataaacgccagactctatctctggcctggttgtctttatgaccctgatttgtacacagtccttaatacttgctcgccaagtgagtgaatgctagaggctggcagctgggtggagggaacttggttagccaggggggattgcaggagcccgcaggacactcgggcggggccgttgcaggcaggtgggccttcaggtgactgcgcaggtgcagccctgtcaggaacaggtagggagactcatgcacagcagcggccagcacctcggaggcctggctttgtccctgcagtgttgctcatcttcagtgtctgttgctctc

SEQ ID NO: 41462 - DNA, 875 bp, Artificial sequence
  DNA replication origin
tcccacctttgtcacagacgcagctgtagtcctcccaggcgtcgtggcagcggctattggggggacaggggctcgaggtacaggggtcgtccacatcacagccgtccttcaccctgaccttgagtgcgttgttcatgttcagggtggcgacgttggtgggcgtcccccccatcctcactccctgcattaagtaaacggcactggggctacaggagcccggaaaggtatgtaggggttaagggaaccctgagacctctctggtcccttgcgaggcattcatctgtgatgcctcatttatctacagagctggggcgggcagggttgttcctcttgccccacggcctgctggccggagtgcagtggagggctgggtgaggagctcagagggcacgccagcctgagctcctggggtgcgcggtgggggcgtgaggagtggatgtccctgccgagggggctgagagctgaacgactcagagcagctccctcggccgtagctggaacccctggctccaggggacaggcacggggcccacttgggtgacgtctgtggttggactgggtgggggtggcggcaaggggctcgattcaggacacttcacaaaggcagaggggcaggtggctggcatggcggtggggagctgtgggggccagggacggcccggatgccaaggggaaccgcaggggagaatgggtctgaagaggaaacaggagctgttaaagtggggatgcctgtcagacaaattcttcactcgttgaaagctaacaggttgaccaacggaaccacctatggtgctgccagcctcggagctgcctgtgaggggcaggcctccccccgccccccacaacccccacgcacctgcatgcagcctcggaat

SEQ ID NO: 41463 - DNA, 1361 bp, Artificial sequence
  DNA replication origin
acaggaaagggctggggctctgcctccactgccctgcggtgggaacccctgtgtgtgcctgtgggcatgcatgtgagtgtgtgtgagcatgtgagtgcgtgcatgtgagtgtgtgtgagcacgtgagccatgtatgttggaggctggaggtactttctcaggtttggttggaatctgatggggtggaaagggcttggcgaggagccttagctgtgcccaccctttctggtcctgaccctactttgatggctgccctgcctgaattcttcagcttgacccctcccctcccctccacctccatgccagcaccccttcaaagcttccccctctgctttttccatctgctataactcttcatgtatttttggtttttctgaacatctgacatttttttacctagatggaaactccatgagggcagggatctgttttgttcattcttataaccccactgcctaaagaatggcccacgctggcagtttattagatggatgagtgggtggagggacaggtgggcagctgagtgcaggtgagtaggtggaagggtggatagatggatgaatgatggatagttgggtgggtgggttgatgcatgatgggtggttggatggatggatggctgtgtgatgggtggttggatggatggatggatgtgtgatgggtggttggatggatggatggatgtgtgatgggtggttggatggatgtgtgatgtggttggatggatggatggatggatgtgtgatgggtggatagatggatgaatggtggatagttggatgggtgggttgatgcatgatgggttgttggatggctggatggatgtgtgatgggtggtcggatggatggatggatgtgtgatgggtggttggatggaagctgggtgagtgcttggaagctgggtgagtggatggaagctgggtgggtgggtggatgaacaatggatgggtggatggattcatgggtgaataaatggatggatggaagggtggaggggtgggtgaatgagtgggtgggtatatggaaggatggatagatgagtgaatggaataacagatgggcaaattcgtgtggtgttttatcatttctgacatacccttttcctcttagaaaccctgtaacgttcccctcttggcctcctatctgtgtgctttctctggtagtgaagtttctgacacatgagccacgctgttgggttgtgtcttcaagactgtgctttctgcatcctaggatccagtgttaggactgagctctttgatggggctttgagttgacttcaggttttgtgcatttgcgtgatatgacctgactttgaaattgccctgtgttcctgttcccgggcccttccactcactccttgt

SEQ ID NO: 41464 - DNA, 1811 bp, Artificial sequence
  DNA replication origin
ggtgctgggaaagcgccgggtgcggagccacctgctgctcttgttccgtttcctcttgggatccccgcgtgccgctgtgccttgtcgggtgtgttgccgggctcggggtgacaaggtggcctctgggcctcatcaccctccaaaggcccagacacttcctcacagtccccagaatgagagggaggagggcctggccctctctggctccctgcccagctcctgtcctcctgactggggcagttactgaggcccaggactctgaggggtgacaggggccccacgctccatggaaaccagggtgggagctcttgtgggggccatgggcagggggcctcatggggtgggatggggtgggggctcctggaacacagaatccgagccaggcctggaggacctggacttggcaggctattctgcaaatcccaccccacatctgagcccgggcctggaggtggcaggtgagggcccctgggcaggggccgctgctccgtccctgggagccactggtacccatgacccaccccctgaacgtctcatccaattctgggcctggaaccgatgatgcatgcgactttgcaaccaaggtgctccaccgtcttggcctcagactcctaagtacctcacttgatgatgtgtttactgctggctgagaggctgctgtgtgtctttgtaaagcggtgctcctcggcccctcctgtgtgctgggcatgtggagttgcgtggggtacagccgagctaagtgggaccctcagcacagcacgtcggtggggatgtcgcctgggcaggaccagggcgggcttgccaggcactgcagagtttgagctgagctgcgaggacaggaagaactgttgggaggttgggcagggtgggatccctggaggccagggcaggtgcagaggaggtagaagggggcttcaagtcctcatgtggctggaaccaaagcgtgtgaggagtttcaggcagtgaggggctgaatcctggtggtcgtcagggtgccctgctgagcaccttggggccctctgagggattcggagccagagaaagatgtgatcggagctgtgctttaggaagccagggcaggggttagggtgccggaggagggagggtcaaggtggtggtcatggggggcaggggccagggtgctgaaggaggaagggtcaaggtggtggtcatgggtggggaatggggagtggggatgcccaggctctcttctcctttgccaagcatgcctgaggctgctcctgggatggggcctataggacctgtgactcccgcagcatctgaatgaccctgactttccttgtgtctgcagatggcatccacagcgtcacggccttctgcaccctgcgtgtcaccatcatcacggacgacatgctgaccaacagcatcactgtccgcctggagaacatgtcccaggagaagttcctgtccccgctgctggccctcttcgtggagggggtggccgccgtgctgtccaccaccaaggacgacgtcttcgtcttcaacgtccagaacgacaccgacgtcagctccaacatcctgaacgtgaccttctcggcgctgctgcctggcggcgtccgcggccagttcttcccgtcggaggacctgcaggagcagatctacctgaatcggacgctgctgaccaccatctccacgcagcgcgtgctgcccttcgacgacaacatctgcctgcgcgagccctgcgagaactacatgaagtgcgtgtccgttctgcgattcgacagctccgcgcccttcctcagctccaccaccgtgctcttccggcccatccaccccatcaacggcctgcg

SEQ ID NO: 41465 - DNA, 1072 bp, Artificial sequence
  DNA replication origin
gttcacatttttaacacattgtttagcatgttaatttattttaattgaattaatatatgtcagtctgctagggctgccatttaaaaataccacagaatgggtggcttaaacaacaaacacttgttttcttacagttcttgaggctgcaagtccaagatcagggaggcagcacggccaggttcctggaggctttgttttcctggctggtagacagtgccttcttgctgcgtcctgatgcggaggagaggagagctctctgctgtctcttcctgtgaggatgcaaatcccctggtggggccccaccctcgtcacctcatcattgacccacattacctcccagaggcctcatctccaaaacccatccccttgggttagaattttgaggagacacagttcggttcccagcaacacattaatatcttatatgccgggcagtgaggtttaatgttttaagttgatgaacggttggtctatgagtcgactgtattggttttggttgtctggtgctgtgtaacaaagcgtcccaaacccagtggcctccaactctggtcgtattatctactcacagtgtggccaggctcagtgtggggctggtctctgctctgtggtgtccgggtcctccctggggtggcttgagtctcagcagcccggtgggtcacatctggggtctggggcttccattggccggggccctggacgggagtgctgccttcttcccgatgtgccctctctagtgtgggttctgggcaccaggaagaaagaggcagaaccttccagccctcttggggcctgggccaggaactggaggacgtgtttcctgctacatcctgtgggacccagccgtctcagggccaccctgctccagggcagggcagggcagtggaggcccccttcggagtgggagcagctggggtcggggagggaaggaacgcactctctgaggccgtctcccaccatgtcctttgcctcaggccttttggcctcatttgttttccccacctcttcttctccttagagccactggtcctctgcctctgggctctgcggacgccctctgggctgctccttcctg

SEQ ID NO: 41466 - DNA, 1029 bp, Artificial sequence
  DNA replication origin
gagtaccccaagggtcctgaaagaggatttcagttctcgagctaattgcagacgatgtctgcaattcattcataattaaaaactatttggtataatatctttttaaagattctaatctgcaacctaaacgcaaagaaactctaattaaaattgctgtcactcattaattcaacaaacatttgcgggccctgtgtgtacgaggctgagatctagggatgccaagagggaaaaccacagtcctgccctcaaggtgtccttggcctggtggaaaagacaaatggggccaattagcatggtgagccccacgggggaggggagtccacggtgcagtgcaggtggggggtgagggggaggggagtccagggtgcaggtggggggtgcgggggaggggagtccagggtgcaggtggggggtgcgggggaggggagtccagggtgcgggggaggggagtccagggtacagattggaggtatgggggaggggagtccagggtgcaggtggggggtgagggggaggggagtccagggtgcaggtgggaggtattggggaggggagtccaggatactgacggaagtagagggaagggtatccaaagtgctgaaggggttgggaagaagggagtccagggtgctactgggggttgcgggggaggggtgtccagctgatgggggtatatgggagggctgtccagctgatgagggtgtgggggaggggtgttcagctaatgggggtatatgggaggggtgtccagctgatgagggtgtaggggaggggtgtccagctaatgggggtgtggggagggatgtccagggtgctgacaggatcagctgacaggggcgtgagggaggggtgtcaagtaccagtggaggcacggggaggggtcctgccctgcacctcagtttcaggggagggctctgcaggctgacagcagctgggtgacagcaggaagcagctgtggtcagcagccactcagggctggcatccatcctattgtctcactgaaactcatgacagtgggaggtgaaggtg

SEQ ID NO: 41467 - DNA, 1135 bp, Artificial sequence
  DNA replication origin
gtaaactcccccagagatcaaaaaacacaggtgtgggctagctcgggcctctgttcttctgtgacaagttatgggtgtcattgacgccccctttggaagctcccagagctcccagtggcctttgtgctcagagcccattcagcacaccccagtcatctgaataagcccagagccttgccattgtccccatggttgcccatcaaccgttcgccctcctgcaccgactgccagtttccatggttaccgccaccgctgtaaatgtgatctctgcgccatgggggagggggctgtcagcggctccatataaaaggtcatctccagcaggcagttaaaacctagcgcggtgctgaaaaccgggcgccagggttttgtcgcagttatgtcccttccttgagtcctgcagacaccgtgagcccagctttcctgctgagcaatgctgggaggaccaggggctggggtgggatcatgctgggaggaccaggggctggggtgggatcatgctgggaggaccaggggctggggtgggatcatgctgggaggatcaggggctggggtgggatcagagcagagagtccggactcacagaaaacaacccgtttgggaagataagcgggagaggtcgccgctgagccttgagccaggcatggggtggaaatggacattcagggtggtgggggcggccgctgggtggtgatggtcactcctggagcctggcgtgttctggaggagaggaagaggcacggttctggcttttaggagaggggtttgcagacggtggaggggttttatgtctgacagatgagaaggatccagaagagggccatcccgggccagcgcctaatggcttggggttctgagggacgagagcagaggatgctgggagatggtgtcccaagggtgggggaccaggagcacgcgggaagctgcctcgatacagtttgagaaaattctgcaaaatctcctgtggtagggacagatgggggtgtgggtcatgttacatttcttgctcttgtgactcagtggtgaccgtccttgggacaagtctttgcatatctgtgccagggcttcctgaaaatagatatatacaattggatggatttatcgtgtttaaagcttgatcacattaccaaattgt

SEQ ID NO: 41468 - DNA, 1274 bp, Artificial sequence
  DNA replication origin
actgccctgtagaaaacagggctgggcgtggtggttcaggcctgtaaccccagcaccttgggaggccaaagtaggagtatcccttgagcccaggattttgagaccagtccaggcaatgtagcaaggctccatctccagaaaaaataaagtagctgggcacagtggcgcacaagcctgcagtcccagctactcaggaggctgaggtgggaggatcacttgagcccaggaggtcggggctgcagtgagctatgattgtgccactgcactccagcctgggtgacagagtgagacctcatctcaagaaaagaaagggaagggaaggggaagggagggtggggaggggaggaagaggggaggaagaggggagggtagggagggggagaggaggtggggaaagttggaggaaaggggaaaggggagggaagggtaaagtggaaagaagagggaaggggaaaggggagggaaggggagggaagggtaaagtggaaagaagagggaaggggaaaggggagggaaggggaaggaaaggagaaagaggagggaagagagggagggaaagacgcagaaaaggagggagggagagagggacgttattgagaaactggtgatcaaagtcactagtgacaaagctgactcttccgaagccccagtggcatggccaatactttgctttgtgctttacaaatccctgtgaaattggtctcaccaccccactgtcacatggggaaatcgagattctcagaagctgagtgacaaacctgaggtcaccaggcaagtgacagatgaaccccatgatcatagccccacactctcctgactctctctaactgttcccccttaacattaactattaaaccaccgtggccaaaatcggcagcaaggcgtttttaaagaagcatgctccgtaagaggtggtacagccactgctgaccttaacataattcccgggagacagcaagctgcacaagagtgtgcaccccgggagcaggtccccgcaggccacggcactcggagagaagatcaaaggctcgagttggaagtgcccactccatgggcaactccaggacagccccccttctccgtgcccaccctctgcagcagctttgtcccttaacagtcgggggaggctctctcctgatgaggtaagtggcctcggatggcctcagatggacaagactcagcttagctataatcacaggacagggacaggacctaagacccaagcagacttggagcccttggaatagaggccagcccccagcaatccaacctgc

SEQ ID NO: 41469 - DNA, 1317 bp, Artificial sequence
  DNA replication origin
agatacagggacaggatgcctaggaggtgtcgtgtgatgatgacgcctttaaaatctagcagagaaaatggctgagcgctggcctgtcctgcccagatggaggccactggttggaaagaggtgagggtcgtggctatcctggagccttctgggagctcggggttgctttgaccatcgtagccgctggccttggcggagacaacagcagggtctgactgcatggcggtccccggggcccagtttcccaggttcacagacacagggaacgtctcagggtctcagagaccattctcacgcggcaggcgtgtctcggcattcccatggggattgtgttatttataaactgtttaacatattcattcttagaaatctgacatttctaaattccagccaaactgagactcacaccgccttggaaggcgacgcgccatggggtgggggtggctctggagaggcccctccctgagccctggacgccccaggcggtgagggggtgggaggccacggtgaaggggctgagggacagctggaatttggcaagtaagtgaggccctttggtggggaggggaccccggctgtgagaaatgctcagcaacaaagggctctggcaggaggacagtgaggggacagcgaggggacagcaaggggcgggggtgggggggccacagggtggggatgaccaccacgcaggggacggtcagggggaagcaggcaggaggcagggcccatgtgcccctcccatcccaccctccacccccatcaccctcaccttcctcccggggcaaatcctcccgcacacctgctgggtgtgtggacgagcagggctggcttctgtcccgcgggggccagttggcgcccaggatctgttcacctctgtggccagggcagggcgagagtggcgagagtgggtgggagggggtcagctggtgtcctaggagccgtgggggagggggtctacgcctgcagggccgagtcacaaaggggcatgtacaggctgtgccggtttatggaaggcctgtgggccaggaccagagctgggcagtgatgatgacagcgttgctggcagccagggctatcccggcgggaccaagctatccccagcatggttatcccacctaggagcctacggcctgggaacagccagatgggtggccacggcacaggacggctgaggtgggaggtaggggggtgtgaggaggtagccatgtcctttctccatgcagccccccagtgcctcctctgactgcccactgtactctgggctgtgttaggttctgggaaagaggcaggctcgccggcttcacagtgctcacctgt

SEQ ID NO: 41470 - DNA, 3169 bp, Artificial sequence
  DNA replication origin
ctccaagcaaatcctgtgacccagatcacctggaggccactttttaatagctgtactcaggagccactagcctgctgaggaaggcgctgatccccggtcttgaacttgggagaaccgcaggcctgctcccaggaaaatgctgacggaagcggcgcggtgcctctccccctcgctgggcctaggccgggcgcccacccccagcatccaaccggcggcaacaaatccttgcagagttgcccgggcccggcccaattgcgccccggcatgccaggcggagcccttggcgggttcctgaggctctccaggaggcccatcaggagctactcctcccaccccgacggccactcaccagacacagacacctccatgagcgcctccagcggccggttgttgtccaggtcgcggctgagctgcagttcgcccgtggcggggtccagcagcaacaggcgcagctcgttgccctgcacgaaggtgtagttgaggctgtctgacacgtcggggtcatgggccgggatgcagccgatcacgccggtggggaaactgttggacttgttggtgacatagttgttgaagaggatctggaagtcgggcagcacaggcgggttgtcattctggtccacgagaaggatgtgcaccgtggctcggctcaccagcggagccgacgtggcctgcaccaccagcacatactcccgccggacctcaaagtccagctccaccatggcacgcaggtccccgttgagcaggtccagctggaagaaatgccgcatgtccccttccacaatctgatacatgatctgggcattagggccttcatcagggtcgttagcacgaatctttgccaccaccgaccccactgggttgttctcctcaacaaacagctccagttcgtccttctcaaacatgggggcattgtcattaatgtccaagatggtcacctggatttctaccgaggcgctaaggggagtgggactgccccgatccacagccagagcccaaaggttgtacacggccacattctcccggtccagccggcgctgggtgcgaatcacaccggacgtgggctcgatgtagaagtccccatcgccgtcgtccccaccctggaaggtgtacagcagacgcccattgggacctgagtcccggtccgtggcagagacctggaggatgctggtcgagggtggagcatcctcaaagatggaaccctggtagaaatcccacaggaactggggtgcattgtcattggcatcgaggatgaggatctctagggtggtggtgtctgatttctgcgggatgccgttgtcctgggccatgatggtcagcgtgtaggcgacctggttctcatagtccagctccatcatggtgtacatggtgccactgtcggggtcaatgcggaactgcggcacggggtcctgaatcacgtaggtgatgcgggcattctctcctgtgtcctcatcgttggcactgagggtagcaatggaggtgcccacaggcctgtcctcactgacactcactgtgtaatgggagctctgaaagacaggcctgtgggtgttggcatcagtgacgttgattaggacatgcgcagtgtgcgaccgtgtgccgtcggatgctgtcaccgccagcacgtactgctgctcctgcttgtagtccagaggtagcgccagggtgatgaggccgccccctctctggctgctgagtgcaaagcggttccgggtgttgccgcctgtgagctggtaggtaatcacactgttggcgtcacggtcgcgggcctgcagggtcagcacgctgctccccacggccgcatcctcattcagacgaagctcgtaggtgggctgcgtgaacaccgggtcgttgtcattcacgtccagcaccgtgatggacacgctggtggaggagctcatggggggcgagccgtggtccaccgcctccaccccgaagctgtagtgctccacctcctcgcggtccagctcggcacacactgtgatccaaccggagctgttgtggatctggaaggggaagtcaggggtgggggcaggattcttaggcccagcgctgccgccccccagaaaggtggaggccgtgtccaccaggcgatagtgcagccgggcgttctctccagagtccgcgtccaccgcctgaatgtgcaccacggggtagcccaggggcacattctccagcaccgtggcctggaaggggctgctcacaaagataggctcgttgtcgttgacatccagcacctgcacagacaccacccctgaagaattgatgagcgggggccggcccccatcctgggccttaatgctcagcgagtatttctggacatcctcgaaatccaaggggttgatcacatccaggatcccgctcagcgagtgcaggtagaactggccggccacgttcccgctgaggatgctgtagtgaatggccgcgttctggccctggtcccggtccgtggcctgcactcgcagcacagccgtgttgagccccacgtcctcgggcacctggaccacgtagttctgctcgctgaactgggggtagttgtcgttctcgtcctccacctcgatgtacacggtggccgtggcactgagcgggcccggattgcgcccctggtcgttggcctccaccaggagctggtactcggccgcctcctcccggtccagcaccgcccgtgtgctcaccacgccagagctctcgttgagctggaagacgtcccacgcgccccccaacacgcggtaacgcaagttggcgttgatgggcgagtcgcggtcgctggcgcggatggtcagcacctcgtagcccacctccaggttctcccgcacgcgctcgcggtactccgactgctcgaagaccgggctgtggtcgttggtgtctttgaccaagacagtgatgtaggtggtggccgagcgcggcggcgtactgtagtccacggctttcaccctgaggacgtgcgtctccttggtctcgcggtccagtacgctgtccgtgctcacggcgcccgtggcagagtcgattcggaagtagccccgggagcgctcgtcgaacagcccctccatgtaatagctcacgcgctcctcctcgccctcgatggtgtagtgcgcgtgcagctggaggatgagggtgcccgccggttcgttctcaaacaacgccacctggtagttgggcatcggaaacttcaggc

SEQ ID NO: 41471 - DNA, 1305 bp, Artificial sequence
  DNA replication origin
tcggggccgcggctcagagcctggctccccaccccggcagaacagatccacggagaccgccgccaggagtgccgcgcgggtaggacccgggggcggaggactggggccgagaggccggggagcccccccccacccattaaggactgcggaggctgtcgaggagggttacccattttacagcaagacgcacggaggctaaaatgcttcaccccgactaaaactccctggactttgaagcccaataggcagctaccggatctgcgtcccacttggtttaaagcgcaacttttaaatgaaagaagaaaaccccggttgacataagggatttggagaggacggcggaggcgcgctcatctcccgcgtgcggcccgacccgagcgttcgcggacgcatcgcggaatccccgagcgtccggctcctcccgaagcgggttgcggggaaggcggggggctgcgggtcctggaagctgcctggggcaagcaagcacccgcagggatttagagctgtgccacagcccctgcccagcctcctacggaggacagcggggggcggggggcagagaccttagagctttcagaaaagtgacacacacccccgcctcctgcggggaaccacggggggccgggggcagctttaggtttgcgtgacgggtacacctgcctccggatggggcacagggataaagggggtggaggcttaggacttggcgaccccccgcatgggcggggctttgggactgtgccaccagcggctgggaagggcgcgcactcccttggtggcgctcggggcgccggagtccagtgcagcccttaggcctcccagtggtcggggacggtaggtgggggtcgcctcttctctcctagaagggcttctcctggggccggtcggagcggtgggggtgggagtaatgcgcagtcacccctagaacgggtctttttggcaagggagggtcggatcctgcagccaaatctctgagctgagctgagatgagtccagtctcaacgaggaccgtgggcggctgtggagaaccggaagggtttctcccccggagcgatgtgtctgtgtgtgtgtcacacgcatactcagccaacttcgctcaaagctgctgaaacagtgtctttgtgctgaagcccaatgtgagcattttcttcccagtagcaaggatttgaacacgttatattgatctaaaaggtggagttgctttggaaccttttaattcgaggtttccactggagagtcctgttgggaaatgtgtgtgtggagggaggggaggaaggagaaaagtccgtctccttaatgtgagcg

SEQ ID NO: 41472 - DNA, 1074 bp, Artificial sequence
  DNA replication origin
tggagaaccggaagggtttctcccccggagcgatgtgtctgtgtgtgtgtcacacgcatactcagccaacttcgctcaaagctgctgaaacagtgtctttgtgctgaagcccaatgtgagcattttcttcccagtagcaaggatttgaacacgttatattgatctaaaaggtggagttgctttggaaccttttaattcgaggtttccactggagagtcctgttgggaaatgtgtgtgtggagggaggggaggaaggagaaaagtccgtctccttaatgtgagcggtccaggacctccccacccgccatatacccttccactgggatttttccgggaaggatgaaaggacaggagttctggggccggaaggcagggcgggtccctgagcccggagcctcccagtggaaggctactgggcggacctgaaggggacccaggcaggaggaaaaaccagagaaccccaggagtgcctgttttgcaataaggctttaagcagagtgggttgggtttaaataaacaaaactcagctgcagccagtgggttcaggtgtgggcctgcttttctggaataaggcacctgcaggctgcgaggtaaccacagggactgcccaacacctagggacaggggaggatggatgaatctcactaacaggatgtccagcaaagacaaaagatcattccattcacgcttagaccgacagcaagcccgactccaccataacgtttagaggtgtgcacaaataggggaaagatgaagaaaaacaaggaggtgattatgggcacattcaggagggctctgggggaggaggggcatccccttctggacctgagggttaccagagtgtcggcttcatgatcacactttgaactccaaacacatgatttgcgtacttttccctatgcctgcatctagagtcggcagtttttgtttttttttgttttgttttgttttgttttgttttgtttttttgagacagagtttcactgttgttgcccaggctggagtgcaatggcacgatctcagcttaccacaacctccgccttccaggttcaagcaattctgcctcagcctccc

SEQ ID NO: 41473 - DNA, 1317 bp, Artificial sequence
  DNA replication origin
agccacggagcagggtggtgggcaccacgcaatatcaagtgtccccctttgtggggtgtgtggtccgtgcctgtccatcaggcaggggctctgtctgactctctgcactgcaccagttttgcgcccctaccaagcagggactgggcaccgagcaaatgtctggagggtgggccagatatgaggggctaggcatgctgggtgccctcgtctggtttccctttggcttctgcctgctcactcctaatcctggccgttcacaaaatgaacatttcttgggcgcttgctctgtgtcgcgctgtctgctgcagccccttttctgttggggtactgcctgcctcagccccagtggttcagatggcactgccagtcacagcaccctggcctctgcccccgcagtccccttggctcaagcgtggcacatgaccaagcagggcgatgagaatccttccaggagacttggtggaggggtgtggggcaggagggggtctctctttgggatcgctgctgtgaggatggaggctttttctccactgggagaagcagagaggttcggagatgagaggtgagaagcagcaggtgtcctgctggcagagagactgccactgctgcatccgcacaaacaggttgcctttggggcttggctgaggtgagtcatttgtgtacaaaatgacccggacaatgacacagcctggccaaggtcttgaaatgtggggacagcagcgagggactcgcacaggaaagctctgggcctttgctcccaggagcagctcacctgggctgtcagggagagtggagagaggagacaggaaggagcacaatcaacaatgaaaacgattaaaatgtggtcacagtgctggggcaggaggtgccctaagggccccccccctcccccagagccttggcaggtggagtccgggttcatttctgaccaggctggctcagggcttcctggagtgggcagctctggagctgggcctggcaggctgggtagagttagtgtagggcaggtacccctgggaggatatggccagagtagggagcggtaggcaggaaagtagagcttgtgtttgggaaaaacaaatcctgtttccctggaggacagagataaggcaggaaagcctggagggtttggacagcggggagggggagccagagaggtctggcggtcaggcctggtgctggatgggggctctgggcacaaatgtgagtcatctccgccatcctggaaagagacggtcctgcagacagcgcgccatcgcaccccatgctgcctgcggaggcacaggacagacgccactgggcagcccttgcggaagc

SEQ ID NO: 41474 - DNA, 1124 bp, Artificial sequence
  DNA replication origin
ggctgggtagagttagtgtagggcaggtacccctgggaggatatggccagagtagggagcggtaggcaggaaagtagagcttgtgtttgggaaaaacaaatcctgtttccctggaggacagagataaggcaggaaagcctggagggtttggacagcggggagggggagccagagaggtctggcggtcaggcctggtgctggatgggggctctgggcacaaatgtgagtcatctccgccatcctggaaagagacggtcctgcagacagcgcgccatcgcaccccatgctgcctgcggaggcacaggacagacgccactgggcagcccttgcggaagcgctggatcctttaccctgaaatcactgggtccccagttctgcagacaggaacctgagccttggagaagtacagctcacctgagtgcctgcctctaacccaggtccatcagggctagacctggagggggatcaaagagaggccctgaatcttgccacagggagcttcaggtgcacttgagctggggcccttgagacagaaggaagtggggagggcggatccaggtctggagtctttggattgaaaggttggagatgcctgtgggactcccaaggtcagtgagttgagggcagggcactggggcaggcaagagacacaggaagggcggggcagagcacaggggacccagtctggggagggggaggcagagagggctgggcaaaaacagcctccaggccttgtctattttctccactccggttctcctccaccctcccaccccaactcctcgcaaccatcctcctgggtaagacactaaagcgtgtcccctaaacctagggttctgcagggtgatcccctctgccccttcactgagcagtctcctgtgagctagacagccttaaagcggggtggtgggtggtttttctagagggtccaaaacccggggataggtgggcttagagtgggtcccctctacgggtgtcctgccccgcaggtagtgcctggggagatgcaggggtgtgggtgagattcagagaaagggtgggcccagaggtccagatcctggggacagacagcaccccgggcaccttgggatgggcgcgccaggtactgcgcgagtctagcgggg

SEQ ID NO: 41475 - DNA, 2037 bp, Artificial sequence
  DNA replication origin
cgcgacctggcgccgccgccgcctccgcgctcgtggccgggacccgcggggccgcctcctcccggctccccggcgccgctgggctcccgggcgggcggcaggcgtagcgcggccgggcggccggcgaggggggcgccgcggcgggtggatgagagttggccccgatatccgctcagggtaagcggcgcgcgcggacacccacctaccccgacctggttgccccgcgaccactctcccttttgggctggcggctcgcgacccagctcactcggccgcgctctccccgccgccgccgccgccgcccgggcccgagccggcgaccctccgagcagggccctgcgcgggcgcgccccgcacacgcccccgggtcccgcgcgtcacggctgctccccgcgggcacctgcggccgcaggtccgggttctgcccgccggctgggggagacgaggacatcccggggttgcggggcccggactggggtgggggtcgccggaccgggggtcaccgacgctgggccactggagggggacggtatcggcccgggcccgccaatgtcgtcctgccgatccactcccgggtgggacgggagaggaggagggcgccccagcccctgcttccctacagacgacctctccaaaaagttgtgggcgcttgtcccctccgtgcaccccactttctgccctgtcttctctccctttgttcgggatgttgagctcatggggctctgctggggcgggctggcaccttggctgtagcccaggcccgtgcgcctgccagaacgtggggtgcagtgtggcaaccccggcccgaggccccacatgtctagagcaggacctgcacccctgccaggtcctggacaagggagggaggagagccagtttgttctcagccgggtgggctggtgcccctgccctgttggctgtgtggcagaaggtgcagcagtgccccggggccagggacctgagtgtgactcccccagagccaagtccactttttcggctattgtcaaccctgcatctcctgaggtaggaaagattcggtttgggggagaccttttgcaggatggggttcccttcttgcctgccttgtgtgggttaggaagaaaattcagaggtgtctctcctacatgccaaaaaggaggtgcctgagtcccagcccagtgcagccctgccctggtgctgggcctgggagggaggtcagggtcagggctctgttgcctcagaagtcgagggcagcactcgagagaggagtctgggacttgcctccctcaccctcctgctctgtgaccttgggcaaggtagtgagcctcctgggcctcagtttcctcactagcaagtgggcaggggcaggtaagaggatcgaatggggtgatgtgggcctcctcaggctgggctcgccctgggttggggttcaaaatgggtttaggaggtcagtcatggcctctgccccgggcgctgtggctgagcctgaagtctgaagtctgtcttcctgacttttgtgtcccaggcccatttggggatgcacagtctggccagggtgtgtgttcagttgctgcctctgccccgtgctggggtgaaaccacgttcccctgttgttagctgggactccccagatgagtgacctcagtaaccctgcccctccttcctgctgcacacccttccgaagacccctgcctggtccaggaaaggggccctgcctgtcttgccttgctcctgccttggcagccatgtggacccttctgcagcactttgtggtcccggggcagacctcgaagccccacagtcctcaccgtgctgggctcacagggagatgcagcttggtcctggagcctgggaaattgggcacctggggtctcagtgagccaccagccctctgctctgctgctctttcctctcagctgcccctatggctgatgcgtggagtgcggctgtcccagccatgcagcctgggggcaggcggggcctgtccggtgatgtctgtcttgcactctggagagcacgggaaagtctccaagttgtggtgtgtttccacatagccct

SEQ ID NO: 41476 - DNA, 839 bp, Artificial sequence
  DNA replication origin
gacggcagggggcggggggacctggatgggcgacactccccagcctgctggtgctccagggaggaccttttcagagctgggagaccctggctcagtgtccttgtccctccagtcgctgctgccttcccgaaagccctggagccttgttaaagagggcagccctggctcttggggggagtcctgggtttgggggcggctctgatatgggggagccgtgggtgtgggggcagctctgatatgtgggggagccctgggtgtgggggcagctctgatatgtgggggagtcctgggtgtgggggcagctctgatatgggggagccgtgggtgtgagggctgtgcctcacgtggcccgagggcagatggcccagtgtggggctgggctgtttggggggatggggagggctgcccagggagaaggtgagtgggtggccctattatctgaagacctgctggggccaggggatgtggggggtggctgccacctctgcagtgaccctggaagggcccatgctgcccctgctttgcaggtgagtaagcgggtgtctgagagttcccagctctgcctgcagggcccatgccctgtggctaccccccagtcccgctctgtttgctttatttaagtattttggaagatcactcctcagcctcatggggtggatccttaactcttctggcccagcccactcctcaggtttctaggtgacccacctgctttgtgtgcaccctgaggcctgctgcactgccaggacctcagcccctgccctgctccccagcagcctgactgcctcccctccctcagcccctcagagaggcctcctgtcaacaccctttctgcagct

SEQ ID NO: 41477 - DNA, 1172 bp, Artificial sequence
  DNA replication origin
tgttggcaggatagtcttgaactcctgacctcaggtgatctgcccgcctcggcctcccaaagtgctaggattataggcgtgagccacctcacccagccatattttcgttatttttaataatgtaatgggaacctctgggctcaccgtcaagcagaagccagccttgatacccagcatcctgccagcccctccccagcatcctgccagccccaccccagcatcccgccagcccctccccagctgccccacgcccggctcctgccccagctctgtgtgtcctgtgctctcccttccccaccaccctatgcacacctttctctgcctgggtccacactgtcacctgctgtagctctacccacaggccatacctgcctggtgggcccctcctccctgcccctgtttttgtggaaggacaggtggaagtgggcgggtggggtgggtatggtgggtgatgataaagagcattctaggccagggcaggaatgcaagcacatgggtgtgaggggccaggtgtgttcagggatccttggcacttgtggggtggcgggagcactggccagaggagggctggggtagggggaggctcctggccctctggggggcccttggtagaggaaggggcattgcttgtgtgggtggtgagggacctctggttgggtggggggggttaggtgttttaggaggctttgggtacagagatgtccaggggtaaagtggagcttggtctcaggacagttggccctggcatctgtcctgccctggggggctaggagggccggactggagatggaggctggggctgtcctggtcccaggtgaggtggcatctcctaggagggaggagagggttggtgccctgcaaaccctgggggaggggcagcacggggagctggggttgggggtgaggaggggcgccccacatgttctgaagcgctctggagtggctccagcccggccagcactaagttttgctgtctgtggtttgctgtgcctgtgtccgctgctggtaaccagtgcatcgggacttgggctttctgactgcaccaggtttgtttctgctgctctgagtgcggtgcccagtcaccgaggtacctgtcgttcccgcctcctgtggactgcgtggcctggcgtcgaggcaaagcagcaggaaagttgggtccgcatcccagcccc

SEQ ID NO: 41478 - DNA, 787 bp, Artificial sequence
  DNA replication origin
caggggtaaagtggagcttggtctcaggacagttggccctggcatctgtcctgccctggggggctaggagggccggactggagatggaggctggggctgtcctggtcccaggtgaggtggcatctcctaggagggaggagagggttggtgccctgcaaaccctgggggaggggcagcacggggagctggggttgggggtgaggaggggcgccccacatgttctgaagcgctctggagtggctccagcccggccagcactaagttttgctgtctgtggtttgctgtgcctgtgtccgctgctggtaaccagtgcatcgggacttgggctttctgactgcaccaggtttgtttctgctgctctgagtgcggtgcccagtcaccgaggtacctgtcgttcccgcctcctgtggactgcgtggcctggcgtcgaggcaaagcagcaggaaagttgggtccgcatcccagccccacatgcggcccggggggagagtgtgcctttcccctggagacacacagggtgggggaagtgaagtcagtggcaggcacccaagaggggcacgttttcaatcccagggtgggcgtgggtactaactacaggtagagaccatgcgacgcagcgggtctgcacgcctcagggttctggaacaatccagacggggacatgggggagattggccactgggactggtgtttcacttggctgcctctggacatagtgtctcttccgactttattttcctgggttgtgaatctcccttttatgccacaaaggtcccccacccaaggg

SEQ ID NO: 41479 - DNA, 1069 bp, Artificial sequence
  DNA replication origin
gcacgtgcctgtagtaccagcctccccagaggctgagttgcgaggatcactgggcagtggcacgtgcctgtagtaccagccgccccagaggctgagttgcgaggatcactgggcagtggcacgtgcctgcagtaccacctaccccagaggctgaattgggaggccacagtgacctatgattgtgccattgcactccatcctgggtgaaagagtaagaccttgtctctaaaaaaaaaaacaacaacaacccgaaaagcccaaaacatttttttttgttttttcttggctcttgggttttgccccagagacatacatcgcagaccgctgagtggcgctggttgctgtctgggccggcttggcctcaggcgatcctgttgccctccgcgcaggagcctgggtccaccttctcctggctgtgtgcttccttaaacacggaaggtgttccgcagcctgctgtgcggggtagccctgtgttgggcttgtatgtatcccagggcttggtccatgtgggagagtcttggtaggcctggcggagccctttgacctcagctgggccacatttaaacaaaagaagttgacaaaaggggaggtagtggtttggaggtacacaaaggctcttttcacgggaggagctatttgaggccatgtgggtttacttctgtactagatttgcccagggacccaggaacttctgtaaaatccacctgactcacccattcatttgctgccagttctttggtgccaggccgtgtgctgggccccagggacacggcacgctgatggtcagagaggcccacgcacacactggattccgcattgtggagtgcgagtgctttggggatgtggaacagcagagcagggtctgcagagcatcccaccggggagggccgtggggccccaggcaggaggcggtgcttagggctggctcctggcttcaccagtcttcttcactgtgttgttgtttgtcactgggcagtaagaggcgcctctctgaaacctgaggggcggcccggctgctggtaggtgtggacgggggcctacactggtggctgttctgagtcggttcgcc

SEQ ID NO: 41480 - DNA, 3371 bp, Artificial sequence
  DNA replication origin
attttactattgcgtgtgctgccgaggttccctgggcctgccgcgcgtggcagaaacgctgtgcaatgatggccgctggcatggcgggagtgtgtgcaccaagggcggggcgctgctgccactcggggcctcacttctccttgtgttggttgtctagacttaccaaactgatgaggaaagtgttaacgtgcagatgaagctaaaaattgtgtgaggtctgtagccgttcattacgaatggcgtaaaagccttgtgaaaatattctgccattggaaagcagctaccttattcagcaaggacatttcccgtgttgtagactcacaggtggcgttcccctgcatgtctcccttccacctttgttgtggtttgtaaacggaaacaaaaacaccagccagcatccgtgtggtgctcattggtggtggctgccaggggccaaccgtggagacaggatttgagcacaaattcatgaaagcattctgtgggagtcagttggctgtccagaatttatactttatgggtagtgcacatttcatgattatttgcagatacgtgccgcaggtagtaaacataggacatgtgcctgtgcgtgtaggttcccctgtgcgtgtaggttcccccgtgtgaaggttcccccgtgtgtaggttcccctgtgctttataggttctcctgtgcttgtagcttcccctgtgcatgtaggttcccctgtgcgtgtaggttcccctgtgcatgtaggttcccctgtgcgtctggtttcccccgtgtgtaggttcccctgtgcatgtaggttcccccgtgtgtaggttcccttgtgcatgtaggttcccccgtgtgtaggttcccctgtgcgtgtgggttcccccgtgtgtaggttcccctgtgcgtgtaggttcccccgtgtgtaggttcccctgtgtgtgcggcttcccctgtgtgtgcaggttcccctgtgtgtaggttcccctgtgtgtgtaggctctcctgtgcttgtgggttcccccatgtgtaggttccgctgtgcgtgtcggtttccccgtgtgtaggttcccccgtgtgtaggttcccttgtgcatgtaggttcccccgtgtgtaggttcccctgtgcgtgtgggttcccccgtgtgtaggttcccctgtgcgtgtaggttcccccgtgtgtaggttcccctgtgtgtgcggcttcccctgtgtgtgcaggttcccctgtgtgtaggttcccctgtgtgtgtaggctctcctgtgcttgtgggttcccccatgtgtaggttccgctgtgcgtgtcggtttccccgtgtgtaggttcccccttgtgtaggttcccccgtgtgtgcgggttcccctgtgtgtgcaggttcccctgtgtgtgtaggttcccctgtgtgtaggttcccctgtgcgtgtaggttcccctgtgcgtgtaggttcccccgtgtgtaggttccccgtgcgtgtaggttcccccgtgtgtaggttcccctgtgcgtgtaggttcccccgtgcgtaggttcccctgtgcgtaggttcccctgtgcgtaggttcccctgtgcgtgtaggttcccccgtgtgtaggttcccctgtgcgtgtaggttcccccttgtgtaggttcccctgtgcgtgtaggttcccccgtgtgtaggttcccctgtgcgtgtgggttcccccatgtgtaagttcccccgtgtgtaggttcccctgtgcgtgtaggttcccccgtgtgtaggttcccctgtgcgtgtaggttcccccgtgtgtaggttcccctgtgcgtgtgggttcccccatgtgtaagttcccccctgtgtaggttcccctgtgcttgtgggttcccccgtgtgtaggttctgctgtgcgtgttggttcccccatgtgtaggttcccctgtgcgtgtcggttcccccgtgtgtaggttcccccaagcgtgtaggttcccccttgtgtaggttcccctgtgcgtgcaggttcccctgtgtgtaggttcccctgtgtgtgtaggttcccctgtgtgtacgttcccctgtgtgtacgttcccctgtatgtacgttcccctgtgcgtgtaggttcccctgtgcgtgtaggttcccccgtgcgtgtaggttcccccgtgtgtgcaggttcccctgtgtgtgtggcttcccctgtgtgtaggttcccctgtgtgtgtaggttcccctgtgtgtacgttcccctgtgtgtacgttcccctgtgtgtaggttcccctgtgcgtgtaggttcccctgtgcgtgtaggttcccccgtgagtaggttcccctgtgcgtgtaggttcccccgtgtgtaggttcccctgtgcgtgtcggttcccccgtgtgtaggttcccccaagcgtgtaggttcccccttgtgtaggttcccccgtgtgtgcaggttcccctgtgtgtgcggcttcccctgtgcgtgcaggttcccctgtgtgtaggttcccctgtgtgtgtaggttcccctgtgtgtacgttcccctgtgtgtacgttcccctgtgtgtaggttcccctgtgcgtgtaggttcccctgtgcgtgtaggttcccccgtgcgtgtaggttcccccgtgtgtgcaggttcccctgtgtgtgtggcttcccctgtgcgtgcaggttcccctgtgtgtaggttcccctgtgtgtgtaggttcccctgtgtgtacgttcccctgtgtgtacgttcccctgtgtgtaggttcccccgtgtgtaggttcccctgtgcgtgtagtttcccccgtgtgtaggttcccctgtgcgtataggttcccctgtgcgtgtaggttcccccgtgtgtaggttcccctgtgcgtgtaggttcccccgtgtgtaggttcccctgtgcgtgtgggttcccccgtgtgtaggttcccctgtgcgtgtgggttcccccgtgtgtaggttcccctgtgcgtgtgggttcccccatgtgtaagttcccctgtccgtgtaggttcccccatgtgtaggttcccctgtgtgtgtaggttcccccgtgtgtaggttcccctgtgcgtgtaggttcctccgtgtgtaggttcccctgtgcgtgtgggttcccccatgtgtaagttccccagtgtgtaggttcccctgtgcttgtgggttcccccgtgtgtaggttctgctgtgcatgtaggttcccctgtgtgtacgttcccctaagcatgtaggttcccccgtgtgtaggttctcccatgtgtgcgggttcccctgtgtgtgcagcttcccctgtgcttgcaggttcccctgtgtgtaggttcccctgggtgtaggttccccccatacgtgtaggttcccctgtgtgtaggttcccctgtgcgtgtaggtttccccgtgtgtaggttcccttgtgcgtgtaggttcccttgtgcgt

SEQ ID NO: 41481 - DNA, 778 bp, Artificial sequence
  DNA replication origin
ggaggcacaagcgctaaacaaggaagccatcagggcaatccaaggaccccacgtcaaaccaaacaggatggtggaatgacagcgggcggcgcctagggaatggggcaaatgagcgacgtcccggagccaaacgtgtcgggccctgcagtggggacagaggcggtggtcggagggttgcaaagggggtcggcagagctgcagccaagcctagatgagccagagctgatgagggtgtcgggggagcagccgtgttgacccgggtgcgtggaagcccctggagaactttggcaggggcgctgcagaggctgattttgcctttgaaggcctcaccatgcttgccatgtggagaaggcttcgggaggcacgcggctgcctggaccaggctggggtggtggggagaggggaggcacgcggctgcctggaccaggctggggtcgtggggagaggtggacagatgtgcagccccgtctggaggcgtgcggccggcgtgcgctgcaggttggcagtggagtgaggaacggggctatcaagggctcttgagggtttcacccagacagctggtggacacggtgccatccagtcagagtgccccttgagacccgagtctgtgccaggcgtggcatagttgagatactggtgagctgtccggcttggagcctgcagggaggccaggtcagggggcagggttgagagcagccaaacacccggatacggacatcagcatttgaggccgcctgactgtgcccagctggcaggactgaggcctgaatccagggag

SEQ ID NO: 41482 - DNA, 1026 bp, Artificial sequence
  DNA replication origin
agaaggcttcgggaggcacgcggctgcctggaccaggctggggtggtggggagaggggaggcacgcggctgcctggaccaggctggggtcgtggggagaggtggacagatgtgcagccccgtctggaggcgtgcggccggcgtgcgctgcaggttggcagtggagtgaggaacggggctatcaagggctcttgagggtttcacccagacagctggtggacacggtgccatccagtcagagtgccccttgagacccgagtctgtgccaggcgtggcatagttgagatactggtgagctgtccggcttggagcctgcagggaggccaggtcagggggcagggttgagagcagccaaacacccggatacggacatcagcatttgaggccgcctgactgtgcccagctggcaggactgaggcctgaatccagggaggggatgaaactcctggacaagccttgagtttggggcagcacacatgtcatcagttgtgagccgacctcttgaggctgatgttggaacaatagtggccaaggtcgggcacgggctggaagggcaggatctgcagtctcaggaccccagagggcccagggagctgtgtgtgtgctgggtccttgggcctctttgcatcaggagttagggaggtgcaagtatgtggctgtaagcatggggacattggggtggatgtttttgttttgttcttagagacaaggtctggccctcacccaggctggagtgcagtggtacgatcgtggttcaccgcagcctcaaactcccaggttcccaggcgatcctcctgcctcaaccttctgagcaactgggactgtaggcacgtaccaccacgctggctcatgttcttatttcactttctgtgtcactgcattgcccacctcagcctctcaaagtgctgggattacaggcctgagccctggtgcctggctggcgatggggtattggtagaaccaggccttctttgctggccgcccccggtcctcctgttcactctgcaaagccctggagtctgccagc

SEQ ID NO: 41483 - DNA, 1054 bp, Artificial sequence
  DNA replication origin
gactggagtcctccaggctccagggcagcagacaccaccctctccgtgcctgctggtgttgggcggcttggaggctatggttcctgggtcctcgtagcacatcctggttctgggccaggacctgaaggagccacagtgaaagagtgtttctggatgtatctgagacagacggaggtagggggcagggggcagggggcagggggacatggtagggcccatctgagtggaagccccagccttgggaaaagctgctactctctggggcagtggtcccagctaccacgtgctcttctggagccatcttgatcttgaaaggcaggctccctcccaaggccgggtgcaggccagaccccaccggtaaagcacctgcgcagcccggggccaggggtccagtgaggaagggtggaggcctcctgagaacctggcctggtcaggagggccggcaagaggaggagcctcccaggaagcccctcagaacctgacaggacgagaggaagggaggccgatctgagagggagggaggcccatccgagagggaggaggccgatctgagagggccgcatggctcggagttgcaggggccctgggctgccaggggtgggcctgtaggtgcaggtggaggggctggtcctggggagagcggctgggctgcaggctgaggagctgggcttcctccagggaccgtggagggggtggggatgggcagctagaagtggggagggcaggggccgtctggttggggatgcgcggctgcagcacgcaggacggaaggtgcaggtgagacgcaggtgggcggtgtcgggagacccgggtctggcctgaggtgcagcctggagctatgctcagtgtgtagacgggccttggttcctgcatctgtaagttgggcgtgtgctgggtaatagtgtcctcccccaaaattcatgtccacctcgtacctgtggacccgaccttacttggaaatggctctttgcagatgtcactgagatgaagtcaccctggtgtacagtggagcactcttcagtgcagtgcgggggctgcccatgtggccgtggag

SEQ ID NO: 41484 - DNA, 1047 bp, Artificial sequence
  DNA replication origin
gtgtcctcccccaaaattcatgtccacctcgtacctgtggacccgaccttacttggaaatggctctttgcagatgtcactgagatgaagtcaccctggtgtacagtggagcactcttcagtgcagtgcgggggctgcccatgtggccgtggagggcacccctaccccggtgcaggcgcaggctggaggcgtagcccgggcccatccctggcggtgtgtcgcggagggcacccctaccccggtgcaggcgcaggctggaggcgtagcccgggcccatccctggcggtgtgtcgcggagggcacccctaccccggtgcaggcgcaggctggaggcgtagcccgggcccatccctggcagtgtgtcgcggagggcacccctaccccggtgcaggcacaggctggaggcgtagcccgggcccgtccctggcgctgtgtcgcggagggcacccctaccccggtgcaggcgcaggctggaagtgtagcccgggcccatccctggtggtgaaggctggaaggtccatccctggcagtgtgtggtgacatgtgtcgtgacatggagtttgattcttaactgaccgaagcttgaaaagtctgtctttttgatggacccagggagttgggtgaggagggtggtggagtcagtggggctgagagcagggtcgtctaggaccctgatgtgtggacgccctccccaagggccgctgtgaaccatccagcaggatgaccctgggtttggggctgagccggtggctgggagagcagactgaggagtagctggacactggcggggcacgcattgcattctgatggtgacaggcgggacactcagggcctttgtcccctctctcattgcctcatttgcttgcctgaggtgattgggaaggcagccctggcctcggaattacagcctcccagacaagggggctgtcctctgcccagagccctgcaggcagccaagagttctgtgcgtgtccaagcgtgtcccctgctttccttgggtggaggccagctcggtgccctacacagggcctgcaggccccagcgcccg

SEQ ID NO: 41485 - DNA, 976 bp, Artificial sequence
  DNA replication origin
gagctgaccttgctctcagtgcttccttgccatgctgcccgccccaagcaggaagtttgggaaatacccccgccagggatcactccccgccccatctccttgctcctggcccagttgccctgtcttcttgaattcctggatacctttgccttactggcatctttccattttcagaggcaaaaatgtcagctcagaaagctggtcagtggcaggacaggctttcagcccaggtgtgtacagagcagtcctcccacggggacccagttgtcttggacaagttggggacggggttttgggagaggcatccaggccatggagctgcgtgatggggctggggctgggtggcctctccctgcctggctggcccctcctgtgggccactgatcctggcctccaggcttttgggggtgccttggtgttgctggccaggtcgggcagcgatgtggggagcagtaccccacggcacatccgccctttggcacgtggtgtgtgtgaattacgcgtgtcctgatgcagcacacagtgactcgcacctcagtgtgaccaggtttctgtgttgattggaggaggaggcaggcatgggggctgggacaggaggcccagctggccatgggtgcctgaccccgctgtctctgggagggcttctgggaggtggtgcgatctgaatgtgtctcagagtatgagcctggtcgcatggcgagtaggaacacgctttaggcagagggagcagtgtgggcggagtcctgggagccggggccaggtggagcaggtgggacacaaggccaggtcccctaggtccaggagagaatcaaccgaggcatccctagcacacgcatctgctggtttccaggcgtggctgccgtcctggtggtgtatgtggccgtcgtgttgaccacgttcttgacggtttgttaggcaaccttttggcatggctggccctccttcccaatgccagagcagcattcttcccttgcgc

SEQ ID NO: 41486 - DNA, 1298 bp, Artificial sequence
  DNA replication origin
agcctggtcgcatggcgagtaggaacacgctttaggcagagggagcagtgtgggcggagtcctgggagccggggccaggtggagcaggtgggacacaaggccaggtcccctaggtccaggagagaatcaaccgaggcatccctagcacacgcatctgctggtttccaggcgtggctgccgtcctggtggtgtatgtggccgtcgtgttgaccacgttcttgacggtttgttaggcaaccttttggcatggctggccctccttcccaatgccagagcagcattcttcccttgcgcctgcgcgccgcctcgccgagccaggctgagaaccctggcttccttctgcctgctgggagccgggggcctcgcttggtgggaggcaaggacgcagctcagcactgaccaggctggcctgggtggggtggccaagggccccacctgatgggtgcagggcgggggtctctgggtcggggttttctttggaaagctggaccggccgtgccctgcgtgtgggagctggctcgtggggcttggaggtgtgtgtgggagggacggtggcagggcggggtctctgggtcggggttttctttggaaagctggaccggctgtgccctgtgtgtgggagctggctcgtggggcttggaggtggcgagcgggagagtgaccacgcccctctcttgcagggaacccgagcgtcatgttagggtgaagcagaggacctcagtgctgaacatgctaaggaggttggacaaaatcaggttcagaggtcacaagagagatgacttcctcgatctagcggagtctccaaatgcctcggacaccgaatgcagcgacgaaatccccctgaaggtaccgcggacctcgccccgggacagcgaggagctgagggaccctgtgagtacctgtcctcgtcccccggtgtgggctggggtgtcgtccccgtcctctgtggccgggccaagcgtggactcaggcagattcgtgtcctgcccatgctggtcagagatggactgggcctgactctctgtctcacctgctcccgacccctgcagaccttgtggggccggggtgctgccacgccgagccttctgtgttcgcaggtctgattagcggctggattggttttcctcactggcttttctgggtgggtggcagacttctcacgcacatgtgacgcggaagcctcggcctggccctgggagcgttgacatgcggatggagcagggcgggcgttgtctggaagccgctggtgcctggcttgtcttctattcaagccaaggtgcacgtttccagcccccaaa

SEQ ID NO: 41487 - DNA, 1581 bp, Artificial sequence
  DNA replication origin
tacagaccacagagtgcccggcctgccgggatcggccatccccaggcaaaggttgtggttggtcctgggggtggaccgggaccccggtagggtgtctgcccttgtgcaggttatgtggcagaacggcaggggcctgccttcgccggagagctgtgtctcatccgcctctggctggggctggcacagagggcatgggtcacgattctccgatggtggtctgtgtgctgagcatgtggtgggtgtctcgggaacaaaaatctccctcccgacacatacatggttcaacagggaggggtgacggggattccacgcaaaggccagagcggggctgtttccccagctccctctccgccatccgtctgtcctgctccaggtgttgtctcggtagggaccctcccgcctgagggaccctgtgagtacctgtccttgtcccctggtgtgggctggggtttcgtccctgtcctctgtggccgggccaagcatggactcaggcaggttcgtgtcctgcccatgctggtcagagacggactgagtgtgtgcgtggtgtctgaggggcgggtggactgagtgtgtgcgttggtgtctgaggggcgggtggactgagtgcgttggtgtctgaggggcgggtggactgagtgtgtgcgtggtgtctgaggggcaggtggactgagtgtgtgcgtggtgtctgaggggcaggtggactgagtgtgtgcgtggtgtctgaggggcgggtggactgagtgtgtgcgttggtgtctgaggggcaggtggagggctgcagtgagggggccagggccagggttgcaggtattggtctggttggagcagcaggaggtagggctgtgggatcatgggagtcttcacctggggcagaacatctggatttggggggcatcagggatccccttcgggggagggtcagtgtcagagctggccgctccagggtgatgtctggggagtagcttggagaatgtggctcctgggggtggcagagggtatggcgctagcggtgttgctggcgtcacaggagaggcaggccgtggtctggaccagctctggtgggcaggtggtggtccacgaggtacaagggggcttgagggggcatgttgagttgagagggagcccaccgagtaggggcaaatgctgcagaggccagggcaaggtcagcctgtggactggggccccccttcctcgaggctgtgaggggctgcggggggaaaccacctcagggactcggacgtctggaaacccaggagattcctagtgtgggtgagcagggccccgcttggggcatcgtgctgaatgcaggtcaggcactgactgcagagaccaggctgagttccttagctgtgtaacctggacctgagcctcagtatcctcagcttttaagggggacggcagtctcgtccacccccaggcctgctttaaggatcaaatgagataataagtgaaacgtacgtggctggcgtcttgcttatggttagcttggagggagttgtaattattaatgaccgtgaaatactgattcgctaaaccctcctcctggttccagggctcctttgcgaagcctcgttcctgtag

SEQ ID NO: 41488 - DNA, 812 bp, Artificial sequence
  DNA replication origin
atgctctgtgtattttaccacaacaaataaaaagaatgaagcctacatgtgtgcaaagatgaccaacttcctgcacaataaaagccgtgcaacctacagccactcggcactgccgtcttgcccctcggggcggtggagagagaagcctgagaacagcgtggaggccggggtgggggcacatggccctcgagggagctatggagggcacactgcagaggccggggtgagggcacacggccctcgagggagctatggagggcacactgcggaggccggggtgagggcacacggccctcggggggctatggagggcacaccgcacagctgccaggaccaccacacaggcacactcggtccagcacttccaccaaaagtgccgcagcccacatgggcaccaggctgccaggagtgatggacgctaagagccacaagcacctgcgatccctcagtggggacagattagctgaagtgacgaacatcccagggtgagatcctgagccgctgccaggagtgaggctgcttggggtccgccacggaagagctcctggagcactgagaggggcggtcagaacaccccaggctgcaaggtgggctccggtctgaacctgcccctccagggaaaccctcagaccctaccggtgggcacggagcatggcgcggctgcacatgagaatgcggtagatcctggaaaagggcaatctcgggcctctgcatggcccagcgagaccatgtggaagcacatgcacacaaacactcaatcgcaggcattcagcctcattcatcacagtccaagaatggaactgcccaagcgc

SEQ ID NO: 41489 - DNA, 848 bp, Artificial sequence
  DNA replication origin
gtccccaggagacgaaaggacacaggccgtgaggttctacccatccccggtccccaggagacgaaaggacacaggccgtgaggttctacccatccccggtccccaggagacgaaaggacacaggccgtgaggttctacccatccccggtccccaggagacgaaaggacacaggccgtgaggttctacccatccccggtccccaggagacgaaaggacacaggccgtgaggttctacccatccccggtccccaggagacgaaaggacacaggccgtgaggttctacccatccccggtccccaggagacgaaaggacacaggccgtgaggttctacccatccccggtccccaggagacgaaaggacacaggccgtgaggttctacccatccccggtccccaggagacgaaaggacacaggccgtgaggttctacccatccccggtccccaggagacgaaaggacacaggctgtgaggttctacccatccccggtccccaggagtcacattcagagacaggaggcggaatgcaggctgccggggtgtggcagggaggaattcccaccagggagctggcgtgtgacacgtgctgggcctcagtctgggatgacgaaaggttctggaggtggaggtggaggtggaggtggcgatggtggcacaacagagggcatgtgctccgtgcccctgaactgcacactgacagtgaaaatgaaaatggtacattcaatgctctgtgtattttaccacaacaaataaaaagaatgaagcctacatgtgtgcaaagatgaccaacttcctgcacaataaaagccgtgcaacctacagccactcggcactgccgtcttgcccc

SEQ ID NO: 41490 - DNA, 1001 bp, Artificial sequence
  DNA replication origin
tctgacttgattgatgaatttctgtgaaaatgtcctacaaaggcaaaaaatgaaacaaaggcacagctttatcagtccctttatagcacagatagtacatggaactctgaccctggggcccctgcagggagggcctgccacgtctggtctggtctggcgggctgtgcactgggggcagcgagacagcccccagcactgggaggggcacccggagagaccggaactcctgacagcttttgctgcccaggggggtgcgttagcaggtgtgtgggggccggccccgcctcccatccctgcatctgttgccaggtggggtcctggggcgcagtcaggcctggctcttctgaggtcgtgtttagtagggggactgaccatgattgtgtcaggtgacagtatcggggagaaaacggagctggtggaggggaacttgcgagggcgtggctgggagccgtctgagcagctggtcatgggcggcctctcagcagggatgggctgggcgtgggggggcacccagttgaagaagggcaggtgggagggggtttggggagggattgccatggagggacctcagatttggtgtcaggtgtggggaattggggcagaggaggcacagtcctgaagtgtttcaggtgggtcaagaacagccctgagccaggcggagttggagagagaagtgaggggcattggatgggggggtcctagcagagctgaggggtcttagtgggagtgggtggggcgctggcagtggggccctcgcctggggttgagactgtgcagcacgaatgggccccaggggagcgaggctgggggtatccagggtgaggactgagcgagcagctggactctcacatccaggctcagggtggagggtgccaatctgggaggtgggaggtgccggaaccatcaccctgagtagactggcatagctgcagagctctagatggagcaggctgtgtcccctgccctcaggactctatgctggtatcaagttcttcctcatt

SEQ ID NO: 41491 - DNA, 1377 bp, Artificial sequence
  DNA replication origin
gagcctgtgggccgagggtgggtggtctcccacaaggttggcctttttgagcactcagaagcccctgggaggcccctccgcctcctccatggcccggctccagtgacacctgccatgggcccacactgccccctgtctgtgtggaggggtcagtgtgggctgccaacgggttaggtaggtctgagccttgttccaagttaggagcaagctgggggaggacctgttgcagaggacagaggggtgggtggaaggggtcggtggctatcacagcatggatgtgttcctgggaaggatgtgagggtgtgtttggcaggttcctagcccatcactgctgtgtcccagcaccaaggacttggctggctgggtgggtgggtgggtgggtaaatgggtggatgggtggatggatggatggatggatggatgggtaggtagatggataggtgggtgggtgggtgggtggaaagatggatggatggatggatggatggatggatggatggatggatgggtaggtgaatggataggtgggtgggtggatggatggatggatgggtgggtggatggatggatgggtgggtggatggatgggtgggtgggtggatggatggatggatgggtggatgaataggtgggtggatggattgatggatgagtgggtaggtggatggatgaatggatggagggatgaatgggtgggtggatggatgaatgggtgggtggatggatggatggatggatggatggatggacggacggacggacggacggacagatgtggatgaatggatggatcagtggctggctatgtcgatggagtacgcatatgtcctactttccgaagctgtgccccttagggtggcgtggcccactagacctagtttccgcctggctccagctcccttgctgtgtaacctggggaggtctctgcctccaagggggctcctgtgggcttgaggcacaggaggctaggcagcaccaggtgcacctggcacaggctcatgcccaactccaggggtttcaaaagccaggcaggtccttgcacccttctgtgtctagtctcagcatccagatggaccaagccccaagtgttgctggaaacccctgtgtccagaacccccaggcagccaggacaccaaagtggagaggggccaaagcctgcatgccccctgaccccaaggcactgcctctgcctcaacctcccccacttcgccctgtgccagccctgggtaccctccctgcaggccgcgtccctcgccacctggcctcctgtcttctggaactcaggccctgccccctgctcccagcctccaatgcccacgtccaacaggactctgcttctcagccccacctcaccccacagccgtcactcaggccgca

SEQ ID NO: 41492 - DNA, 1968 bp, Artificial sequence
  DNA replication origin
ggttttggtcttttaactttgtatgtggtgcgttctggattccatgaattctgtttttctgcattctcatctatgctgtatggttcttaccttgtttgcaagaaacctgtcttttgtcaccatttgccagtggcagtgctaagccctaaaatcctcagctcttaaaatccacaacgacctcaggagctgagacctgcggctcaggagtgctcgtggggatgcaggctgcacttcaccatggtcagggtggaggtgccactgtgtgccctgccccgtggtcagggtgggggtaccgctgtgtgccctgccctcctctaggccttggctgtggcctctgccccaggagaggacagcaggcaccccaccaaatgtgggcataaaagcctttcccagggtgggtgcgcattgtagcaaatgccactgggggagggtctggggagagggtctctttgtggcccctttccatgggtgtccaggaggcctttctgagaggtgacaggtgaggggcctaggccgggagtcagctggtgcagagggcagcaggtgggaggagctgggggtgttcgggacaaggaagccagtgtggctgggggtgggggtggaggggcagggcagggcccgagggagatgccgagttccactctgccatgcagcaggaggtcttggaggcggtggttcggcagggggtgacgtctgactctgctccgatatcgctctctgcgtttggtcctaagagcatgtgggccccggtgagaacgctggtggcttggacggtaagggcgctgcatggggtctgagactccggggtgtagctggtggggggctgtgtggagtctctgctccgcagcatcgccttgagtggaggagtaagggtgagggagacacccaagggtggccctgtaacggtcaccatggcaacctggggagcagcctgggggcacaagagttgtgagtgagacctgacagccacagaccctgtgggaggccgcctggatgcgcacggccggtggtggcagcaggtacctgaactcactcatgctccagggttccagccgctagaaggtgcagaggtcactgcttgtcttgctggctgggggcaggagaggcaggaggggcaggtgggggttggggtcctgagatctggagggtgttgagctgcctcccgtggatggctgcctccgggacagatgtcactggagcatctgaaaggcatggctccggctgctttgagacctgatgtagcatgttttaccttccaagtctcttccacatatgtattagtatagatgcattagcaaattgataggaagaagagatcgtcattcattcggtccttcatcgggtgttagcctgtaactgcatctgctgcttgtaacttcagccagcattgcctgctaatgacttaggcacagagaggctcaaggagatgatgcgcatgtcctgggagcaacccccctggagccccgtccttctcgcgtgaacgggagcatgtggttggtcgttactcgggtggcggcagtgctggccgggtggatgaggaactcccgtattcagttgtgtggggaatgttgagaaccagcacagctactcccacaggtatgggtggtcattgtggatgcaaatcattcttttgagcatggtcctcagagggaaggccgtgcgatcagccggggcagctgcagcttccctttcatctgagccagtgaagcgcaggataaaaagatgcataagccgcagccggccccgttcacggggaacatcgggctgaagcagggacctgagctgcctgtcctggctgtcctggtattaagatctcaagtaatggctgtgtgtgacctttgccgcatccagctgtttcagaagtttacgagggccaggtgtggtggctcacgcctaatcccagcactttgggaggccaaggcgggcggatcacgaggtcaacagttagagaccagcctggccatcatg

SEQ ID NO: 41493 - DNA, 881 bp, Artificial sequence
  DNA replication origin
ccgtgccacgggttggctacttgccccgcagaggccctccggatgaggagaagagtgactttggtaaacatggaggacgcatagcccaccctggagagagccctgcaggaggacagagggtttgtttttgttttttgttgttttttgtttgttttttgtttttttttttttttgagtcggagtgttgctctgttgcccaggctggagttcaatgccacgatcttggctcactgcacctccgcctcctgggttcaagcaattctccctgcctcagcctcggagtagctgggattacaggagcccgctactacgcccggctaatttttgtattttagtagagacagggtttcaccatgttggccaggctggtcttgaattcctgacctcaggtgatctgcccacctcagcctctcaaagtgctgggattacaggtgtgagcaaccgcacccagccttttttctttttaattattggggtgggtgtggcagaggccaggattcatgctggatgtgcggagctggaatggggtgggtgtggcggaggccaagattctctggtggatattcggagcctgggatgacacctttagaccctgtgggcagtcgaggtcaggagttcttctgggcgctttctggtgctgagtggtgaggatctgtgggttgggttctggtggggacagagttgaacgttaggtggggccaaggtcgaggggtggtctcagacccatgaccaacacttggtttccagccctggggtcacctatctgtggctgggcatctgagacttgactttcctaaggtatttctcatgtcccctttggtagaaatgtcacaccccaaatatcacccaccagggcccacacacaaggagaacaggtgcct

SEQ ID NO: 41494 - DNA, 924 bp, Artificial sequence
  DNA replication origin
ggcggacgagcccggcggcggagatgggggcgacgggggcggcggagccgctgcaatccgtgctgtgggtgaagcagcagcgctgcgccgtgagcctggagcccgcgcgggctctgctgcgctggtggcggagcccggggcccggagccggcgcccccggcgcgggtgagtgtcgccgccgcccgggttcggccggacctggccagggagcgggggcggcttgggggacccggctggggggaccgggtgcagggagcgagcggctgtggtaaggccgggggccctgggagcgcaggcgccagggaggggtcggggcaggcgggagggaggccggggccaggggccgggctgtgcgccgccgtctgctccgggaacccgaggacaaagcgccgcgcagtggaggggaggccggcgccccatccccgcggggaggtgggacccggggcgcggggtcgtggcccccggtgcggtctgtccgcagggcacctctggacaagacggactgtggatggatcccgagggggggtgccaggcgctccccaccgcgcgcattgcagtttactccaagaacagatgcttttctttagcagggatccgaaacctgagaggcgcccttgcagggtgaggacttcctgttaagaagttaaagaaggggcccctgactttctgtggggtgtgctccctgctcgggatgggggaattggtttccgtgccacgggttggctacttgccccgcagaggccctccggatgaggagaagagtgactttggtaaacatggaggacgcatagcccaccctggagagagccctgcaggaggacagagggtttgtttttgttttttgttgttttttgtttgttttttgtttttttttttttttgagtcggagtgttgctctgttgcccaggctggagttcaatgcca

SEQ ID NO: 41495 - DNA, 1615 bp, Artificial sequence
  DNA replication origin
cccatctccgccgccgggctcgtccgccaggctgggggcgcgcggacgccgaggggcgccggaccgttagcggcccctgcagtggcccgggcggcgggcggcgggcggcgggaggcggcgctgcgtcaccccgtacgcgggcggcggggaccgcggaggggacgggcggggcgggggcgaggaggaggcgtgggtagaggaggggccgggagccagggagagacggggggacccgagaaggggagaagagggaggaggaaggggccgggatggggctggccgaggccagggcgctggggccgggaggcggctgcctttctctcctctcttctccggcgggtgccgggtgctgaatctggcgctcccgcggccggccgggactcagtggcgccttccgcgcgggcctcggttcaggcggggtccgggcggcgtggaaacgcagtcctggcgatcgggcgcggcggggggcgggcctggatgggggcgccacgggcgacgtgaccttgggcggcgggtgccctctacgatcctggcgtcctgtcggcctgggagggggcctgcagctgggccccgacaggcaggtaaggctttcaggaggcggaggtctttttagggggcgggggcgctggccctttgaactgctctggggcctgaagccacagagcagacagctgagcagccgcccccgagctggccctaggaaccggagcctgggccccagacttggagagacacggcccctgtggccccaattcaccgcctccccaggaaggcctccttgaccccacagctgaaggaatcaccagcctgcagggactccagccctgccttcagagcacgccgtgcgccttcatgcaagctccagtctctgcgtccgcagtgcttaacacagccccataggaagcagccacaacctggttcggagggcacatccctccctgatttatcagtgaagactgtgctcacagaggttaagtcacttgcccaagagcacagggctccagtgtggcagagcctaggctcacactgacactgcctggatgtgacactgaggtctgaggcctgcccctcccctcggctcccctacccagccctgctgctgcaggcagaggtgaggtgggctaggtccacgtggccttgctgctgtgcctggcaccaggtggcagcatatacaggtcttaccctgccagctccttgtgactgtcttgtctatagggcgggaaccagccatgaatcattcctccctgggagcccagcccctgttcaggccatgcagtgaaggccccaggacagtcctgcagccaccgtgggcccagtcagagtcctagcaggcagtacctgatcgtggcacacagtggggtgtgcagcagcgaggcctgcccagcctcctccctccctcagctgccgctctgaggcctgggaaatgtggatctgaaacttacttggaaagaaaagctcatgccagtggcaggagggtgccgctgcatgcgaagagggttggcaggcaagggtggcatgggcaggggcccgagagcaccagcgtccctactggggaccccttccctgggcctccctgtgcttaggctccccgtgcccctcccggcgtattcacgtt

SEQ ID NO: 41496 - DNA, 912 bp, Artificial sequence
  DNA replication origin
aggctcctgggagtccgttgcgggcaggtgggcgccgctgttgtgtcgggagagccaggagcgacagactcaaactcagaaacccaaccacctccgctccctccgcgatgcgtgtaacgtgcgttgcgcggcgtcgccctttaataacgacgggcgctcggagtgctgcgtcactcgccaccagggacttaggcgggacttccgggcgcgcgtaggcacaacttccggaaggaggcggaagagcttctcggctctaggctctggagtcccgggagcagtgaggggccacccggggcacaggaaagggccgctaggggagggccgggtgcactcggggtgtctgggccgcgggtctgagggatgaggaggggccatggccagcgacggggccaggaagcaattctggaagcgcagcaacagcaagctcccgggcaggtgggtgtgccgcggagggccaggtcggggtcaggggtcagaggtcaggtggccgcgttggcctcctgggctgcgggtggagtcgggggtctggagagggcaacttggactctgaggagactgctggatggtgtgacgggcgttggggggctcggaggtcggagcgtggggtctgggggtgacagtggctgcacgtaggatcgaggcttgcaaggacgaggaggagctattggcgtttttcctgacactggcaggcttctttccgagaaactcctgggctccttggggaggctggaaggaactgattcgggtcatgctgtgaagtttggtggagtccggaagctggccgggctgaggccccccgtctgctgggtggatcagtttctgcagggggtgtggtgtttttgacccacttgatttgcctgtggtctcttgagggctgcggctcttgccttgagcatagaagaggactagagt

SEQ ID NO: 41497 - DNA, 1186 bp, Artificial sequence
  DNA replication origin
tttggcttgaggctcttttgtgtttggagtagggaaggtttctgagcaggagtgacctgatcagacctcctgctactgtttattgacctcttgctgtgtgccagagacagaggctcaggtcaaggaactggcctgagattgcatgggtaggacgaggccagccaggatgtcgggtgagaaccatggccgtggggaggagagagagaggaaggggactgtcaggaagtgcttgcaattcagttagttcagtagatattcaaaacggaccctgtgccacactttgcaaaaggtgggaaaaaagagccctcccgagaggggatgtgtgagccgagaggggcaggaggacactgcacaggcctcataggacctgaaggcatacgagttcttccccaaggcctgtaggaagaccttgaaggatgttcagctggggagtgacccatcctctgatgggcacaggacgacagagctgaggccaaaccctggggcagccggtgcaactgtcatgttcttctcaggagcaggggatgggtcagggccagggctgatggacaggagaagagagatgtgtgggaggtttccaaggtgacctagaggatgtggagacgtgggtgggtggtgtgcttcagggaggagacgaggctgaccctcctgttggtggatggcagttctggaggtggtcacaggagatacatggtcagaatgagagaaaatggagccccgatttaagttagtgggacagagggttttcgatgccaggacatgggccagtgagagccaggggccgccagaagagggctcgagggagaggtacgaggcagggatgagcacattgtctatttttgtgtgactggtagagagtgatgttgtccaagggtggggaccgaagagtgggtgtgaggagtggccggtggggcacagctgattttttgggggaacccgttgacgtgaggtggtggattcgtggctgagagttggcagtggttttgcttggaggcacgtgtttgagaaccgtttactcgggtggaggaggtcaggagagagcatgatttttcataagagaaggaaggaggactgaggactcggctttggggagcagagttgggaacacacagaagagtctggggcatgcagagaggctggcaggaggcagaggagggagcaagaagaaagagctcagtgtgatgag

SEQ ID NO: 41498 - DNA, 681 bp, Artificial sequence
  DNA replication origin
taggctttatgagagcgtgctgatagatggaggtcagcgggagagggtgttttgggggttgggagggcatgaacagaagtttggagccgtacaccttggcagcactaatacgagtagatgcccccttggtgtccgtggctctagggcagccgtgaaggggcctgggcccttggtgacaggaggaagcaggtgcggccttggagtaggccctcagtgtgatggctggccgtgtccttactcatgaagtggctcaacctacctgtttcgtcagctgtagagggagcatgagacctgccctgcagggtcctcgtgaaggtcagtgggaatttatgtagagtcactcatccaggctctgttgagcacctgctgtggttgtaggcactggggaggaatcggcggcgaggcttgcgagggccctgccctcaaggagctgacattctcgtgtgaggagacagagggagctcgctcagtacccccgcaaccatcagaaggcaggaagcatatagggagagtcaaggcatgtggagggtagaggctggagctgctctgcagttggctgtttctggggcgagatctgcacggagtcaggtatttgaagagggggcatgagcattctagggacaggcccagaggtgcaaaggtcctgcgggcaatagagcttcatgtgcttgaggggtttct

SEQ ID NO: 41499 - DNA, 1299 bp, Artificial sequence
  DNA replication origin
gggtaagagcctgctgcgtgccacatgccgtcacaggagccgggagtgcggccgtgaccaggaccagcaggtgctgcacacgcacacctgaccccatccgcacacaagtgggatggacagtggagctgtgattcagatgatgcaggaccatggtctggggcagcaccacccagggcgacagtgccagcccgggtgtgatttaaagtgtccctgtagccgtggtaaggaagtagcaagcaacaggtgagatgagttttagtaatacattttattaatataatatataaactatatcaccataacacgttataaattcagtatataatagatataaaaactgtcaatgagataacttacactcagttttctgtactaagcctagagtgtgtttcctacttagagcgtctctcagctggaccactttttgggtgtcctgtagcttccgtggctcgaggctcctgtgttggacggtgcaggggtgaagaaggggctgcttatgaaggtgatttggatggtcattctgatggggtgacagtgaagcgtagacccaaaggatgagaggagatagccacctgatgatttgggggcacataaccctctaaggaggggtgtgtggggatgagcttggtgtgcatgtggtccttctccaagaaggccgctgtggctgcagtgaagtgaaggtggagcttggaggcgagcgaggagggaggggaatcagagctgcatcctgcaggcccctgagggcggtggaaggaggtcacattccatgctagttgtggtggaaagccagtggaaggtttgagctggggctggcgcgattcgacttaggctttcagaaagatccctgtggcttttctgtggaggtaggaagaccagttaggagggtggtggctggagtcggtggaggtggaggaggtgatgagaagtctggggtttgagggggtgtattttaaagctgtggggaggaggcttgttgagggactgggtgtgaaggatgagggaaggagggccatcaggagtggctgttgaggatggggcaacttggagaggagcagatttggggagaaaagagacggaatttggcttgggacatgtaaagcctgaggtgccctgagccatcagtcagggtgtcaagtgggcagctggacacaggtgtgtctgtagtgatctgtagccgaggcagatgccaggatggggacgtggggtgtggatgctggagttacattgagacctggcctgcccagcattctttttcatgtgctgatctgcttgggtcaatacatttttaattctgcaaag

SEQ ID NO: 41500 - DNA, 838 bp, Artificial sequence
  DNA replication origin
gtaggcagggtaggaagggatcgactccccagggtgcaagtgtagttggctctgcggggctgagtttgtatggcagcgatgtaattcatccatctgtcggagcgtgtgttcctgaagtctacctcctgtgccttgtttgtatggacaggcctggacagagcagttgggcctggccttagctggcaggcagcccgaaggtcaggctggagccatcagccagtgacccagtggagaggagtgggaactagagggccacacagtagggagtggttggctcttccaaaaagagagtggggagggaacaggtggcagcagagtcttcacggagggagtggtgcttgaagtgaatcctgaaagccaggggagtcgagacccagggtgcgggagtggcaggctttccaggcagaggtaggagtacgggctgatcactcagggggatcgagacccagggtgcgggcgtggcaggctttccaggcagcggtaggagtacgggctgatgactggcaggctcagttggggaagaatgctgtagctcagtgcagccacaatgtgggtgctggctggggagaccctggggcagggaccagactgaggggccaggggtactgcactgggggtggtgggggctctgtccgtgggaggtgaggagcatgcagaggtcttcagccaggtgtgcacatgtgcacgtgtatggtgtgggtgataggattgtgttgcaccttggtataatgaaaccctccttatgagtgaagatgggagcgagtaggtgggaataagaggtggtggagagagggtccactgaatatattgagagtattggagggaggaggccggaatg

SEQ ID NO: 41501 - DNA, 1175 bp, Artificial sequence
  DNA replication origin
cagcctttcagagaataataagatggcagaaatgggccagaaattgaccaaaactaatgaagggcagcttcacttcaaagcaatcactgggtaagcagcctcactgcgatgcctgcactgtgaaaagtcaaatgagaaaagtttatttatagctcaatcgaagtccttggccaccaacaataacctctcctggaggagacagggtgaccctcctctgacacatcaagcgacggaaatgtgcgaccagcaacaacacattccccaagaatatggaaacataaatagcctcaaacacagtgaccatgccaatgagattaaacatatctaaagtgggtgtgtctaaatacatgtgtgtgtgtgtaaaggcatgtgtataggggtgtgtttgtgcatgtataggcacctgtgtatacgggactgtgtgtaggtgtgtgtataggcatgtgtaggggtgtgtatatataagggtgtgtgtgtgtgcatatgggtgtgtgtctgtgtatagatgtgtgtaggaggtgtgtgtgtatatgggggtgtctgtataggcatctgtgtgtagctgtgtatgtgtatggggggtgtgtatatggagagtgtgtatataaggctgtgtgtgtatattggatatgtgtgtaggtgtgtgtgtgtatacgggagtgtacatgtatatgaggatgtgtgtatataggcatgtaggtgtatctgtgtaggtgtgtatgtgtatatgtatatgggtgtgtgtgtgggtgtgtgtgtgtgtgtacaggcatgtttgtagggggtatgtgagtatacagaggtgtgtgtgtgtataggtttgcgtgtatgtttatatgcatatgtgtgtaggagggtatgtgtgaatatgggaaggtgtgtgttacaggcaggcaggtaggtatgtctaggtgtgtgtaggtatgcgtgtgtatatggtgggtgtataggcatgtgtgtataagggtgtgtgttataggggtatgtgtatatatgtgtattggtgcgtgcataggggtatgtgtgtacagacatgtgtggaggtgtgtgtatatatgaggggtgtaggtgtataggcatgtgtgtagggggtacctgtatacaggagtgagtgtatatgtgtataggcatgtgtgtagggggtgtgtgtatagtggtgtttctgtgtataggca

SEQ ID NO: 41502 - DNA, 1517 bp, Artificial sequence
  DNA replication origin
ttatattgtacattgttaaaataacttctattgcaaaatctaataataccacaaaagtttgcaaaagcaagtttttagaggaattcatttgactcaatttccaagtgagatctggcacacgtagaccaaactgaaaaatgtatagcaaagaatctgcaggttcacatatatttttgttgcaaacatgatccaaacaatctcaaaacccaacttcgttttagtgtgagtggtgcagatggaacgtcgtacctcccagagttcagactgagtgctggctccatggctcttgggagtggcggaatcttaacggaacgtgcttccactgctgtgtcctctcggtgaggcctcggccctagcctcagtgttgcatatgtcaggatggacgaacgtgagtcttggcatggtgcaagtgcatctgaattgcatgtctctgtccttgctggagcaaaaccctgttgtttggatggagcggagctgacctgacggttccaggctgttccctgttgtttggttggacgctgttccctgtttggatggagtggagctgacttgacggttcccggctgttccctgttgtttggttggagcggggctgacctgacggtcctggctgttcccggttgtttggttggagcggagctgacctgacggtcctggctgttccctattgtttggttggagcagagctgacttgacggttcccggctgttccctgttgtttggttggagcggggctgacctgacggttccaggctgttccctgttgtttggttggagcggagctgacttgacggttccagcgctgtcccctgttgtttggttggagcagagctgacctgacggtcccagcgctgtcccctgtttggttggagcggagctgacctgacggtcccagcgctgtcccctgttgtttggttggagcggagctgacctgatggttccaggctgttccctgttgtttggttggacgctgtcccctgttgtttggttggagcggagctgacttgatggttcgagactgttccctgttgtttggttggagcagggctgacctgacggtcctggctgttccctgttgtttggttggacgctgtcccctgttgtttggttggagcggagctgacctgacggttccaggctgttccctgttgtttggttggacgctgtcccctgttgtttggttggagcggagctgacttgatggttccaggctgttccctgttgtttggttggagcggggctgacctgacggtcctggctgttccctgttgtttggttggagcggagctgacctgacggttccaggttgttccctgttgtttggttggacgctgtcccctgttgtttggttggagcggagctgacctgacggttccaggctgttccctgttgtttggttggagcggagctgacctgactgttccaggctgttccctgttgtttggttggacgctgtcccctgttgtttggttggagcggagctgacctgacggttccaggctgtcccctgttgtttg

SEQ ID NO: 41503 - DNA, 1852 bp, Artificial sequence
  DNA replication origin
gttcaataagacttttattcacaagtcttattcacagcccaacttacaaggggacaggttgaagtgtttgctcaaggttggtggtgggaggtccttgtaaatgctcagtcatcagtgataagcagaggtcagaacagcccagtgtgaagcctccggggatgtgaacagtccggaactttggcgtggcattcgctcaccctctggatgtctgtatcatttccccgggccccgccgtgcgcagcggtcccgtgctaggtctgtggggtcccagaggggtgggggggcggtcctcatctctagaagcttataccccagcaaagtggttctccagctccacctcacctgggaatcatcttgggagcctgtgaaagatgaagattccggggcttgccacccattcatgctaggaaaggccagcatccgccagctcatgtctccacccggcacacactgagctgggcaggaatgacaaggatataggcacaggagacccagtcccagcccagggagcgctcagacagacggggcgtcttggaggtgcatagacatttctgcctggatgccactccagggtggatgtgctcgtcccctactgccactctgccccgtgttccagcagccgagtaacttcgggaaatcccagtcagtgctgtcagaaacgcaacatgcatgccctttactgtcctgtttagaaaatgagcacctgtgtcccctccaggtggatgctgggcctgcagaagctctcctgggggtgtccggtggtgggtcctggtagccacagcctctgcttcctcagcgtccccttcgtttgcttgctccaggtctgggtcggttgcagttgacagtagcggggagggggtggctgcgtgttgatagagacaggcactagaagtcatctttgggggagtggcctcgcagagggggtggctgcttgttgatagagacgggcacgagaaatcgtctttggtggggagtggcctcgcggagggggtggctgcttgttgatagagacgggcacgagaagtcgtctttggggggagtggcctcgcagaggggttgttgatagagacaggcaggagaagtcgtctttgggggggtgtggcctcacggagggggtggctgcgtgttgatagagacaggcacgagaagttgtctttggtggggagtggcctcgcagagggggtggctgcttgttgatagagacaggcatgagaagtcgtctttggggggagtggcctcgcagagggggtggctgcttgttgatagagacaggcacgagaagtcatctttggtggggagtggcctcggggagggggtgactgcttgttgatagagacgggcacgagaagttggtggggagtggcctcgcggagggggtggctgcgtgttgatagagacaggcaggagaagtcatctttggtggggagtggcctcgcagaggttgtggctgcttgttgatagagacaggcacgagaagtcgtctttgggtggctgcgtgttgatagagacaggcactagaagtcgtctttggggggagtggcctcgcagaggggttgttgatagagacaggcacgagaagtcgtctttggtggggagtggcctcgcggagggggtggctgcgtgttgatagagacaggcacgagaagtcgtctttgctggggagtggcctcgtggagggggtggctgcttgttgatagagacaggcaggagaagtcgtctttgggggggtgtggccttgcggagggggtggctgcgtgttgatagagacaggcacgataagtcgtctttcggggagtggcctcgctgagcttcttctcaggtcctgtgcacctggcaggctgcttcagccttc

SEQ ID NO: 41504 - DNA, 1111 bp, Artificial sequence
  DNA replication origin
gctggggctggggcctcctggcccatctggcccactcgtcactttgcacaggggaatgtggaggcgataagaggggccatgacttgctgtgtcaccaagtaagatggaatgaatggggcctagactgcggtctcctggccagcctcctgctgtcctccacagtaggctctccatctgtgcagagagcagtgctggctgggcaggcagcaggcacccactggcctggccacttacctgtagggagaagggcccagcctctctggtgcacagcggccactcctggtaggacggtgcccagagtgcttggttcccaccggccagcacacacaactgtatgctgcctcccggagagcctcccaggggacttgctctccaaatgaaggcggctggctgccgagagtcagtcactgggctggccatggagcttggatgttcctgcctcggtggtgtctgtgactggctggctggggagctctgttccctggaggccctgggcagacattgctgccctcctgggtcagccatgcctggtggtgggaggtggggtgggagaggactcggggtgtgcctgaagctgcagggcactgtgctcaggcccatgctaacaacagaccatgtctcatcgtctccagaaatcaccctgggccccactctgggcagactctaagccacacatatgcgaggaatggaccctgagcacattctggttggggagagagaacagtaaagaaatgattgaccttcagcaaaaggctgtgcctccattgacgactccatttcttctgtctgctcccaaatagggacagtgtcacaaggtggctcgaggcagaccagacacacactggccgtgggagcttgtgggcggggtttcttcctgttgtgaatacgtgcagaagtgtcactccggccctggaggctgaagcaggccatgagcccctcagggtgaaggacaggagatagggacagctgtggatgccagggtacctgagctaggtctgggggaggtgggtcatgagagggtggtgttgggtgggcagtgggcctcctaccaccctgtcatgtggtggtcccatccaggggccactggcaggggcagacttggaccaagaaa

SEQ ID NO: 41505 - DNA, 937 bp, Artificial sequence
  DNA replication origin
ccctcagggtgaaggacaggagatagggacagctgtggatgccagggtacctgagctaggtctgggggaggtgggtcatgagagggtggtgttgggtgggcagtgggcctcctaccaccctgtcatgtggtggtcccatccaggggccactggcaggggcagacttggaccaagaaacggaattgatggcagccttgacagatgcaagtgacaaggtgccctcattcctcaccctgccgcagctcattgggcttttctgtgagggatacattgtgtttgctgttgggccggagacattgctctgctgctattagagggtgcagcgtgggcagctgattaaaatgtttggccagccttctctgagcccggcctacttaacttgagatgaagggaggacaggagtcaggcaaagccacacggccagggtgtggggtgtggggtgtggggtgtggggtgcagggtgtggggtggagtgcacactctgagagcctgtggggcccctgtgacttgagtggggaaccgggaggaggcgctggcagaggagccatgagattgattttcttcctttagaggaagaggaagttggttctttgatgccataggggttggatggagagaatgctgtgagtgaggggttggatggagagaatgctgtgagtgccacaatgtgttgtgggcactgaacccaatgggaaaggaggtgagaaacagaagttacaaacctgaggagtcctggtgagcacggggaatgtgtgtgtgcagttgtgacattttaggaagacgcttccgcatccatgggaggccacctgagcgagtagggcccagaacatgattccccaacagtggaacgttggtggaaagcggctttaaaagccctcatttgttgcagccttgtgatttgtcccttgggaaatgatgtgtggctttaagtcatttt

SEQ ID NO: 41506 - DNA, 1836 bp, Artificial sequence
  DNA replication origin
ttactgggggtttcaggccgtggttttgcacccagccgagcacctggcgcgtggtcggaatggaagggctgtttcccggctggcaggatgtttgtgcacccagtcctgatagacatgcttttctgcatgctttcatttggagttccagcatccttttgggccagtccattgctgtcttgagtcactagtgaactcacacccaggacccatttagtgagtccgtcaggcctcaacctgcccattggctcacagaatggcccgtggcagtgggccatgtctctgtcaaatgggactgatcttgcaatgctgcattagccttcgacaggctaatggcttcatgcaggtttctctttcatcctgtgttcactggaagcagcaaatgtcatgaaatgccaaagtagagatcgttgtctccgtctttattgtttcaagacattttaaagacaaaattgggtcaattgaaaagtaatctctgaagtgaattgtgcctttgtgtgcgggttgctgcatgtgtgaaagtgtggggtttgcagggtcatgcgtgctgtgagatcaggtttgtgttgctgtgtggggtttgtgttgctgtgtggggtttgtgtggccatgtggtattagctctttggaccattcttgagcagaagctcttgggggcccacatgcctgcctcccatgttctgatgcaacaccgtgaaacaggaaagaggacaccattgacaacggctgggcacatggcaggtccatggtgggtgcgcttactgccggattaggcctccccgaagaggggtccttgtgtgggagcggcagagagagaaggggactcttgggtcagcgggggagggcacgcctgagctgagcatttgaatccctgctgctgcggtgggggtgggcgctgcccttgtgttttagcaagaactgcagggtaaatgcaggaaggttggggatggggtggtgatgtgcagggttcagagggaagggcgccgtgggagctgggacctgggctcagctgtgaggagggagcagagctttccttgtgggagagctgggtaagaggacagcaaacccctgagtgaagcagggctgagagccgcctggaggacaggctgcccacgccaggccctcgagccagcctaggggcgcatgtcctgggacgcattgggaccttgcctcttcttgacctgggcctggcatgggcatgcaggtggaagctctatggggaggggacctgcctgtgcctctgtgcacgtcattttcggagctaacacatgcctggtgtggagttggcaaatcagctgggcacggggtgctgccctctcagccacaggtggcaccgaggggcatggaggaggcaagctggtcccagaggcagggcttggggagtgggccgcagggcgagggggacagacggggggcttctatcctggaggagcgttgggccttcaggagcagtgaggggcccgcgggggaagcaggtgatgagtttgggctccaccgaggtccgccagtctgagcacagctggtgtgaggacactgaggcagcagtgccgcagggccactgggaggacaggcgggcagaggcctggaggggacagaggacaaagatggtgcctgcagagattgggccaggcgggagtggagacatagaggctgaaggagcgtgggtgggacaagccctgtaaaggagggaggggcaggggcttgcagagggtggcggggaggcagccttcatgctgagggtgagcacagggaccaggtgtggccagcacagtgaccacactcctgccccaggcccatggggcagcgccctccagagacccaggcaaggggcgacatctc

SEQ ID NO: 41507 - DNA, 920 bp, Artificial sequence
  DNA replication origin
tctgtggcttccattctcagaggcacctcgtggcctgagatggctgctgaaactccagccattgcatccatagtccagcctggcagcaggaggataaaaggcacctttccctgccaagacagcttcctctataagcttctcctgaattccacccactgcttccaaatgcagctcacgttcatgaactgagtcatgtggtcatatctgacttcaagggagcccgggaaatgcagtattttagcagggcttgtgcctcctttcatgaagaaaattaaagttctgttcctaaagacggggagggtggctgaatggctgttgagtggtacttggcagcccctgccatggtgctccaagcagaggaaacagcatgggcggtgacccaggggccaggagaggctgcaggcagaaaggcgtgagagaagggggcccggtctgcctgggggaggtgggttcgagggggaaagaggtaaggaggcggccatgcaggtggacgggcaagggaaaagggaggagctgtggccgtcgtgcaagcgaaagatgagagataccacccaggagtgagccgggaagcaggtgcgtttgcaggatgcctaggaggtgtgcctagaacccgcagggtgtggtgacagattgcaatggctgggggagggggcacagggcaaggtcagagaagaaggagaagaaactggggacgatgtctgcatttgtttattgggtgactggccgagtgctgtcgccagagatcaaggtaaagacccacaagggcaaaggcagcttgacaggggtgacgatgagtcccgtgtggaggcggggagtggacagagcctgtgggaggtccggggacactggactggcctgtggctctgaaggtccgcagaagtcactcttgggcatgggagggtgggcagagagtaggagga

SEQ ID NO: 41508 - DNA, 1652 bp, Artificial sequence
  DNA replication origin
cctcccactgccccggagcccaggtgtccacgtggcctgcaggatgccctggccctgtgcttggggctgcagctgcgtcagctaccggcggccctgtgaagacctccacccgctgaccaggaccaggacgttcccttctcccaggcgggtaggatcaatgggccacatgattccagggggacggcagagcctggccccggatccccagtgagcggcaagggagggcccctcacacggaacctgagaactctgctgggcacccaccctgtatcctgaccacgtgctccagctccaccccaccctggctcctcgatcaggcggtgtccacgtcctgtccacacgtgattcccagcactgagtgtctgcacgggaagcacaacccaggctgtgtgaaggagaaggagcggcggggaaaccaaggaaggggttgggcggcccggcctcccctgcccttcccccaccctcctccacctcacgtgctgagtgtatgcaagtcctgtgtgtgtggtgtgtgatgcacatgtgtgtatatggtgtgcagtgtgtgtgtggggtgtgtgtgagtcacctgtatggtttgtatgtgtgctgtgtagttttgtgatgtgcatgtgacacatgtatgtggcacatgtgtgtggtgtggaggatgtgtgcatgtatggtgggtgcactatgtgaggatgttgtgtctgtatgtggagtgtggtgcgtgtgtgggggttgtgtgctgtgggtgtatgtggtgcatgtgtagggtctgtgtgagtgtgtggtgtgggtgtttagtgtgtatacatgatgaatggtgtgcagtgtttgtgtagtgtgcgtgtgtatatgtggtgtgtggtgcatggcgtgtctatgtgcatgtgtgtactgtgtatatacgtggtatgtggtgcatgtgtggtgtgtgtgtatagtgtatgtacacatggtgtgatacgtgtacataactgtggtgtgtgtgtagtgtgtgtgtaatgtgagtatacatcgtgtgtgtgctgtgtgtaaacatggtgagtatgcatgtcgtgtatgtgttgtctgtgtgtttacatggcatgtgggtgtggtgtctgtgtgtatacatgctgtgtgtttgtatggtgtctgtgtgtatacatggtgagagtgtggtgtgtggtgtgtctgtgtgtatacatgagtgtatgtgctttgtgtgaatacatggtgtgtgtgtatacatgtgtgtgtatgtatacatggtgtgtgtggggtgtgtagtgtgtgtatacatggtgtgtgttgtctgcgtgcatacatggtatattttgtgtgtggtgtctgtgtgcatacatggtgtatggtgtgtgtgcgtggtgtgtgttgtgtgtgtagtatccgcacacatggtgtgtgtgatgtgtgtacacagtaactggtgtgtgtgtgtatatatggtgaggtgttatctgtgtgtatacatggtgtgtgttgtgtgtggtgtctgtgtatacatggtgtgtgtgtatacatggtgtgtgtgtgtgtatatatggtgaggtgttatctgtgtgcatacatggtgtgtgttgtgtgtggtgtctgtgtatacatggtgtgtgtgtgtgtacatggtgagtgcatgtgatgtgtatttatgtggtaactgtggtgtg

SEQ ID NO: 41509 - DNA, 1715 bp, Artificial sequence
  DNA replication origin
gtacctgagggtggggcacccagacggggttactcagaggggtgtggcgcacctggaaagctgccctgagaaactgaggccctttgaagggccttgcttcagtaacacagggcaaggagggtgtttcagtgtgtgggtgagggtgaggcaagtgtatcccaggagaggcgggggggaccccagaccctggtgcctaccccggaacagcccttttcaaagcaggtgcttgacagatgtggcccaaggggaggtcccttgttcaggagcctgacaggggccagcctggaccccacactcccgtgttccagctagtgcagagccgggcttcgggggtcagactggtttctgagtcttgccccgcccgggcaagtggcatccctgcaccacctgagcagctgcagccccatctccctgagaggtcctgcggggggcagcgagatcacgggtgctgccgggcccacgctggtgcgccgcaatggccctgagctcagaccctcggcagggctgggccagggtgcccctgtcctcgatgggcaagtcctcgaatcacaggccaaggccgcggctttgtcactgatctttattccgtgtttttagcgcaccacatccagacagcacaccccgaacattccagatggatctgctcagacttaaggcccgcggccaacacctctcacattcagtcttggcgtttacatacatgaggaaatgcacacagggctgaactccgtggagcttcctgtttaaaacatcaaccacctcgagaagcaggtcagttgtgtccgcagccttctggccacacggcatgatctgagctggagaaggggatcctcccagggctgatctcggcaaagcgacatggggcttcctgcacacggccgaggggcggctcttcttgtgacggaatcccctccccatctagaaaaggaggcggcaggaggaggaggcatggctggtctgaggaacccttgaccctggggtggggacacggaaggcaggggtaaggcgtgcccgcatctgatgtgaagcaagcccatccctttgctggtttgggagcatctgacgtttgcacagcattttgtgctaatttccatgctgtgtgtaatgaccctggatttttaaaacagaagcagaaacacacacatcacttatgcctgtatgtcccacagtctctggcagtgtcctagggcctgggagaggacacggctgctcctgagggacagaggagagtctgggaagtcagtcaccagtgggtcgctgaggacgtgagcctgtcctgggctcagggatcagacagactgtggctgtggccctgcccgcattccaggggtcatgcagcctgtgacacaccgagggaacgctgggaagccagtcccaaggcccctggagccaaggacacagccctagcagggcgctgggcagggaccagctctgggcccttccgcacttagagccccaaggaaccagtccacagcgggaaccagtccagggcagaaccagtatacagcgggaactggtccacggcgggaaccagtccacggcagaaccggtccagggcaggagtggtccagggcaggagtggtccatggcggaaccggtccatggcggaaccggtccacggaggaaccggtccatggaggaaccggtccatgatggaaccagtcacacctcccctacacctggcagacctggacaaggacagcaagtcccaggaa

SEQ ID NO: 41510 - DNA, 874 bp, Artificial sequence
  DNA replication origin
gtcagctctttgccccagcgttgcctttttggagttcctctgtgcttggcccatctcagtggaccccagcctgttctccccatccctccgccctgcagctttgtcccctgtgtgcccattgctgccagccatgctgcttgtttgctcagggtgttctcctcggaagtgttggccccttttgttcactgtcgtatctcagggcctggaaggatgctggacacacagcgggtgttcactgtgtgttcttagactgatgggattctttgacttgggaactcgggctggacactagagcagcgagccctcaggtggcaggttagatgtgggtttacggagagagagcaggtgatcggtcagggttagatgtggggtgacggagagagagcaggtgatctctcagggttagatgtggggtgagctagagagagcaggggatctctcagggttagatgtggggtgacggagagagcaggggatctctcagggttagatgtggggtgacggagagagagcagaggtggagggagtggctgggtcctccttactagtgggagccacaggtgagggatgagggatgcctgcctggggtggggtcagagtgtccagtgggctggtgaacattgccgggttgtggggacgctcaaaatactttcctgttcagcccacggccacccccagaagctgagacatcctgacggggcctccgttcctggccacctccaagctcacacatcacggagcccccaagcctggagcagccctctctggtactcgccccattcggcccaaacacacaccccgttcttttgttgggctctcttgaaggctgggcccccgccctgtgggtctcctcgcactgcttggtcctgtgtgg

SEQ ID NO: 41511 - DNA, 1822 bp, Artificial sequence
  DNA replication origin
cgtacatggatgtgtatgcatacatgcacgtgtgcacaggtgtcttgcatgtgtgtgcctatgcacatggatgtgtatgcgtgcatgcacgtgtgtaccggtgttttgcatgtgtgtgcctgtgtacctggatgtgtatgtgtgcatgcccatatgtacaggtgttttgcatgtgtgtgcctgtgtacctggatgtgtatgtgtgcatgcccatatgtacaggtgttttgcatgtgtgtgcctatgtacatgtatgtgtatgctggcatgcactgtgtacaggtgttttgcatgtgtgtgcctgtgtacatagatgtggatgtgttcatcacgtgtgtacatagatgtggggggcaggagaagggaaccgacaggtcagatttaacttcctcaaagatcactgactgcaaaaggaatgaaggcctggagggggcagggttggcccagattgcaaggctgctgcaggtgcctgagggcagtgttgggggtgtgtgggggtcactcgcgactggaaggggtgaggggagggatgctgagaaaggagctggcagccccatgcctcagggaggaggggtgacagagggatgggggtgtggcacagggcagaggaggtgcaggcaagagctgggtttccaatgcctcaaactggaccacaaggcagacttctcctggagagaccaggtttgtggggtgggagggtgcggggtgggctcagattctgtggcaccttgggccactgtaagggtgtggagccttccgggcatccatgtgcgggcatcagtgggcagatctgtacacggatggaggctccgcggagcattccgagctggagatctcatcttgggagccctgtgcacatggacagcaccctaacccctggcctcagtgtgatctgagtggggacaaagaataagaacaggaagggactagcggcagccgtgagaaactgcagcgagaatgcccaggtaggagactgcatgggggccaggaaagggccaccctgatcctaaaagaaacacaagggctgaataaggacagagaaggattcggagagtggaagaggctctggggaatggcagcaggagacgtctggtgcgaggaggctttggagacaccagcaccctggggccttcggtgtgagctgggcctggaggtgatggggtggaaacaaggacgcagcgggccagggagggagggaggggtgggctggtgacggcacaggagggaggggagtaggggagaaagaacaaccaacaaaatggccctgagggctggacgcggtggctcacgcctgtaatcccagcactttgggaggccaaggcgggtggatcacgaggtcaggagatcgagaccatccttgctaacatggtgaaaccccatctctactaaaaatacaaaaaattcgccgggcatggtggtgggcatctgtagtcccagctacttgggaggctgaggcaggagaatggggagaatggcatgaacccaggaggcagagcttgcagtgagccaagactctctgtctcaaaaaaaaaaaaaaaaaaaggccctgaggagataaagcgatgggcccctcctactgccagggaagacagacgtgttagcaaatggaatgaagccacccattggcagtgacaaaaaccaaggagggcacatctcagcaaagccgggatgctttctgaaaagaaaacagattaacactaaagatacacaccaaccacatccatggtctcatggggtcatctacctgcctgccccttcccagacatgcacatggtcactgctataaggccagagaaggtgtctcaggcccacgcctccctca

SEQ ID NO: 41512 - DNA, 1426 bp, Artificial sequence
  DNA replication origin
aaagccattccaagtcaggggtctcgaggtcatccttgaccctcttcccaatgctccctgggcccctatcacctttcctcatggggtttctcaatgcagagcccacttagggtttaggaaagaaaacttgctcgaacgtcacttctatctctggcccatgcactaatcgtcaagtgcacctgtagccccccatgtggcatcctcccctcccctctccaaatgcccttcggagggcgggtcctgctgagagcagagcccctggggcccggtcctcctgccttcattctttcctgggcagcctggcttggcctcaagcaactcttcctgcatgcagggactgagtagggcagggattggcagggagcgggtagggcagggactgggttgggtagggtagggattgggtagggcagggagcgggtagggcagggacttggtaaggcagggattgaatagagcagggattgggtagggcatagattttgagtagggcagagattgggtaggaccgggactgggtaaggaagggatcgggtagggcagggatccggtaggaaaggaattggatagggcataggttgagtagaacagggattggtagcgcagggattgggtagggcaggaattgaatagggcatagattgagtagggcagggattgggtagggcagggatcgggtagggcagggattgggtagggaggggattgagtagggcagggactgggtagggcagggatcaggtagggcagggatcgggtagggcagggattgaatagggcatagattgggtagggcatagattgggtaggatagggattgggtagatagggattgggtaggatagggattgggtagggcatagattgggtaggacagggattgggtaggacaggattgggtagggcatagattgagtagggcatagattgggtaggacagggattgggtaggacaggattgggtagggcatagattgagtagggcatagattgggtaggacagggattgggtaggacagggattgggtagggcatagattgggtagggcatagattgggtaggacagggattgggtaggacaggattgggtagggcacagattgagtagggcatagattgggtatgacaggattgggtagggcatagttgagtagggcaggaattgggtagggcatagattgggtaggacagggattgggtaggacagggattgggtagggaggggattgggtgggacagggattgggtagggcaaggattgagatatttcttttcagtcccctccataacacggacataacatgcagctggtgaataagcaagtggaagaatgtagtccacacaatttgtgataccaacgaggacagccaggcccggcggatggcgtggcctgaccacagccatacaggggctcctctgaagccc

SEQ ID NO: 41513 - DNA, 2528 bp, Artificial sequence
  DNA replication origin
cactcgatgattccaagctccttccgacctccttcccagcctgtgagaccccgtggctcatctcctggggttgagggggaatctcagtggactttgaagcttagtctgcaaggacctctctcccaaacccgagggcagcatccctgcccccgggagccccttcagggagcccgtggcctctgcctgccttctcacagatgggtttgggtaaaataaataaaacatggatggattagttcagaataaaaaaggaggaatctggctcaagatgttatcaacagtaacaaccaccagggctctgagcgccgttcatcactaagcatgtccagtgctctatggccattaaaggagccccctgggagggaaggcacctcggttccagtctagcgagggcactgtggccacagagctgcacgaggctgaagcccatgtctgcccagagccagcctccgtttcccagaccctgaggaccactttcccaaaaggctccactgctggtgtgtgtgggggcagcctgagtcagtgagcctggaaagttctagggacatctggagtccacctgtctcccaagagaggagttcctcatccctctccagtggctgcttgataagtcactctctcttcctacacgctgggtgaatgtgctgcttctgaaaagagaatatttattttttgagatagggtctcacgccctcctatgttgcatcattcctcagtgcccaaaacggtgcctggaacagagaggtgctccacagttatggaggaattgaatgaatgaatgaaaatttaaagaagaaggtaggagaggatccatgcaaggggctggtggcttctctgcttcctgattctgtttcttcatcccctcctggacacctgggctcttacagaattggtttgtgcagtgtgaaaggaaaatcaatcttgggaccctaaaatcactaaggtccacaaagggaaaagtcaagctgggaactgcttagagcaaacctgcctcccattgtagtcctaaaaaagatggctactaagataaaaaagccacatacctccctcacaagaaatttccttgtggaccaaggacagacagaactcaaagtcatccctctgttcactgagatgaatgcatatctgcctcctttggagaggctcatcagaaacggaaaagaatgcaaccatttgtgtcttatctacctatgacctggaagcccctccccggttccagttgtcccacctttctggacagaagcaatgtacattttacatatattgattgatgtctcatgtctccctaaaatacataaaaccaagctgtgccccaaccacactgggcacatgtggtcaggacctcctgaggctgtgtcatgggcaggcacccttatctttggcaaaataaactttctaaattgactgagacctatctcaaatgtttgggattcacagcagggaatgatggaggattggaaagtgcctcgaggggaggagggctgctctttgctgtgaggctctgttcgggtgcacattttgggagctggcctggggctttcctttcctttgtttccgtggcagccagagcaaggtgtggcccctccccgtggagctcatggtgctgtggataaaggatatgtagacaggcagtcacagcctccccactctgtgatgggcagggcaggaaagttagagggcatgaggtagggtaagcccaggaaggcttcctggaggaggtggcactttgacctgagtggagaccagagtgagattctgagagtttatcaggtggacccagggagggggagggagtggaagagcatccctgatggggactggcacataccaagacttggggcgagagctgcaggctagaatctgggggcatcatcttagacagagtctttatacgtccacacagagttcaagaaaactgagaatagactcacataatcctgaacataggtcaattttgaattccagatggcaagaataaagagaatgaggcagacagtaatggctaagtgatttccagaattgaagaaaggcccaagttctccagctgaagatgttcactgagtcctaaataggatcattaaatagaaatgcacacctgggcccaatgttggacaacaaaaaggcaaacaaagcatttttaaagcaaacacagaggaaatacaaattactacaataaagagagaggggaggaaggaagaataggaagagaaagaagaagaaatttaagaggaggaggaagaagagaagaaggaagaggaggaggaggaagaaaaggaagaggaggaggaaaaagaggaggaggcagaggaggagaaggcggaggaggaagaggaggaggaagagggagcagaggaagaggcagaggaagaggaggaggacccggcggaggaggcggagacggaggcggcagaggaggaaaaggaagcagaagaggaagaggaggaggacgcggcggaggaggcagaggaggcggaggcgaaggaggcggcggcggaggaggcagcggaggaggaggcggaggaggcgga

SEQ ID NO: 41514 - DNA, 777 bp, Artificial sequence
  DNA replication origin
gttggacaacaaaaaggcaaacaaagcatttttaaagcaaacacagaggaaatacaaattactacaataaagagagaggggaggaaggaagaataggaagagaaagaagaagaaatttaagaggaggaggaagaagagaagaaggaagaggaggaggaggaagaaaaggaagaggaggaggaaaaagaggaggaggcagaggaggagaaggcggaggaggaagaggaggaggaagagggagcagaggaagaggcagaggaagaggaggaggacccggcggaggaggcggagacggaggcggcagaggaggaaaaggaagcagaagaggaagaggaggaggacgcggcggaggaggcagaggaggcggaggcgaaggaggcggcggcggaggaggcagcggaggaggaggcggaggaggcggaggcggaggaggcggaggcggaggcggcggcggaggaggcggcggcggaggaggcggcggcggaggaggcggcggcggcggaggcggcggcggcggaggaggactgacaatagcaacaataactggctgaaagccagctttgtaatatcctcaaacttctgaaggaaaataatgaaggctagaatcctctaccaaactaaaaccaatgaacaccctttaagtctaatgcaagaaattcagacaaacggagcacaagttatgacaagatggttctgttgaatggataaaaatgtgggcagccagcccggcacggtggctcacgcctgtaatcccagcactttgggaggccgaggcag

SEQ ID NO: 41515 - DNA, 1909 bp, Artificial sequence
  DNA replication origin
gttggtcaggtgggccacgggggagacagcacaacagaacacatgaaataacagaagcggtttatcactcccaggtccacagagaagagggtcctgcaaggaactgcgggaagtctggagacggcagggagctcaaccagcaggtggtcgggggtggagagggagagagagagagacctgcgggactaaagccttctttggaatcaaagagattaccggggcaggtttcccatagggagttctaattggtgggtttggagcaggcaggagttctgtgggatcatgagatggcagatgggggtcactgctgcgtagacctgcacagtgcatgtgggggtgggttcactgctgtgtagacctgcacagtgcatgtgggggtgggttcactgctgcgtagacctgcacagtgcatgtgggggtgggggtcactgctgcgtagacctgcacagtgcatgtgggggtgggggtcactgctgcatagacctgcacagtgcatgtgggggtgggttcactgctgtgtagacctgcacagtgcatgtgggggtgggggtcactgctgcgtagacctgcacagtgcatgtgggggtgggttcactgctgtgtagacctgcacagtgcatgtgggggtgggttcactgctgtgtagacctgcacagtgcatgtgggggtgggggtccttgggttgtattcagctgtcctgtagggcacggccccctggcaggtggtggtataaggcagacatcttgatcgactgccttgaggaactgggaggagatggagaactggaactccgggagagggtgactgagctttgcttctggtgtgagagttacacctatattcagaatgcacgctgagacaaggtagaatcacaagaatgcactgcagttggcctcatcagatcaactttcctaaagagctgaatggacagtggcttgcttataagagccctgggaggctggaggacagatgagggtggctcggctaggtgttggcaggacaatggtgtgagaaggagcaggatctgactaatgcggtggggacagtgccatcagcattgctgctggattcgacgtgagtgagaaacagggaggaaacagccgacccccaggtttgcttctcagagctgagtggaaaagtctgagaggagagtgggttttgtctgggcagggtcgtggcctcaccgagcatgccttcagcaggatgggcagactctggggcagaaatgtacaacttagcatgtcagcgccaatgtaacaagacttacttctccccacgccgtccaccggggctggtcttccttcatctcttgccctccagagccaaggtccccaaggtgccactgcaagggaaaccatgggggaggagcagcccgactcccttagggcaaagaagattgggactcacaggtggcacctgggccatttgctgagtgctctgggctcaatatgggcttgccctgccagtctacaaacatgcccagtggtgtgaaagcccccagccaaggacagaggggagtgctgcagggatctcctgtgtcaactgaagaaccatgaggttcagagatttggaagagctttctttctcgtaaagggctgcagcctgcaagtggccatccacaggctgggaagcgtagcctctgacataagctggaaacaggcacttggagggagggaagcataagacaggaatgtacagtgagtggggagactgaatatacatattcaataagctatgagaggagccctgaatatttatgagagcaggagatacatgcccatgcccatttgagcttcatacctcttcagggatcacatgttcaaaaactggcagcattaaggtgacccgaaggtggagattttggccctctaatgtcaaaaggtgaaccacagcacacggaagctgtcac

SEQ ID NO: 41516 - DNA, 1153 bp, Artificial sequence
  DNA replication origin
gtgcacagaggctgaggggggtggggggggtgtgcagaggctgagggggcagggggtgagcagaggctgggaggggcgggggatgtcagaggctgggaggggcgggggatgtgcagaggctgggaggggcgggggatgtgcagaggctgggagggacagggctgggaggagcagggatgcacagaggctgggggacccgggggcacgcagaggctgaggagcgggagatgtgttcacagaggctggggggtcgtgcacagacgctgagaggggcgcggggtgcgcagaggctgagaggggcagggtttgcacagaggctgagaggggtgaggggtttcattattaagaccttattccctcctcccagaaaacagcctggccttcctcatctctgctgagaggagagttccttgtctctattatcattttaagaaaaaatttccagttaacatgaaaaatgaaagatgtattacacttagttttactttttggggaaagtacattctgcagttactcaagggaaacaattaggacttaaaattgacagacatgacttgagatatgaaaaacatggactcaattaatgagagtctggaaatgctgattgcccgtctgcctgggctgtgcacccagcatgtgtggcgacggcccctgctggtcatcctccgccacctgaccccacccagatcgctctgtgcctgcgtcgggtctgcaaggagctcttttctcttgagccgataaatgtcaaaggcagggtagagctaagcctgttgaggcagagaggtccccagtctctgtggcctggacctgtctgagctgtgcggtgagtgttacaggctgggctgtggtctctgtccccacccattgtagctcagacctagaaaggaagattgatgtttgtgagtgtgatgctgatgcggaaagaaagggaagcaaaggcaaagtgcatagaagcccagagcgtggggacactgcccaggccagggacagggaaactttcagggcattggtgtggaagccggtcttgaaaattgagcggaaatgtaccatttctaaggctagacctaaatactgaatgaagccccaaggaaattagaggaggggccttggcaaatgaagcagaaatcaaaggccaggtgcagaggctcacgcc

SEQ ID NO: 41517 - DNA, 766 bp, Artificial sequence
  DNA replication origin
agcggggggtgttcacggaggctgggggtcgtgcacagatactgagaggggtggcgccgtgcacagaggctgaggggggcggtggggtgctcagaggctgagggggcagagggtgcgcagaggctgagaggggcagggggtgcaaagaggctgagaagcgggggatgtgtttacagaggctgggggtgtcatgcacagacactgagagaggcggggggtgtgcagagactgagaggggcagggtttgcacagaggctgggagggacggggggtacacacaggctgggaggggcagggggtgcacagaggctgagaagtgaggggtgttcacagaggctggggggtcatgcacagatactgagaggggtggcgccgtgcacagaggctgaggggggtggggggggtgtgcagaggctgagggggcagggggtgagcagaggctgggaggggcgggggatgtcagaggctgggaggggcgggggatgtgcagaggctgggaggggcgggggatgtgcagaggctgggagggacagggctgggaggagcagggatgcacagaggctgggggacccgggggcacgcagaggctgaggagcgggagatgtgttcacagaggctggggggtcgtgcacagacgctgagaggggcgcggggtgcgcagaggctgagaggggcagggtttgcacagaggctgagaggggtgaggggtttcattattaagaccttattccctcctcccagaaaacagcctggccttcctcatctc

SEQ ID NO: 41518 - DNA, 1983 bp, Artificial sequence
  DNA replication origin
atattcagttagaatctaaatacagttcattgctagaaaatagatatatattatatttacataatatagatattttactttttatatgtgatatatatacatatctatgtgtgtatatacatatctctgtgtgtgtatatacatatctttgtgtgtgtatatatgctgtgtgtgtatataaacattttctccttgttaggatcaattatacagtcttacaggtctgtttccaaatgataaattctacagcttttaagaactctttaatgagaggctcccaaaaaagcaaaattctatgtttccctcttaggactttacattgaatagtatgatcagacatccatgtgtagatttttttttcaatgtgtaaatggtttattgacaatgagaaatgtgcctaacccgtctgggttataaaatacccgctttactccagggtttcagaactccacatactgatgtccaatcaggtttcttttgttttatagacaaacgtacagagttgaggggaggcaagtacagtcaggaaatgctcttgaacatctgggccacagaagtccctgaagaaccagtggccaagactgtgattcgggtggtttagaggaaacttctctgccaaagaccaaacggcgttttgagttgtccacggattgaacctgagtctcctagtcgcccagctgatcgcatcagtgaacttgagttgtgcttacagacatcagggatgtctcaggcacacgaggcatgggaagtgtgtcttctaagaagggaacggatgggcaaatctgcagagagctgaggacacaggggtgagtgggaggactcggttttgttggtttgggttttttggtgaggagagctggggcagggagggagggtggtgaatggccccattaaggccaagggcacttccagaagagtggcaggtgaggctgaaggagtggagctgaggccctcccaccccactaagggaagcccgaggatggctttcccatcgtgctcagcacatggagggatggagaaggaggagggcaagtgacttcagggacagagaacctccaggaagacacagcagtggccccaattagagaccagaagaccctcaattcaagcaggagatggggagattcaagcgataattgaaggtggagtcagcagaaacaaaagcccgcagaatgttgtttgtgaggttaatagaggcactgacagcagcttccaaatgctccatctttggcagcttcctcaaaggataattccaccaattaaaacagaagtgtagaggggagagctagccagtaggcaatttgctgcgtggatctgacgctgagtctccagtagaggtggggtggccaggagagaactgcacaagtgaggcctcagccagagccagggaggggcaagagagtgcacagggcagcgcaagggatgcccagaggcagtggtgctcagagccaggattcaaagaacaaagaggaggtcagtagaagcaggggggctgcatagaagctgagagtggcagcggggtacacagaggctgggaggggcaggggatgcacagaggctgagaagcggggggtgttcacggaggctgggggtcgtgcacagatactgagaggggtggcgccgtgcacagaggctgaggggggcggtggggtgctcagaggctgagggggcagagggtgcgcagaggctgagaggggcagggggtgcaaagaggctgagaagcgggggatgtgtttacagaggctgggggtgtcatgcacagacactgagagaggcggggggtgtgcagagactgagaggggcagggtttgcacagaggctgggagggacggggggtacacacaggctgggaggggcagggggtgcacagaggctgagaagtgaggggtgttcacagaggctggggggtcatgcacagatactgagaggggtggcgccgtgcacagaggctgaggggggtggggggggtgtgcagaggctgag

SEQ ID NO: 41519 - DNA, 1430 bp, Artificial sequence
  DNA replication origin
gttgactgtgctgattctccagccctaattataatgagcatgagcatgaatgtcttgaaatatagacgcatacgagctgccaaatacggtgagtcatcatattcccaactttcaggcaagcttaggtgccaggggaagcgacctatacatcaaagagatgaagtcctggtttctgcgggcgggggcggggagagggctggggagctgttggctctggggtgggagcgcatattcctgtctgtcagatcagaggatgcctgagaggtgacagagatggggctttttagtcctgtgaaattcgagataggcctgacaaatcatcttaataaaaagttctctgaagagaataattgggggaattgggtggagtcctggcagctcccacaggttggcaggtgccgagggacaggcgacactaccaccccacggggagtgcaggcacgtgtgcgtgagcgtgaacacgtgtgtaaatgtgtgtgtagttagtgtgtgcatgtgagtgtgcatgttgtgaggatgtgtgtgtgaagggtgtttgtatgtgaacgtgtgtgtgttagtgtgtgcatgtgagcttgtgtgttgggtgtgtgtggagggtatataagtgtgtgttagtgtaagcatgcatgttgtgggggtgtgtgtgtgggtggagggtgtacaagcctgcatgaatgtgtatgtgaacatgttagtgtgtgcatgtgtgtgtgttgtggcggtgtatgagtgtgtgtggagggtgtataagtgtgcatgagtgcatgtgtgtgttttgtggggtatatgtgtgtggagggtgtataaatgtgcatgagtgtgtatatgaacatgtgttaatgtgtgcatgtgagtgtgtgttggggtgtgtgagttgtgttgagggtttataagcgtgcatgagtgtgtgtatggacatgtgtgttagtgtgcatgtgagcgtgtgtgtggacggtgtgtaagtgtgcatgtgtgtgcaaacatgtgtgttagtgtgtgcatgtgtgcattgtgggagtgtgtgtggagggtgtgtgtgaacgtgtgtgtagtgtgtgcatgtaagcgtgcatgtttgtgagtgtgtgaagggtgtataagtgcatgagtgtgtgtatgcgaacatgtgtgtgttagtgtgtgcatgtgagcgtgtgtgttgtggggggtatgtgtgtggagggtgtgtgtatgtgaacgtgtgtgtagtgtgtgcatgtaagcgttggtgttgggtgtgtgtggagggtgtgtaagtgtgcgtgtgtgtatgtgaacgtgtgtgttagtgtgtgcatgtgagcgtgtgtgttgtgggagtgtgtgagagtgtgtggagggtgtataagtgtgcataagcatgtgtgaccgtgtgtgtgactgagcttgtgtggccctgcacagttgtgtgtgcttgtgtgcttttg

SEQ ID NO: 41520 - DNA, 1299 bp, Artificial sequence
  DNA replication origin
atttcctccagagggactgtccttcctccaccccagccccagtacccaggctgtgtgggtcgtttgcacctttgcgcagcatcaggggcccctccctgtgggttttactgtgcactttattttggaagggttgaatcgtggagctttctccccaccacatcgtgagcgtctcgaacgcttcacttttgttctcccagggaaacttctgtgtcttagattaggtcccgtgcctgcatgggaacaggggctcaagagataaacgtggagtttaaaaagtgcatgggtagggggtctcaggacagaggaggaggggtgagcagagagcactgagtggagtgactatgggggtcggggcccgggtcggggcgggggtcggggcccgggtcggggcgggggtcggggcccgggtcggggtgggggtcggggcccgggtcgggcgggggtcggggcccgggtcggggtgggggtcggggcccgggtcggggtgggggtgggggctgcacagacgcatggacagtggtgtggtgagtatcccagctcagacccatgaacttcctgagtctggagtgatctgcaatggtgggaacctgggctttctaagagaagaaacgaagaaaacaaacactaaggcgcagggagagaaagaccctcctggatgctgagaatccggctctcgctttcccagaaagggtgaggcaccaggtcctagcaacagcagatgaggtctcaggaatgataccggccatttcttgtattatttaaggcaggggttcgcaagttgccttctgtggacccctgggagtgccagagataatttcagggtgttcttcaggttaaaactatgttcatacgcttgctaagaagtgacttgccttttgcactgtgttgacattcgcaagggtgtgcagaattgatggcaacaggtaagacttaggatgccttgcaatgaattatagcatgtctccaacatgtgccactgtcatcgtctccttcaccacacacgtttgcggtaaggcaggtggacggatgataacgcatggacagacagacagaggtaagatgggaaaacactgtttcactcatgaatgtccctgacaaagcagcacagaacttcaccttggagcatgcatctttttagtattccatgtgaagagatggaaagtgcactgaaaacatctctgctgaccatggaaggaaccttgctggcccgaggaaaagcattggtatggctgtttaagttccgggctgagctagctgttctcttcatgaaagaacactcctcctcgtagggacgtctgt

SEQ ID NO: 41521 - DNA, 1350 bp, Artificial sequence
  DNA replication origin
tcatttctatggttaattagaaagatatctccacgactagcgggcattttctggtttctgctgaagagcctgttctgctctgcatatctgtgcaatatccaagctggggtatggaccctgggagaggagagacccggagaagatgaaaggatgagggtggaaacagaatggtttcacctgcaaagcgcaactcacatatttgctactggaacatgctgagggctggggaggtgtggatgttttatgtaagtctacacagcattactgtagtgatttaggaaaaggctcttttatgagaaaatggctaagatatctgaattcagctcttgcacaagcaggatagaacccgcaggctgcagtcaaaagggacattttatttttcccatgaaagcaaacatttcctattcaacagaaagacaagcacacccagactctgccaggtggaaatttaagattgggtgagggtgattttcctcagcctcctgcaatgaagacaggctcagggctattgcaagtctcccacctagagcaattagcagccgcattaatgtgatgcagaggggcagctgcacttggaggtaggaatggggagatacgggtgggatggcgaggtgcaggtgggacagggagatacaggtgggatggagaggtacagatgggaggaggggattcaggtgggttggggagatgcaggtgggatggggagatgcaggtgggatggggaggtgcaggcgggatggggagatgcaggcgggatggggaggtgcaggcgggatggggagatgcaggcgggatggggaggtacaggagggttggggaggtgcaggcgggatggggaggtgcaggtgggttggggagttgcaggtgcggtggggaggtgcaggcggggtggggaggtgcaggcagggtggggaggtgcaggcggggtggggaggtgcaggtgggatggacaggtccatgtgggaaggggagattcaggtgagatgtgtaggtacaggtgggattgggaggtatagctaagcatctcctctggcatatcaggccctgcctcatttgccggactcagaaggggcttctggggtctggactggacagaatccttttcccagcccaaagcctgtcctgaccagggcaaagagcccactctgtggatcagcctagtgaggaggatctggactctgtcctgcagtgagcagccagcgtgcttggaatttggtgcaggacaggagacttcaccaagggcaaactcaggcccaagactatccccctgggcaggagaataacgcagcagccctcagccagtgtctcctcctcagccagtgtctcccaggtccatccgcgcagccagtg

SEQ ID NO: 41522 - DNA, 876 bp, Artificial sequence
  DNA replication origin
aagatttctaaagcggcactgtccgaaggcacctgcacactgtcatggaagcacaccggcaccagggccagaggcactcggcacttcctggaaactttggaagggaagtgcatctgtatttctgcaggagagaggagtgtgaggttgtgtggacagggagtgaggacaggattctgggcagagggagtgatgtaggtagaggctgagctgcatgagaggggagtgtgagatcgtgtggacaataggtgaggacaggattctgggcacagggagtggtgtaggtagaggctgagtttgcaaaaccctgacagttgacaaaggtacaaataagttgggatggctgggacacaggtaggtggatagaggagaataaagagtgggggaggggcctagggaagagagtgggggaggggtggggcctggggaagacagtgagggagggtcctggggaagggggtgggggaaggggaggggcctggggaagacagtggaagaggggcctgggggaagagagcaggggaggagcctgggggagcagcaggtaatgtaagttttccaagaccagtggccaatcaggcaaattatgctgaacctagagagaaacatggatacaattaaacaacattcctcattacctcaggccccagtaactgaaattcagatgacacaggtgggctggcatgggaggaaaatggtcggtactatctaggttgcgcctctctgctttgatctaatccagttccctgagggacaccaccctgccctgctaacggggttgtgtttgcatgcagatttgtccttctatgacctcagttcccttaaaaaggccagatgttgtcagtgaagagggacttcagagtggaaacaggacaaaca

SEQ ID NO: 41523 - DNA, 760 bp, Artificial sequence
  DNA replication origin
ccagtgctggtgtgagacctgcccagccttcctccaggagagtggcagggactgtgccaatgcttcctggcaactttaggggcagaggcaggcactggggaaacctgtaacaaacactatctcagaaaatgcgcgagcacaggcttgaccaagcgggagagatgtgaccgggtcctgcaaacatcggaagcccagtgctgcagtggaaggaccttcccttttccagacgccccagagagcggagcaggcatccgtgggtggaaggagggcttggggcagccgagctggtcagagagtggatgtggagaaagggacccagtgggcgctggggagcaggagggcctcgtcccttgcagaggtcagccccaagctgaggtgggagcagcttctagaacagagagactccgttctcttgaagtctttaaccacccttcagggcactcactggggccagggcagggactggtggccccatacgggagggtgccaagaggagcgtgcctgtctgtctctgccccggggaatctgtgactgaggaaggtggtgcaggaggcagcagggatgggcgggattgagccacccccagggcgtccagacttggctgctcagggtggctttgaggctcagggtctatccataccttctccaggagccactaaacattcacacttaaaataatgaacacacttcccctgaccctgcccatggtaagccttttgcatctttgtatggtgcagcccaggaccctccccagcgcttc

SEQ ID NO: 41524 - DNA, 1323 bp, Artificial sequence
  DNA replication origin
gtagcctgcaggggtcaggacctccctgtcaggaccccacatgggaccctgccatgggaaggggttggcagccagcactgcagacatgagccgccccgcagcccagggtaaggcaggccctgatctcagttgtccggctcttgggaaggcagctctgctcccagggttctggggggcggtaaaggtggcaggattcatgggccccccagactttcctgggggcccctttattgggctgggttgggctgcggagctctgtgtgaagtgcaccagattgaacccaggtccctctgactcagagcttggacgtgggcctccaggacactggcctcccatttggtggcctcacattcttgaagttagacccactggctggtgggatgctgaatggctggagtggaggtggttcctgcaggaacagtctgtgcaggcagcgccaggcagtgcaggagagctgggcgtgggctgcagagggccactttgcagctggggcttgtacagaggagagaagggttgagacagccgggggtacgcggctcacctggcttttttcacagacgttgctgacccctgctcagtgcctggctgggggatgagcatgaagaggacagggaggatctgggggctcaggcagagtgcaggaagctctggtgcagtgggaggagggagggaggagcagagcctggcgtggggctgctgggggagacatctaggctgacctggggccagagaggccttcttgggaccaggggtgcccgggctaaaagagcaaacaagggccccacatgaccctgcaaccccactgctgggtgtatacccacagaagtgagaacgggctggaagagtcgtgtgtgcacccctgttcacagcagccttatccacaacagccaagatgtagaggccacccaggtgtcccatgacagatggatggacggatgaacactgctgtctctccatacgatgggaaatcacccagccttaagaagggtgctgcatggcacagcatggctgaaccctgaggacattgtgctaagtggaataaggcagtcaagaaggacaaatcctgtgatttccccttagaggaggtagctagaatagtcagtccacagggatggaaagtggaaaggtgggtgccgagggctggggagggcgtggggagtgagagtttaatggggacagtttcattttgggaagatgaaacgttctggaggcggagggtggtgatggcacacagtaacgtgaccataattcatgccactgaactgtcctcttcaaatgcttaggatattacattttacattacatgtattttaccacagttta

SEQ ID NO: 41525 - DNA, 1151 bp, Artificial sequence
  DNA replication origin
agccgcatggggaggagtcattggaggtgggaggtggtgggttcaggccagcgctggggggcaggtggggcccatggcgcccggcccgttaggggctaagtctgggccactgcaagccacagccccttctccagatgcagtggagctcgccaagctctggccaggcctggaggccctggggctgctctgccctccgtgggtggccgctgggctatggttagggggacaggagtgacagggaaggaccagaccctgtccccggctctgaggcagcactggcccacccaccttccctctccggcacccttggtacaacgaggacaaccccagcctctgctagcaccaggcgcctgcgagggtttcagggtcggggtcggcctctcccgcttgagcggcagcgctgccgggaagagcctctgtctctccacttagacgtccacatggcagcgtgggatacgcgtgcagaacgcgtgactgtggaggagaaaggatttgcttcctccgtgggaaatgctggactctttaacctcaataaaagtggtgcgtaggtggtgtgtgtgtgtatggtggagtgagcggtgtgtgtatgtcatgtgtgtggtggtggtgtgtatgtgtgtctgtgtggtatttggtatgtgtgtggagtgtatggtgtgtggtatgtttgtgtgtgtggtgtatatgtggtgtgtgtggtgtgcatgtgtggtgtgtggtgaatagtgtgtgtgttgtgtgtgtatggtgtgtgtggcatgtgtggtgtatgtgtgtgtatggtgtgtgtgtgtatggtgtgtggggggtgtatgatgtgtgtggtgcatggtgtgtgtgtgtggtgtgtatgcggtgtgtggtgtgtggttgtgtgtagtatatatgtggtgtgtgtttggtgtgtgtgatgcatgttgtgtgtgctgtgtggttgtgtgtggtgtgtatgtggtgtgtgtgtggtgtgtgtggtatgtgcatgtggtgtctggtgtgtgtgtgggtggggtctatggtgtgtggtgtgtgtgagacaggagggaggttagatttcagaggctcaggcacacatgtcatcagcggtagcaagtccctgcatggttagatagcggggtttgcgtcttccttcccaccttgctatgatctgg

SEQ ID NO: 41526 - DNA, 1265 bp, Artificial sequence
  DNA replication origin
aacaattgaaataattcaattactaaataaaataataccagaaagagagaaagtctttatcattttcagtaattcataaacattacactctatctgcatctatgctacacaaatctccacaaattttcaaaagcaaaattgcgcagaacacattctctcactgaaacctggatttataataggagcaaacggatatacacacagatatacacacagcctgtggatcaagagatggggtataggggctgcactgtacctagagggaccaattctttgtcttttcatgaggaaaaaaaaagaagaaaagaaagaaagagaaggagggaggaaagggaggaaaagagggaggaaggaaagaaggaaggaaggaaggaagaaaggaagggaaggagggagggagggagggagggagggagggagggaaggaaggagggaaggaaggaaggagggagggagggagggagggaaggaaggagggaaggaaggaaaggaaggagggaaggaaggaagggtagaggtaatgaaggagaggaccacatcagagttgtgtgggagggttgggcgttgtccgcagaggaggggacattgtgagtggtgaagtcccagcctccagccctgggcaaggccagtccccgtgggcatgggtctgctggacagtgtccaggaggcagcagggcaggcacggtgttagtggggattgaaaacctggccagagtgcctgggagtgagactgcagcccctttgctccccagctgggaccttgggtgcattgcttggcctctcttggcctgttttttcatctgtgaaatggaagtagagatactctctacccctgagcattactgtgaggattagctgagttatgacatgtgaaaggtttagaacaggctcagcgcactggaagtgctgtggtgcgtcggccattattatttgggggacgggcaagacatatgcccctcccaagatcatcattgcatctgtcaagcccacaggtatgatccccagactcctaagcaaccttccaatgatgatcaactcccacgtaggttgggaatgagagaaggttcatgcagactcagtctccaaggcctggaaccttccaatgatgatcaactcccgcgtaggttgggaatgagagaaggttcatgcagactcagtctccaaggcctgggaagctctctgcccagatcttctcctgcctggatctgttgctcactgtgggtgcggttcggcagcgccccggagcatggccttgggggtccctc

SEQ ID NO: 41527 - DNA, 894 bp, Artificial sequence
  DNA replication origin
ctcatcctcagcctggcctggagccatcttgggagctcacagccaccctgactgttggagactcacccgaaaacaggacacagccccgtccccgggagctcctgctgcagctgtcctgttgggctcggctcaaggcacagcagaaggacagagaaaggatgggagcctgaacctcactccttttaggccagagcccagagcaggtcctggggccacgctgagttcatcccccgctacatcacctgtcattgcatctgaccatgggattattataattaaggacagagaggaaaatgtaactattaaggattttatacaagtaaaactagtcaatttcccctgcagggccttgccggccaagtctatgtgggccaggcacaaaaaaactggagcttcagactcatggtgcacagctcagggctcagggttagggctctgggctcagggctcaggattagagctcagggctcagggttagggctcagggctcagggctcagggttagcgctcaaggctcaggattagggctcaggactcagggctcagggttaaggctcagggctcagcgctcagggttagggttcagggctcagggttagggctcagggcttagggttcggggctgaggactcagggctcagggttagggctcagggctcagggctcaggattagggctcagggctcaggattaggcctcaaggttcagggctcaggattaaggctcagggttcaggattagggctcagggcacaggattagggctcagggctcagggcacaggattagggttcagggctcagggctcaggattagggctcaggactcagactcctggctctcctcccctgccatctttctcccggggtctcaatattgatacggcattcacaca

SEQ ID NO: 41528 - DNA, 1094 bp, Artificial sequence
  DNA replication origin
aggagaccctgtcgagaaggaaggaaggaaggagggagggaaggaaggagaaggaagagaaggagggagggagggaggagaggggaggggagggaagggaagggattcagaggttgaagtgggagtatcacttgagcccatgagttcgaggctgcagtgagctctgactgtataactactccggcatgggtgatagtggagaccctgtcaggaaggaaggaagggagggaaggagggagggaggggggaggggaggggagtgggggaggggagggaaggggaggggaggggagggaagggattcagaggttaaggtgggagaatcgcttgagcccatgagttcgagtctacagtgagctctgattgtataattgcaatccagtctgggtgacagaggagaccctgtcaggaaggaaggaaggaaggagaaggaaggagaaggaaggagaaggagggaggggaggggaggggaggggagggaggaaggcaggcaggcagatcagggaagtagcagggatagccgttaagatgggcccctccagctgctgggaatggacttgaccagtagagagctcaggcacttcctcagcagcttccaggccgagagaagagctgcagcatgcaggaaagagaagcacaaaaggccaaaagacgcacagggaggaggggcgaggcccagcaggcacagactgtgtgccccgtgagaacagaggccactttggtgctgaattctcagccctgaaaacagtgctttgcagacagttggtaaatgacatgaatgcacgattgaatgataattatccattttattgatccagtgtagtaatgacaataagtaatattgatacatcccatactaagggccaggcactagtccaagttcccccatatactcactcacttaatcttcataacagccctaggaggcagtcgatacctggatttaaggacgttgaacctggggcaaggaggcctgcaggcaattgtcctgggatttgtaggcagccatgggagctgaggttgggatccaggtggtgtgctccagaggacctgccctgacggctgtgcccacggcctctcatcaccaaatctcg

SEQ ID NO: 41529 - DNA, 1802 bp, Artificial sequence
  DNA replication origin
atgctgggcagggcggtcgcatcttgccggctgccggtcctgggcgatggcgccattgaagccgcggcgcccgcgcggggggcagcagcgcgtctcagcagccggccctgcccgcgcccccgcgccggcctccacgtgcgggccccgcgcgcgccatcctccgccgccgccgccgccgcgcccgggccccggcccaccgcgccccgcgccgcgcccgcgccgcccgcgctcgcgcccgcgcccgccgaccccgcgccggcccgccagggggacgccggccccgctctgggcgtcactgcgcgccccggctacgcgcgccccggcatccgcgagagaggcgcgcgcccgccaccgctgggggctccagccgcccgccgacccgggcctggcagaggggacgcggcgcccaagccgctcctccggatggcgacagagacggcctgacgcgcccgcagcctgggccccccacggggaggacggccgggccaggtgaagttcgcgcacttgggccttccgcgcccccatccaccgcagccagggcctggaaggctggggagggggcgggggcggcagacgcctcctaaggtgggttctgggacttggatccggagtttattccaaggagagggtgctctgggcctgttccctaggtgtgccctgttacccaaaatcgggcttgtgcagtggggtccctgagtccactgggagcacagcctcagaccccagcagagtcacccttcatcggaagcccaccaccctgagggctcctcctccacctggggcggcactgccaggcacaggcacgcactttccctcagtcctctgccccacgatcactctactcgggcacctctgccactgcctggtccttgctgagccatctcctggttcatctccctggagtccctgcaggaccggctctcagtggcgtctccgggctcccagtcccaggactggtcctatccaggtgggttttctgagcaggatgacaatgatcgcaatctattttacctgcatagtcaacgatcatctgcaagacaggttcactcctataacaagcaaaggatggggggaaaatgagccttgtaaggacacaaggacactttccccatctccaaccctcctagtcatgtcccctctgcacctccctctacagcccaggagatacgctccccagtccaggatgtccagatggccctgctgcctggagaggctctggcccctgccggtagctgccacagcaccaccccaagctctgccttcctgcaggttcgtgcacacgactaatagaacccctcctctggaactcacaagatattctccatcctgcatagggctgggggcttgagcaccccaggagattcttttggcgctggagacccttttctgaggagccagtagagggcctgcaagtcagattgagcaaccagggagaagaagcatcatcccttcatcttgaggcctggtccagggaggtgaagggatgtggactgtccccagccgtacactcacccacaactcatgcatgcaagcattcatgccccaatgcacacacagcaccacacacacacatattttccttgaatctctctctctctctctcacacacacacacacacacacacacacacacactctcccatccacacacacacaacactttaggagaaactgagcaaagaaaggcagcctctcactgcgagtcctctaacccccgtcccagtggttgttgtgcactgaagcttccttgccaggggctctgacgggattcttgtgttaatatgattgtgtccatgcttgtt

SEQ ID NO: 41530 - DNA, 1176 bp, Artificial sequence
  DNA replication origin
ttccctgactccccggcagggcccgggctccaggccccgggtggcgcggcccgtccctgcccggcggtcggagcccagccagcggcttcccggccgagatgcgcgctcaggaggcagccgcaggtcgcggagggcgggcggcgctgccggggtgtctgcggagcgccctccccgtgcctcagcccgggacaaggggggaggcggcggccgagcccggagaggagctcttcaggcaggagcccagcctgggctcggaggagcagctggagcttccgctttcccgggaaacgggctcgtcaggcgccttctggaaagagaagcgaagtgagggatgggatgcccggagggggctcgccgcggccgcggacgtttctcgggtcgtgtctggggcccgagctggtgaccggcgggactggcgcgggcgcgggctggggtggtgcgggccagtgggcgcccgggcgtgagctgagggctggggtagggggtgaccgccgcgggctccctgttgcctggagtgaagggtggggggtggcctgtgcccctgccgaggctccaggcgggtggaatgaggggtggttggagtcccgggtgcagactccagcctcggcgctggggagggtgctcagcatcccggggcacgttcgcggctggtggggtaagtgggggccgctcagcgtcccgggcacaggctctggccccagatggcgcgggctggtcggcttcagctccgggagctccgggcttcttgtcttcagcgggagaataggacgggtgctggggagcacctgtcatggagaattgccatgggcgcgggaggtgatggaaaaatatggattctttacaaaaaaaaaaaaaaaaggccagcaccgaacctccctccacagacaccacctcctccagagccccgggcctccaagctcccagtccgatctgatccttccgctgtcgccaaaatgagagcacagtggcccagggagacccgggcagccgcgggatcggcctccggagtcctgggacagcccagctcgccaggatcgcaagggaaacccggggaccagagcaggaattttcctacttgcttcagcgcggttatgcatttccctagaaatgctgtggcaccgagcggggaggggtcgccaagcctgggggtctcaacccgagctgcccaggcagacg

SEQ ID NO: 41531 - DNA, 1126 bp, Artificial sequence
  DNA replication origin
gtcttcagcgggagaataggacgggtgctggggagcacctgtcatggagaattgccatgggcgcgggaggtgatggaaaaatatggattctttacaaaaaaaaaaaaaaaaggccagcaccgaacctccctccacagacaccacctcctccagagccccgggcctccaagctcccagtccgatctgatccttccgctgtcgccaaaatgagagcacagtggcccagggagacccgggcagccgcgggatcggcctccggagtcctgggacagcccagctcgccaggatcgcaagggaaacccggggaccagagcaggaattttcctacttgcttcagcgcggttatgcatttccctagaaatgctgtggcaccgagcggggaggggtcgccaagcctgggggtctcaacccgagctgcccaggcagacgaggccaccgtgggtgcgccggcgcccctgggaactcactggctggccgcctgcagggagcagggtctgggggtttgagcgacatttgtgcctgcccccgagttttccgcggccgtcacggggcctgcaggggtatgtggggggattccctagaagatccccaagcaaggcttcctaggagatgtagaaagggttaatggcaggtaaactctgtgcggaagaggaggcatttgaatgcacttcctggtggcatcaccccagaggagaggagagagaggagaggagagggagagggggctcattcagcagtgtttggggaggggctgtagtgccctgagcccactacaggcggcccatccctggctggctgctagaacccaggacaacacctcacccccaacccccagcagctcagcaggtgtggaaaagaacaactgctaattgttgcgaagtacttgacaccagggccctgtggcttcaacaccgcacttcccgagcccgcgaggagcgcggtacacactgtctcaagacacgcagcgtcagccctctcccaccctgcgctgcatcctgaatcctaaggtgtcagcacgttgttcatccggacgggctcacaccttcctgagactgtcgcctgctctgccgagtggagtcctggtgtcccagcacagacatctgagcctgctgcttagacacgctga

SEQ ID NO: 41532 - DNA, 1454 bp, Artificial sequence
  DNA replication origin
gactggagtgtccagtggccaggggtcatcagtctgggtttaggcctgggggcggggctgaggcctgggggcggggctgagggtcagaggagtagctggaatcctgggggcggggctgaggcctgggggcggggctgagggtcagaggagtagctggaatcctgggggcggggctggaggcctgggggcggggctgagggtcagaggagtagctggaatcctgggggcggggctgaggcctgggggcggggctgagggtcagaggagtagctggaatcctgggggcggggctggaggcctgggggcggggctgagggtcagaggagtagctggaatcctgggggcggggctgaggcctgggggcggggctgagggtcagaggagtagctggaatcctgggggcggggctggaggcctgggggcggggctgagggcaggggcaggtttggaggcctggaggcggggctgaagggtggggtggggcccacctggaggcggggctgaagagtggggtggggcccacctggaggcggggctgaagagtggggtggggcccacctggaggcggggctgaagagtgggctgagggtaggagaggctgcaagcctaggggtggggctgcaagcctgggggcggggctgaaggggcagggctgggggcctgaaggcggggctgaagagtggggtggggcccacctggaggcggggctgaagagtgggctgagggtaggagaggctgcaagcctaggggtggggctgcaagcctgggggcggggctgaaggggcagggctgggggcctgaaggcggggctgaagagtggggtggggcccacctggaggcggggctgaagagtgggctgagggtaggagtggctgcaagcctaggggtggggctgaagaggcaggggctggagggctgctgtcctcttgcaaactaagtctcctggattccaaagatatctttggttctaacagtttgattaataataataatatgtggaatacctgggaagagctcagaattggtaggtatatttagtaggacttttctcgttgctagagtggaaaactcaaaccctccttttggcctctttttctggacttctgcagtgacagctccccaatctttgttctcgttaaagttgcacttgttccaatttctcccagttcagggtttctcagggcagcactggggtcatttagagctgggccatgctctgtggcaggggtctgcctgtacatggcggggctttgcgagcaccccggccaccccccacttgatgccaggggcccctcctcccagttgtgacaaccaaagatgtctctggaccttgccgcctgaccctgggacaatcagcccactggaagccctgctctagcgcacctataccttgtctgtggccccagcaagcacacttgtgctggtatttcctggtgtggactcaataccagcag

SEQ ID NO: 41533 - DNA, 1128 bp, Artificial sequence
  DNA replication origin
gcgagaggcagcgaaggggccagccccactgtcagcagggcatctcctccacctcctcccaccaggcagcctgcaggggctcagtccccttgcagcctggtccaccacaggggctcagtcaccttgcagcctggtctaccagaccaggcacacacggaatcgggtggcgagggccccttgacactttccccaaatccccgcctgaaccgtggccatcagcttctggtggccctccctgcagctctgtgccatggggctccaaccttggccaccggcctcagcctagcaatggtgaggagtgagtgagcgcaccgttccccacagcaagccccgttccgcatctgtagccctttccgggagcccgcctgactgctcaagaccagacatcagcctcggcttcgggggacgcaccaggcacaagcgggcagttgccccgtggctctcccagtgcgggaagaaactgtcagcaccgtcttgtaaggttccacaggtgatgcttcatttccgatacctggagagatgggcctgcgtcagggcctgtgtgtgccgggccgggtgacaaccttgagaatggagaatgcctttctaggagctcaggggttgggccttgcagaacgaatgcggctttgcacagcagacgcctctgtctgttggagaaaacacagagttttgtcttgacctgggcgagggcctcttgtgcaatggaaactgagaaatggctttctgcagacctgcagtgtggcgctgactgaaggacattttccaacaacaggaatgtgctcctgtccttataagcagcctcccctccccctgggagccacatcacgcttctccctgcagacgcacagccccaggagacagtgaggaggaggaggaggaggaggaagctctgggaagcgtcagccacctgacccagtttgccaaggagcaggagacaaaagaggccagcccgagaaggtggcttttcctgtgggattccagactggttggacttctctgctggcaggtggtgaccagggcctgggcttctctctcctgtccacacatgaagaagaagcgacaggggagtcattggggtctgggatccccagcggcctcctccagggctgtccctgcttcctgagtctc

SEQ ID NO: 41534 - DNA, 1236 bp, Artificial sequence
  DNA replication origin
cacctgtgatgtggcctcggggactgtggtttgtcaggtgcttagggagtttgtgtaattaaccaatgctttgagtcaacaaagacatagtgtgagtatgattgcaggtcagcactgtggaaagagccaggaacaccctggaagcggagtggcctcaagtgtgcgtgcagggccggtgggcggggccccactcagcagctgtgcgcttgcaccaggagcactgggggagaagctgggggtctgtggagcccctgacctgcctttgctttccttggggcccagaggccctgctctgggagacacagtcccattgtaacctggagaagggaggggtagcagggagacaatgagggggtacatttcagctgaaggcccagcctggggaaaggctcaggcaggtggggtgcatggggcacagggtagctgcctgatgggggcttgcccttgagggcactagaaccctctgaggggccctagcagggcagtgactgcttaaaccaccttcacatttgagaactcgctctggcgctgcatgcctaggacctgggtagaggcagaaaaatcaaggtggaggctgttgagggtgtccaggcaggagatgagggtgtccaggcaggaaatgaggatgtccaggcaggagatgggggtgttcaggcaggagatgggggtgtcaggcaggagatgagggtgtcagacaggagatgggggtgtccaggcaggagatgggggtgtccaggcaggagatgagggtgtccaggcaggagatgagggtgtcaggcgggagatggggatgtcaggcaggagatgagggtgtcaggcaggagatggggatgtcaggcaggagatgggggtgtccaggcaggagatgggggtgtccaggcaggagatgggggtgtccaggcaagagatgggggtgtcaggcaggagatgggggtgtccaggcaggagatgggggtgtccaggcaggagatgggggtgtcaggcaggagatgggggtgtccaggcaggagatgggggtgtcaggcaggagatgggggtgtccaggcaggagatgagggtgtccaggcaggagatgggggtgtcaggcaggagatgggggtgtccaggtgggattccaggggtctccgaccaggctgaactgtggaagaatcaggattttccatagagacaggatgatgggttgggtgtgtggacggggagggtgtgtggtcaggccccttcagacctccatcctcc

SEQ ID NO: 41535 - DNA, 1723 bp, Artificial sequence
  DNA replication origin
ctgcctctctcagggaagacaactcacagttcagcctcggccggctgctgttttccttgtcccaggtgtgaggagcccaggcacattccccagcccacctgtatgccacacagggcaacaggtgccacccccctgtgtcggtgttgggagggtggagggaggccagggtgggaggccccatgcagacctgcagtgaggactcagtgcacctggccacagacacacaggaccctccccttggctctgggctcaagtccttcttcaaggtgggactgctgggaggccttgacctcaggggtggcaaggtctgcagccctgccaggctccgggtcttgagtgccaccacccgtgccctgggaaggccccagcagtgctgtcttccagctgggggaagccggctctgggctcccccggggcatgttgggggccacagataccccaggggatcgtgtgggtgctgagtggaaggagctccaggacgccgagtgcagggcctgggaggccagtgtgcagggcccagcatcaatcagccgctgtggttcttgtcacccgggtgttcagattggaggggccggggcgtgtgtgtgtggtgtgtgtgtgcgtgtgtgtgtgtgcatgtgtgatgtgtgtgtggtgtgtgtgtgtgtggtgtgtgtgatgtgtatgtgtgtgtgtgggtgtggggggtgtgtgtgcatgtgtgatgtgtgtgtcgtgtgtatgtgtgtgtgatgtacatgatgtgtggtgtgtgtgctgtgtgtgtgtgcatatgtgtgtgtatgtgtgtgtggtgtgtgtggggggtgtgtgtgcatgtgtgatgtgtgtgtagtgtgtatgtgtgtgtgatgtgtgtggtgtgtgtgtggtgtgtgtgcatatgtgtgtgtgcgggtgtgtggtgtgtgtgtgtggtgtgtgtgtgcgtgtgtggcgtgtgtggtgtgtatgtgtgtggtgtgtgtgtggtgtatgtgcgggtgtgtgttgtgtatgtgtgtgtggtgtgtgtgtggtgtgtgtgcgtgtgtggcatgtgtgtgtgcatgtgtggtgtgtggtgtgtgtgtgatgtgtatgtgtgtgtggtgtgtgtggtgtgtgtgcgggtgtgtggtgtgtatgtgtgtgtggtgtgtgtgtggtgtgtgtgggtgtgtgatgtgtgtgtgtggtgtgtgtgtggtgtgtgtgtgatgtttgtgtggtgtatgtgtggtgtgtgtgatgtgtgtattagtgtgtgtgtggtgtgtatagtgatatgtgtactggtgtactgtggggtgtatgatgtgtggtgtatgtcatgtgtggtgtacagtgtgtgatgtgtatggtgtgtgtgtgtggtgtgtatgtgtgtgtgatgtgtttgtgtagagtatgtatggtgtgtgtgatgtgtgtatttgtgtgtgtggtgtgtatagtgatatgtgtactggtgtactgtctggggtgtatagtctgtggtgtgtgtcgtgtgtggtgtgtagtgtgtgatgtgtatggtgtgtagtgtgtggagaagtgtccatgaccactctacatagtgggaccccgatctggcagtgtgtgacttgctgaggggcacagagaggggagagtggtctggggtctgcatccacctggagccctccacgtcctcccctggcatctgcgtctctgaacatctcctggggagccgggggtcgtttgtctcctccagccctgttga

SEQ ID NO: 41536 - DNA, 1631 bp, Artificial sequence
  DNA replication origin
gcccacgctgggccgccgctgccggtgtcggtgccggtgccggtggctgccgcgcctacaggtggggccggcgacgctgcgcgcctcgccgcccgcgggacgccgctgctccggcctggaggcgcgcgcccgcccgctcggctcggcgccggctcctcgggggaggcggcgggagggggagcgcggcgcagtcgctgccggcccaggtggccgggcccgcgcagcctcggactccggcccgcgcccgccgccgtctgcgctcctcccggccgcggagccgcggatgcgcactgggccgcgagggaccccggggaccccgccctgcagcgcccccgcctggcgcgccggcgggtcaggtggggccggcccagccgaaaactgcgggtcgggctccacctaggtgcgcaggggcctcactgcagagccggccctgctggcgcgggagaccggacgcggggcctcgagtggcgcccagcctccctcgcacccaaggccccaggagagacagggaaaccccaggcccaggtaccgccccagccgggcccgaccagcggctgggagggctcggaggaggctggtcccgcggcttctgaaaacggcacatctgcctggaaacacacacaaacacactcacacctgcccctactgtgtaccaccctccagccagctgccctgcacccaagagcgtgggcgcactgttaatgcccacgttccgttccagaggaaacaaacggatgcctccctgcactgcctcccttcccgcctctaggaagaaagggtctttgttttaggccacttttgctccccaaccccgctccccagagcagggggcacaggtgtcctcgtcaggggttcgccccagagcccagtaccaagaccagtgtggtgggcctcaaggtatttttgcctgaattgaatttgaaattcaatttcaaatgaccagaaaagagcagtgggcaggaatcggggcctaagcttcctgggaccctgaacctctctcctgacctgtgcagggtgggggcagtgctggtgcccgcggtgcatgtggttcacatgaaggctgtctcctccttgcaccagtattgacgtgccaggaagggaaagaggcctggccctgaagggctcttggaggtcagatagatcaaggcaatcagtatgcatctggggaaactgaggcttatagaggcatggtgactggtctaacatcaactaaaaagtcaagggcagagtcaggaccagccactaagcttgatgctgtctgcctgacctggctcgcggtgcccagcagccggccaggggagaggccatccacgaagcagttcttcacctctggctcatcaccctccacctgcccccgaaaacatccaggagagacaagaatgtcccatccaactcctctcacctaaaggagtggccccagcctcacaccagccaagcaactaagcagctgtggatctgccctgggagggactagccattctctctgctcaggcaatccccttcaaaaccccatttcctataagcaccccactgtttcctgctctccacccctagacattctctaggaaagatctaaggtagcagctcctcaggaacccaccctgcctggctcgcagagcctgacctccagc

SEQ ID NO: 41537 - DNA, 1728 bp, Artificial sequence
  DNA replication origin
tccccgggcgcgcggaccggtcctccgcgctctgcccggctcgcggcggctccggcgcccgacccggcttccagcacgttccgctgccgccgcgctcggctgaggctcgtggagcgccactgcgggcccggagcggccggcggcgcgaccctaccaggagcccgaccccccgcggatctcgctgccccgcgcccatcggggctcaccggcagggcgcggggtcggggcgcgctgcgttctcggtgcctctggcgccgccccggatccccagcccaagccgaggctgccgttcccatcccctgccccactgggctcggtggcagcggcgcccgcccgcacgccgccgggccctcggtagatggcaccagcgctccacggtggccggccgggctggggcgggagcggagctgggacccgccagggtgggcgccgggctgggacccgcggacgtcgggaaaccggcctgcgcacctgttccccagggcccaagccgccttccagagacccataggtttgggaagcaggggcttggtcaccggggtgcgcaggtccccgcgccaagttctgcccctgctctcttggtctttgctggactgcagggcagtctgggactattgaggcgcccaggataacggttggaccctcgtggctggagaggccctttgtactgggaagcatcttactgggggttgggggcagggccacacctcccctgatgggcggtcggtcggctccaggcaccccagacacactcctggaaacttcctggtttcagggccaggctccctttgcagggctcccggtgcaccccgggatcagcctggcctgtcatatcagactgggggcaactgaggcgttggcctccccccgggcacccctgctcatggttactagtgctctggcacacaggctgggccagctccgcctggtgctccccttggtccgctgggaaggctgagcaccggagggcgcctgtgtggctggtaaggcgctgggttctcattagttctgggttcctgcagaggaagggcttgcaacattcagctgctttcctgactaattaatgagccgccggaggcctggggaagcaggtaggtgcaggagcccggcccgagaccctgtgacctccacgggcctggtgtccacttccctcccttgcttttggatgtgggcacctagtacagaggagggccaggtctgaagggagagtaggctaccccaggactctgctgcgggcttggcctgccagcccgggcttgcggggacccttccccaggtgggaggcccaacttcttcctgctgccttgctgacccacttcaggagtgggtggttctgccatagggcagtagcacttggggctggggaggccatccttcctgctgaggagtcattgggtccaggcaagcccgcgagggctgtcctctgctggtgtcgcgtgtcaggactgtgggagccacccctggtgcattccaggtacctggcaaaggggtccctgctctgctgggcctgtttgtgttcgcgctgcaagttctctgcctctctggctgatctcgaagtctctgggggattggcttgcggaaagggcgtgtatgtgaaaatttcagtgtttctctgaggtccaggtgcccagctgcatcctgacactctgtgatgaagtgaagttccactgactttgaagctgtgagttagtaacgggagaagctcctggccatgtggccggcctgtga

SEQ ID NO: 41538 - DNA, 1185 bp, Artificial sequence
  DNA replication origin
gggcatgtcaccactcagacatgtcctctgcattttgctgcagattccacggtgttttctcatggtgttccagacttgttctgggttttgagccgccgtggtggtggggacagcaggagatggctcccgcccagcagggactttgtgggaagacctgggctggcatccactggatttgcccaggcccctgtggtgctacagggagtgctcaagcttgggaggactcctgggctctggctctgatccctccactcactggccttgggccaggtcctcttgctttgttttcgaaatttctcccatggaaggtgagcacatctgggaggtgtgcaagcccccagctagcttgtggtgcccttctggtgtagctgcagcccatagattttttttccatccttccactcttataatgtcctccaaggaacaggaatttggggaggattgaggggcccagggcaggctgggggcctctctaagggtatgagaggtatgcttcttagcagttggatttgggatggagaagttttctgggcttgttgcagagtgcattttccttttagattctggggaggaggagatggatattacagtagtaatggtggtgtgggagatgatgatactgtgaatatgatgagggtaatgaggatataggtggtgatggcaatgaggagatcttggcggtgttgatggtaatgatggtgatgatgatcgtggtgataatggtggagaggagattatggtgttgctgctagtgatggtgatgatgctgctgatgataaggaagaggtggaggactgaatgatgatggtgatggtgatgatggttatggtggttatgattatgatagtgatgatggtggtggtggtaatggtgatgatggtggtgatggtggtgatggtgatggtaatgatggtgatgatggtgatgagggtgatggtgaggatgatggtgatgatgttgttaatggtggtgatggtgatgatggtggtgatggtgatgatggtgatgatggtgatggcgatggtgatgatggtggtgatggtgttgatggtgatcatggtggtaatggtaatgatggtggtgatggtgaggatggtggtggtggtggtggtggtggtgatggcaatggtgatggtaatgatgatgttggtggtggcagggatggtgatggtaatggcaacgatg

SEQ ID NO: 41539 - DNA, 1425 bp, Artificial sequence
  DNA replication origin
gatagtagattgggtgggtgggtggatggatgaataggataggttggtgggtggatgggtgggagggtggatggatagtgtgggtggatgggtggatagatagtgtgggtgggtgggtggatggatgaataggataggtggatgggtggatagatagggtgggtggggggatggatgaataggataggtgggtgggtggatagactgggtgggtggatggatggatgaataggatgggtggttgggtgggtggatggatagtgtgggtgggtgggtgtatagatagggtgggtgggtgggtggatggatgaataggatgggtggttgggtgggtggatggatagtgtgggtggatgggtggatagatagtgtgggtgtgggtgggtggataggatgggtatgggggtgagtagataggatggatgtgggggtggtggatggatggtggatggtgggtgggtggataggatgggggatggtgggtgggtggataggatgggtaggggggtgggtggacggatggatacatggatgattcagagatcaaattaaattgtcctcagcaacaacatcaaaaaacaaaaatagaagaacaagaaactgttcccttctctgaggaggcagccgtagcagaactaactgattaaaaaccgcctcctgaattttatgagcatcagaaaagtccaactccaaactgggccattctgagacaattaagtcaaaatatgtgaattcatttacacaaatatgggaaggaaaggagctcctggtgaaataagaggagaggtttgcagggccctgaggaagaggcgggagatgccacccaagggtcagggacctggagacgctgcaggccctgtggagggagaggtggctggagttcaccagagaggacaccaagggggcagtgggcacgaggagaggaaaaggaggtgaggcaagagttcccccaccctgcccccatcccagaagggtgtggactggggacggtgggagaagcagggccccgggtccttcctcgacgccgccatcctccaccctggactcaggctcatgctttcttttcctctttcccgttgaatttgaccactggcatttcactaagacacaggcaaatctccaacccacatgtcacagccagggaggagggccgacgcccccaggcccgcgggactcagcactggatgcacaactttcagggagcgcaggaagctcggggagcagaagccgctctcaggggctcctgagccagggcccagagcaacgaggacagcgcttcccaccccagcatgccgctccagactctacgctgtgaccacagggctttcaggtggggcaaagggctctgcccggcaggcagcgtgacgcccatgctgccagactgaggccctgagtccggtcctgacgccaacagttgaggatcct

SEQ ID NO: 41540 - DNA, 1314 bp, Artificial sequence
  DNA replication origin
ctcagggtgtctggagctcagcctgggccctctggagcagctcctgccacccgtggggcgcagacccacaaaccgtgtgatcctgccaggctgtgacacagatctgggaggatgtctgatgtgacggatgacaggatgaatatccaaaatgactttgacaggcacagaccaagagggtggcatttaccattcacgaatgtcagctctgtgcttggtcagaccaaaaacaaggtgcagctgaggggccccgcaggcctgagggcagggggcggcccgaggtgacccacagtgccactgggaaggtggggcccgggggcaggtccccaacggggagaaaaggaggcgccgtggggccgcccagagttcccgtagggagtgctcacacaccagcctgtgtccaagtgacgggtggggcaatggggtgtcctcagcctgtcctgcccacctgcatgggcaccatctctgagctggggcctgggaggaagtgaggccagaagaagagctgggcttagtgtcggggtcccgcctgtgtgcggtgtcccagggcttagtgtcggggtcccccctgtgtgtggtgtcccagggcttagtgtcggggtccccccgtgtgcggtgacccagggcttagtgtcgggggatgggggggggtcccgcctgtgtgcggtgtcccagggcttagtgtcggggtcccgcctgtgtgcggtgtcccagggcttagtgtcggggtcccccctgtgtgcggtgacccagggcttagtgtcgggggatggggggggtcccgcctgtgtgtggtgtcccagggcttagtgtcggggtcccccctgtgtgcagtgtcccagggcttagtgtccaggggggtggtattgcctgtgtgtggcccagggcttagtgtgtggggggggttgttgcctatgtgtggcttagtgtcaggggaggggtattgcctgtgtgtggtgacccagggcttagtgtcggggtcccgcctgtgtgtggtgtcccagggcttagtgttggggtcccccctgtgtgtggtgtcccagggcttagtgttggggtcccccctgtgtgcggtgacccagggcttagtgtcgggggaggggtgctgcctgtgtgcggtgtcccagggcttagtgtcggggtcccccctgtgtgcggtgtcccagggcttagtgtcggggggggggtggtattgcctgtgtgtggcccagggcttagtgtgtggggggggttgttgcctatgtgtggcttagtgtcaggggaggggtattgcctgtgtgtggtgacccagggcttagtgtcgggggtctaagacac

SEQ ID NO: 41541 - DNA, 1771 bp, Artificial sequence
  DNA replication origin
tggccagggtgctgggctgggggacccagaggtgacaggtgacaaggcaggtgccagaggaggggccgtctaaggttatcataggagaaaaagtgggatggataaggaagggcacccaggctgtagaaacggctgctggagagcacccgggcattgcctgcaggttcctctctgcaagggtgggatggccacccttcgtccctcacgcacccaccacggctttcctcggagtcacctccctgccatcctgttgtcctgagccccccaggcagcccgcagactctctgctgatccccacaggctgggagccctgagtccgtgcatctctgatgctgcggccatctcccccagctggaaggggcccctggggaggacaccaaattcttttctaaccgccgtggccccagggccctgcacagaggagggcttgcagcaggcactcattacctactcagatgaaggagtgaggcagcgagtaagtagacatccaggtggttccagggagcaggtgcccatgtggagctggatggcaggggacctggcactcaccgttcagggcagatttgggcagcactggctgagggacaagctccatcctgccctggggatgctgggttttcatcttcacctggagcacgggcactgtctttatttgtcagtgttaatatttggctgtgattggtggtggccatgctgcgttttaccagcagagtggtatcttaaattccatgggtttatttgcagggtagaacttcctggctgttcatcttcccgcacctgagatgcctgggctgtcgggcccttgcagagacagccttctccttggaatttaggggatgcggagggggcagtgaggaaagccagggaaattatttatgttggcacctttggaagaaatgtgtcccttctctgtaccacaggtaatcccagagcctgactctgcccccggggtccttcctgcttccctcgtgccctgtggggtatctgtaatgtggggagcagaggtggtgtgacaagggagatggggatgcagggtgctcctgtgggagcctgtccacgacacccatgggtggtgggtgtctgcagagcacatccatgaagcttgtgtgtacctgtgtctgcatgggcacgtgcacccctggggagcatgtcctcatgtgctgctggtgagcctgagacccctggccttagtgtgctcacacctgggtgccacccgtgtaaacctgcgtgcctgtggctcactccaggggtgtgttgcgtgcacatctgtgccttgtgtgcggtcatgtgtgcctgtttgcacacacgtacatgcacatatgtgtgtgtgggcgtgcaccgcgctgtgggagggcggaggaaatcctgaaccctttggcatcgatgcacacagtggtgcccgcctgctcgttcctctgtacccaggcaggcatggcagttcctccctggcagcgtggctggttccacacaacttttgacaagcctgagcgggggtctgacctattttccggctccaaagtgccacaccctggggccagtgtgctggcacttggggatggagaccaagcactgtgcctcgtacagcccggcttctctccagcaggtgcctgattgtgtgcaggggagccagctccctccttgtgatccgaacctttcatttccgggcgtgataaagatggggctgtgtttaatttcctgtctgccaaggcagcaccaccgcctgaacaccaggctgcacacagggtggagttcgccgacttgacccagctct

SEQ ID NO: 41542 - DNA, 1241 bp, Artificial sequence
  DNA replication origin
ggcctcgaaccccggccgcagaactcgccccgatgaggggaaactggaggctctttcctcctgaccatgcatgatgagccggtgccccgagggtttgtctgcgtctttccaaagacaccttatggcgtgtttccagtcagtagtcagacattctgctcatctccctgggttcagagcctgctggacactgatcagtgcccaggcctggtcccgccctatggggacagtgcagcagggaacagagagggggcagcgtatggcagtgggtgccagatttggaggagatgccgggggctcgttcccccaccctcctggacagcgtcctcctccctgcacatccttgtgagtaatgctctgggaacctccgggctctggagacacagtgggatggaaaaggccaataaaagacaaatacacaagtctgcagaaatgaactgggggcctgggagcctgggagcctgcagagacatccacaggggtgatggtgactgggggctcattggggtgcccactttggggagatggtgactggggggctcattggggtgcccactttggggagatggtgactgggggctcattggggtgcccactttggggagatggtgactgggggctcattggggtgcctactttggggagatggtgactgggggctcattggggtgcccactttgggaagctggtgttgtggctgatacctgcaaatccagaaggctctggccttgtgaatacctggaagccagctccaggtggacgtggggctggggctcggcctgggtggtgaggatgtgcctggtgcctgtggggacagcgggaggagctcacaggaacatggcgggagcacaaggcttggaggttggcatggtgcagggagtcaaggctggtccctgggcaggggctctgcaggccagaggacatggttgattcaaacctgccgggagcctcgggggtgccaggaaggtgacggatcactctgatggccttctacaaaaatctctctgctgctctctggaccataagttcagggcagcaagaggagtctgcagaggtcaggctgggcagaaagtggcagtgactgtggtcgcgtggggaagtgtgtgatgggggtgattcaagggcccaggcggtggggctccagtagaggtgtgagaccgtgtggagggcagagctgaacccaggcctgggtgtatgtgcagcgatgctctgtgtccaccccaggaggccccaggcacacgtgg

SEQ ID NO: 41543 - DNA, 3145 bp, Artificial sequence
  DNA replication origin
caccccaggatccggagtgtgtgcaagaaggacagaccccatcttctaactcaactaaataactacacgtgtgttctgtctgagaatcagggaaagcgcctctcttggaaacttcttgcctctgtttttttcttttttcttttctttttttttttttttggagatggagtcttgctctgtcacccaggctggagtgcagtggcacaatctcggctcactgcaacctccacctcccaggttcaagcaattctcctgcctcagcctcccaagtagctgggattacaggcacctacccccacgcctaatttttttttttttttgtatttttttagtagagacagggtttcaccgtgttccccaggctggtcctgaactcctgagctcaggcaatccacccgcctcagcctcccaaagtgctaggattacaggtgtgagccaccgcacccggcctcatctctggtttttaaacaatttgaaatgaggagagcgtctctactgctgagctgtgcgtgtcctcacgggttggagcccctcattttctgtgcttctcctaattggggggaaactcggttccaggcatttggatgtgctttccttggttacagctgcgatgggcaggggctgcctctccctacaactctgagcatgatgtgctcagggataagcgtggctcaggccctgcctccgagtgctgcatgctgcaccacgatgtcttccaggatccactaatattctgagcaatccactgaatctgacaggtagggccccggagaacaaaatggatgctcagaatttaggcaacatgtctgaggtttccagcgagcctgagccagattaggatccttccagaagccgtggtgggagcgcaggttgggcctgggggcccttttctccatgctccccagttcttgccacccgggcgccctaagatgagagccgacacagcttggtgtgcccggcccagcactggacggtggcacagtgggagtgaagcaggcacaggtgcaggtgtctgcagcactgtgctcccaaggcggctgcagtgggaagagccaggacatctggatcctctttcactggaccaggacctcccacggtgaggaccacatcctcagtcctcctctgccctagagacctggcatgcacaaggggcctggcacactggctgtcagtgcccagtcgtggtgggcaaattttgggaggctgccctgtccaggggcagcagcagtgctggggtccctcagctcctcctgcctccccatcctctgtgtttgtgggtgcccacttccctttcttggtggcccctctcagtgtgctgccgtcacctcttagccccctcgcccttctctcctgctgtggggctacctggacttgaatggagactaaatgccacagggccccggcagcagggactgggcaggcaactgcatggcgggtacagcaggaggctgtgcactaaagtctcctcgagatcttccatcttttgttctgagaacccagcaaaagctggcagcaacctgggtcgtgggacgcacacgctcctgccagccccacagagccccaaattggaagttatttataactctgcttccagcaaagaagacaggccggagccagggcctggggtctggggtgagcaggtggtttcagcctcagacatgatatcctccttgcacacagggtggggggaccatggccacccatccacacccaccggggctgcagcagctgcagtgagaccacgggtgggtgccggttgaaccgggccctctgcagcctcacgaggcctctgtgactcctgggggtgatgctgggataacatttacaagtgggaaaactgaggttcatggggtccgccctaggccatcctaaaggaagggacagagctgggggtggacttggtcaccactgggctaagctgcctggcctgtgcagaaccctgagagtgcttgggcagggccggtccacacggtgagggcggcgcttcatggaacaacacatcttcagccacaccaggagagggatggacagggagccgggagagggatggacggggagctggggagccaggagagggatggacggggagccgggagagggatggacggggagacgggagagggatggacggggagacgggagagggatggacggggagcccggagagggatggacggggagccgggagagggatggacggggagcccggagagggatggacggggagcccggagagggatggacggggagccgggagagggatggacggggagcccggagagggatggacggggagccgggagagggatggacggggagcccggagagggatggacggggagccgggagagggatggacggggagcccggagagggatggacggggagcccggagagggatggacggggagccgggagagggatggacggggagcccggagagggatggacggggagcccggagagggatggacggggagccgggagagggatggacggggagcccggagagggatggacggggagccggaagagggatggatggggagccgggagagggatggacggggagctggggagccaggagagggatggacggggagccgggagagggatggacagggagccgggagagggatggacgccgagccgggagagggatggacagggagccgggagagggatggacagggagccgggagagggatggacagggagccgggagagggatggacagggagacgggagagggatggagggggagctggggagccaggagagggatggacgcggagccgggagagggatggacggggagccgggagagggatggacggggagacgggagagggatggacgcagagctgggagacggatggacggggagctggggagccggggagccgggagagggatggacagggagccgggacggtgccctggcaccggaactcagagacaggcttccaacatgtgagaagtttcttctgtccttacaccctgaggtctttgaaatacacaaatgtacacaccagcattttttttttttaactttgtttttccgttttctttttagaagtttccatcatgcgttttcctgtgacgtctatctccagcatccttccttgagcgcagggcttccgtc

SEQ ID NO: 41544 - DNA, 976 bp, Artificial sequence
  DNA replication origin
gtctgcccagagcccacgtttcagtcaccgtcactcacgctacctcaggaagctctgtcagcccctgggcacgccgcttcccttccctgagagctattgcaacattgcgaccagaggggaggcctcctcacccgagcccggggaaagggagttgtgaaatgtatgcttgaaaggcccctttgtccccgggacatggtggcccggcgctgtgcctctgaccgtctccagcaggaagtgggctggggtgggtgagcccagctcctgccgtcaaacaaaaggtgttgtgtgctcagggccggcccgctggtgccctcgggagggccaggcccagggacggggcaggcctgctgcctgcttgtccctttgttctgcaaatgctgagagcaggcgagagtgtacatgtgggtgcatgtgcagatacatatctgtgtgtgtgcatgcatgtgtgtgcgtgaacgtgtgtgcatgtgtgcgtgtgtgctgcacctatagatacgtgtttgtgagcatgcatgtaaatgggcatgtgtgtgcctgtgtgtgtgcctgcatgcctttgcgtgtggtgtgtggtgtatacatgtgtgtgatgtgtacgtgtgtgtgttgtgtacatgtgtgtgtggtgtgtggccaggcatggcagctacagcataggcagggctggagccaccttcaccagcctaagtccccccggaccccgccgtccttccttcttctccttcaggtgaccctgagcaccaccgtgcatagtaccacatcatgtctggcagggatgagggtcctttccgtagacagccagtgggctgggccctggcactggagagggtgtgtgtccaagatgctgaaagctggcacatcaccccagatccctcccccatcctcagccccacagtcccagtgagctctggtggcttgcatcctagcctgaccgagagggccccaacaacacagcctgtaggttctggccagccga

SEQ ID NO: 41545 - DNA, 1349 bp, Artificial sequence
  DNA replication origin
cggctcccctgcccaaccccacaggccccctcatccttcaccaggcacagccctgccccaccccacaggcccctcatccttcaccaggcacagccctgccccaccccacaggcccctcatccttcaccaggcacaggtgcacggggcccctgccaggttcgggaaaagaactgacccccacgaggatggtcctggtgttgagaaacctgcttcacagcggaggacacagacagcagagtcaagcacagttttagtcagagcccacattaacacagcaagagcccagccagagcaggtggggcaggagacgggtggagcgggtggtgctgtgtggcggagctggcggcgcagtggagcgggcgttgtggtggacccggtggcgtggcagaccaggcgacgtggtggacccggccgcatggtggaccaggcaacgtggtagactgggcagcgtgatggaccaggcgacatggtggaccgggccgcatggtggaccaggcaacgtggtagaccgggccgcatggtggaccaggcaacgtggtagaccgggcagtgtgatggaccaggcgacgtggtgggccgggtggtgtggtgaagccggcagcacagtggagcaggcattatggtggactgggcagcatggtgtattagaagaggagagatggcctggggtgctcagcggggctgagtccccagctgggagctcaggtgcgatgaagcccaagggactgacggtgtgaggagggccctctgctgcctccatgcagcccacacgcggggcccccacagtgcggacatgttggggcaatgctgcctggccccgccctcagcccagccctgggacgcaggctcagcagcccccggattccagtcaacatccccaggactcactcgggtcaggcacagtgtccaagctgtgtgagtctccgggagccgctggaacaaaatgccacacacccggtggcttcaaaccatgaaacccgttctcactgttctgggtccagacgtctgtggtcacagtgtctgctgggccgtgctcccgcaggaggcagcagcagagggtcctccctgcctcctcctgccattcttccggttcgggggtccagacgtctgtggtcacggtgtctgctgggccgtgctcccttgggaggctccagcagagggtcctccctgcctcttgcagccgctgtggctgcgtggctcccgcctctgtctctgtctgcatggggcctgctgctctgtgtgtttgccctgagtccagatttccttctccctgtaagggagtggtatccaccctaatctgatacgaccccattctaactcgatcacatctgctagaacctgctgccaag

SEQ ID NO: 41546 - DNA, 966 bp, Artificial sequence
  DNA replication origin
ccagcttcctttccaggccccaggggtgcagtgaggagacacaccagctgtgacccaggccacaagtgtccacaggcagagagggctggctgggccacaggcagaacggccgtggtggcagctccaggaagccaggttgggaaggcgtctgaggctccctgtctcaaaggtgtgccatggggctgttctgtccccggggcaggtcccctcacccctgagcctcaggtcctgttgagtgtgggttctaatcccacagccccgttgggtagacgaggctatgacaaggtgacggcaaggtcgttcccagagcagtgactggcgcccaggagctcaggaaccgcagctggccagggtgctggagatgacccctggccctgacggaacctgggatttggggaggccctgcagttgcgagaccctcatcatcaccgcccctggctgagtaaggaatttaacacaaggcagatgaggcctaacccaggtgggcaggtgcctggaggtgcccgcccaggagacagcatcagggtgggctcagaactttcagcagggccagggtcccatgatgagtttcctggccaaggtcggttcaagggcagattctcagggctgcctggggcccagggaaagggtgagtgtcagggggaagctgagccccagggcctctgcctcctgttgaagagaatactcccggggccagatgggacagggtctgtgtcgacatggggaccgtgtgaggatggaggcagagatcaggacgatgcgtctcccgggcaaggagcactgaggattgcttggagcaccagaaacccctagggggcctggagtggaccctccctcagatcctccagcaggaacaggccctgtccacaccttgagtctgggcaagaagaactaactgctctttcagatccccatcccccagtatgtggtcatttgattgggcagccacgggaatggcacacagac

SEQ ID NO: 41547 - DNA, 1124 bp, Artificial sequence
  DNA replication origin
gaactttcagcagggccagggtcccatgatgagtttcctggccaaggtcggttcaagggcagattctcagggctgcctggggcccagggaaagggtgagtgtcagggggaagctgagccccagggcctctgcctcctgttgaagagaatactcccggggccagatgggacagggtctgtgtcgacatggggaccgtgtgaggatggaggcagagatcaggacgatgcgtctcccgggcaaggagcactgaggattgcttggagcaccagaaacccctagggggcctggagtggaccctccctcagatcctccagcaggaacaggccctgtccacaccttgagtctgggcaagaagaactaactgctctttcagatccccatcccccagtatgtggtcatttgattgggcagccacgggaatggcacacagacctgtagaggcccggcgtggatggccaggggagggtggctccgtggtgggggtgcggccaggtcccccagcctgcagcgaccattctgggtgagctctgcagtctgtggcctcagaggcccaggaagctgggaggggtttgaattggatacagggaatagggagccacagatggttcttgagctgtggagtggcaaagtgatatggctgcatagaggaaggaagccggcaagtggggtgggaaggcctctggccgaggctgacagcccctccaggtcgtgcacagagggcgccccactctcccgagacacaaggaagggtggggatttgggggcactgtctggtggcctggatgtccctcacagcactgaggatgagctcttcgtttcaggccctccaggaggccggctggcaggagccggggagggaagaggagcctgtgttccctgtggccctgggcagcgtctgcaggaggctcaccctctctctctctttgctcctcaggtctcctgacaaacacagcccctgaggggccccgggagtggccttggctccctggagagcccacgtctcagccacagttctccactcgcctcggacttcacccgttctctgccgcccgcccactccgtttccctgtggtccgtgaaggacggcctcaggccttggcatcctgagcttcggtctgtccagc

SEQ ID NO: 41548 - DNA, 1051 bp, Artificial sequence
  DNA replication origin
aataaagagaacctcgccaagctcacgaggagtcaggaggtggagggtgaccagcactcgaggcaaaggtgctcgtggtcctgatcgaagccttgcacttccttcccaggccccgtgtcacccttgaggggtgaccctgggcactggtgctcgcccgccactcccacatcatggaacctgtcccagctccccgttcagtgctggccttcagagatgctgtctgggccaagctctgtctctccctcttagtgaggtctgtgacctgggacacatcgcttctctgagcctcagctgctagatcacaaagtggagaccccgcaagcctctgccctcctgaggccctggggccagggtaggcacctcctatgtgggtcttccttctgccgtccctgtctcagccgtgaggtgcccctccagactggccagttcagactgtggatgggatccacttcccaggggcatggatccacatgggggcacgtgtgggtaagaacagggcaggaggcagtgggctggcatgggtagggatgacccagcagcagcagggagcaggccgaagggccctgtcggagagcgagtgtgtgcgtgtgaatgtgtgtgtgcctgtggtgtgtttgtgtggtttatgtgcatgtgcagtgtgtgtgcatatgggtgtgtatgtgtgtacacatgtgtgcatgtgtgtacacgtgtgtgcatgtacggatgtgtgtgcacgtgtgtgcatgtgtgtacacgtgtgtgcatgtgcggatgtgcatatgtgtgtgcacgtgtgtgcatatgtgtgtgcatgtgtgtgcgcacgtgtgtgtgtgcgcgcatctgtgtgcttattttcaccagcaccctcatgtactgagcactttctgagtcaagggtccagggaggaaccctgaaggattcctgagtttaaggagccctcaggaatggggagtggtccccaaggtcaaggaacccccaaggtcaagcagccctcaaggtcatgcccagagcgcctgtcggaaggcagctgaggcaggctgtcctgggaccgttggagcccacc

SEQ ID NO: 41549 - DNA, 1090 bp, Artificial sequence
  DNA replication origin
ggcaggtgggcacctgggccctgccacgcatgctctggctttggccaagcagcccctgtttagtacatgcctgtttggtggcaatgggaaaagaaaaaatacaagacagcagtagagcttgatggctgtaaaaacttctgctcagaggcccttgaaatcactgccgctcatcctgcactgctcaagcaagtccgaaggccaaggtccaggccaacagggccgggatgagagcgccgggtcttgatgaccgtaaaccactgtcctcccaacacgggagcatgatggatggctcgatccatggatggaacatgactcagacctccaggctgcacaggtgactgacaggcaacaagagggggcgtggccaggagaaagagcaggtggaaaggctagttccagttacaagcacacaaacatgcatgtgtgtgccatgccggggtgtggaggcagtgggtattttcttccactgtgcgtcccttgatagtggcataattttgttccaacaacatgtaaaaatgaaaggggagatacccagtggggatgacaggcagccatggccggagctgccagctggaacaggaggtctgggcaccatcctgggtgctgctgtgtgcatggcgagctgccactccagcatcataatttatgcccggtaaggtggacaatgtgccgagtagtgtgaggacgcttgtgacgaacacctcaatgcttcaaaggaagaaaggcccacagatggcacagcaacagacagaggccaagacttgcccagtggggctggggtcaggctcctgaagccagcggagccccctctacagccatcgcatgccctacacacagaccccagtgactggctgccccagggccgtccactcccccagagaccccagtcccagggaacctgcccatcctgtcctccaccagccctggccagtgcccaccagcagccacaaagccgactcacaactgttctctcttccagagttcaacatctgtggacacagggagtgaaggaacgaggcacggtcatgatgtgaggctggctctggagccaaaggctgggtctgtgcgtgtgtaacaggctctggtgact

SEQ ID NO: 41550 - DNA, 742 bp, Artificial sequence
  DNA replication origin
atggctgccgtgggcaagtcaggcagacctgagtccaggctctggcatgggacggggtggggcagccacagacgagcaagtcaggcagacccatcactgggctcctccatcctcctcccctgcaaggccggctgcggtgagaatgagaggagctcaggtaatcatcgtgattatggaggctgcctcgaaacgtgacgcgtgtgggcacagagggagcacgcagtgactgcccgatgggggagggagggacaatcaagggctctgctgatgaaaccccaaatcccctagtgccatccttcaaccagagagtaaaccaaggcccagagcagcccagtgatggccaaggccgcaagcccaggtgtccaccctagagatgggcccctctccacactgccacagctttccgcagtggggcctgacatggaggggtgagcccagttctgtgctctgggggaggcctctgcttcagcatgaaccattatagggtttgtgtgtgtgtgtgtgtgtgtgtgtgtagtgtggtatgtgtggtgactgtgtggggtgtgtggggtgtgacaagttgtatgtggagtggtgtgtggtgagtgatgtgtgatgactggtttgtggtttttgtgtggtgtgtgcttggtatgtgtgatgtatgccggtctgtctgtgtggtttgtgagtgcgacatgtggaattgtgttgtgtgtgtctctgtgtgtgtgtgtaatgcagggttagagttggggag

SEQ ID NO: 41551 - DNA, 978 bp, Artificial sequence
  DNA replication origin
cagatgatagaactccatgtgggtgattcactcccccgtccacaccctcctctccagggactatcctggtaatggaacctctgctgggaggaagcgtggccagccgtgggctcgaagggatcatgggaagcttccattcatggcaatggaattagatatactatccatcaaaaacacttagaaaagatgaagacattaaatattttgtaaaatgcacagcttacctccaagtgaagtaaaagaaatccccaagaaccaaatgaagaggaacctggaagcagaagttctggggcttccatgggagctgggatggcttgagagctgcctgccagtctcagtcaccaaggggcctggttttcaaatacttcaaggaaacaggaggaaagggttagtgcatggcatggtggggtagggggttagtgtgtggcatggttggggtagggggttagtgcatggcatggtggggtagggggttattgtgtggcatggttgaggtagggggttagtgtgtggcatggtggggtagggggttagtgtgtggcatggttggggtaggtgtccctttatacagactcctgcataaataaataaggtgtgttgtcagggggcccccacccctgggagtgtctgagtgtcgaggccatggccaaagccagtgcaagggccagaagaggcttcaagggacagatggagctgtcacctccgcttgcccgggggcctgttcccaactctgaagtcagcaggcaagtccagagggaacaggaaagaagccaagatgggtgatgggctgatgggatgagggctgaggtcctgggaagggaggcccgagggcagtacagggtcagacaacaccttgggctgagcaaggcggtcaagttaagccacctaccgggggccatcccaatggaggagaagacaaactcggcacccacctctgccttaagctgcatggagccgagatctgtctctcccaggaca

SEQ ID NO: 41552 - DNA, 1280 bp, Artificial sequence
  DNA replication origin
ttcgttccacgggcacgtgctcccccacctccctggaagctcccgggccctggcttcccagcctcgcgtttcccttttcttactctgatctccgtgtgtgacaagcatgttcggctctcagagtgtcttgagtctcacctgcagcctcaaatgctgtggacagcaagagcgccggctactgaggtccacccccattccagcttccattttgccttcctgcagtcctggaatcctttattggatgccaactgtatgcacttccattaaagagaaagtgtgagcccactggctggctgcatggtggggattcctggacagtgacgtggtcctgcctttgaggagccggaggaaggagggataggcaggctgctggggcattctaacacaggaggtggggctgagataaaagcgagccccagccaggggataggagatcctggaggcttccccagagggtggctcaggggctgaatcccaggagatgagaggtatggggtttggggggcagggtgtggggtgggggtttggggtgcaggatgtggagtgcaggatgtggagtgtggggtgcagaatgtggggggcagggtgtgcggtgtgaggtgtgggatgtggggtgtgaggtttggggtgcagaatgtgggatttggggttttgggtacagaatgtggggtgcagggtgtggggtgtggaatgtggggtgtggtgttgggggtacagaacgtggggtttgggttttgggtacagaatgtcgggggcagggtgtggggtgtggagtgcgggatgtggggcatggcgtttggggtacagaatgtgggatttgggttttgggtacagaatgcagggtgtggggtgcagggtgtgggatgtgggtgtggagcgggtacagcagcgggtcctcctgtgggctggtggccttgaggccaggtaggaggaagtggccgacacctggagcaggcactgcctcggctccttcaccatccaggcctgagccctcggggcagctgctggcagggggcacctttgtgcagggacaggaatgtgtgccatggagccgcctggggcctcacattgaggacacacagcctcttctgagggcagaggcccagcccacagccctgcaccccacagtgcctcaacacaccccacctccaggtgaactgggcgtgtcagacaggacgcacttgtcagcgggtttgagtaaaagtgacattcctgaggagaatatttttaacagattattcatttgctgaaaaccagcagctgataaatattgaattgca

SEQ ID NO: 41553 - DNA, 1322 bp, Artificial sequence
  DNA replication origin
tcaggagttcgagaccggcctggccaacacggtgaaaccctgtctctactaaaaatacaaaaattagctgggcatggtggtgggtgcctgtgatctcagctactcaggaggtggaggcaggagaattgctggaacccggaaggcggcggaggttgcagtgagctgagatcgtgccattgcactccagcctgggcaacaacagcgagactccatctcaaaaaaaaaaaaaaaaaaaaaaaaggtagacttaaaataagatagacttaaaataaacaaacagacaaacacaccagggagctgaccagctaatccagtccatgagcctctaatgaactcacgggggctggaggcagcggggaaggcctctgcatgctgactccgcccttggatgccactgctcacggccatctctgggaggtggcaggtccctcgcaggagcaggcctgtgcaggcatttctgtatttttttccagggagttttgtttcaaggctgacattagcaggctgtggtatatgcactgattccattggtggcagacctgagtgaccggtgggctccactcccttccagaaatgcatgcccttggcagagctgctggcctccctcagtccctgggaagtgctggctgtgaaacctgggcctccaggctgtccggggctgggctgagcagctgtccccatgaggcagattgatgagtctggattttgtgcccagagcaacagtgcaatgaggtgacatgcagttgctttcagtgagaatgtgtctaggacctcagagtggttacgatgacactcgcgtctaaaagtcctgaggagtgtgcagagagagggagctgggagggcagatgggtgtgtgcgagaggagtggggaccggagagcggagagtgctcagtggggtggggacagagtgaaagggagatggggagagagagggagaaagttgggagagaggaagaaagggcagagagagaaagaaagggacagagggagacagagatggagaaagcaggtggagagggagaaagggcagagggaaatggatacagggagagagggagagagccagagaaaaagaggtggggacagaaagggagaaaggggagagaaggagagagagaaatagagagataaagggagagaggaagacagtggggagggagagagaggatagagaagaggaaacagtggccttggggtgagcctgaggagggacactggctcctggtcagtagcaggagcagctgtgggtggcagtgccattactgggacagggaagatggatgaagggaaaatcagaggtgggagatgagaggagctgtag

SEQ ID NO: 41554 - DNA, 3012 bp, Artificial sequence
  DNA replication origin
tacccaagtctacgaaggcgtcctgccccttccccatcatgatcacgtgttttccatgcacggagtttgcaccatctctccatccacccccttgcctgggcaggtttgagtacccactcccccacccccagtttatccatctgcttccattccactaaactccctgaaggatggaggggacagtggcttgccccaagcaccacacctgaagctatgatcttcaggagacaaagaggacactagagccaccattcacaggctgtctcccaggccctccttgcacaggatgtacaggcttccagcccccattccaaccacaagcaaccaaggctcagagacaccagctaagacacagaaagtcactcagataataccaggagggttatgatgcccgtgcatttctaatatgacagtgatgccactgtatagccaggctcctccactgggtctaagataagagccaggatggagattctcatctgcagagaatcctctgtacagcttcttgtcaggacaggcttggggaacatagaccttcatttggagatggtggaagagtcggtgccggtgtctctgtgcagagagggcttcatgggtagagatgtgggcatggagctgattcatccagatttggggctctgatgttcacttgttgatcaagttcttacctttcataagcctcaggggttttttttctataacatgtgtttaataacaagagtcattacttccccataagtttattgggagtatcaacccagttaatctatgagaacaaccatacagggcatgcagcactcaataacttttgcaaggataggtgaattcgtggatggatgggggaggggacaacaggtgagtatatggacgggtgaatggatggatagatgaatggatggagggtgggagggacaggtggatggatggagggtagaaggggtggatggatgaatggatggatggatgatggagggtgggagggacattggatggatggatgctgggagagacagatagatggatgatgaaaggtgggagggatggatggatggaggatgggagggagggagggatggatggatggatggatggatggatggatggtgggagagacagatggattgatgaatggatgatgaaaggtgggagggatggatggacggatagatgatagagggcgggaggtacagatggatggatgaatggatgattgggggtaggaaggaaagatggatggatggatggatggatggtgggagagatggatggatggctgatgaaaagtgggagggatggatggatagatgatggagggcaggagggatgaatggatgaatggatgatggagggtaggaaggacagatggatgaatgatggagggtgggagggaaggatggttggatggatgatggaggatgggagggacagatagatggagagacacttatgggcaggccgtatgttaagcaatgagaaaacagcaatgtttgaaaacttatgtaatctccaacctcacggagtatacactatggtgggataaactggaattattcaaatacataagaacaagtgtgaaattgcaactgtagcatgctttgttcaggagagaaactcggttgtatgaggctccctacctgagcatttgacccctagctatcacctgcatgacccctgcctgacctcatctgagacaccagaaaaggcttctgtgacaaggtgactttaaaagctgaaggctgtgtgaacaaagaggggatgtgaaaacattggtggttcaggacgggtttcctcagagtcctgttggatgcggacccgggggctggagtggacagagcaaggtgctggtggcaggtgactcaatcttcagaaagatggccccgggcacggaactggtcaaccttggtgctagactgactttggagaggggaaggatttgggaagggccagggatggcctggggtttctggcatcatctgcaggatggtggtggtgccgttcccagatagagcagagggtctgagctgggtgaggtggagccagggccgggtgctgtgacaggtggatggacagagagagagcatggagctcagggatgggtaggagccggggtgggaaggtcggagctgagcatggagctcagggatgggtaggagccggggtgggaaggtcggagctgagcatggagctcagggatgggtaggagccggggtgggaaggtcggagctgagcgtggagctcagggatgggtagcagctggggtgggaagctcggagctgagcgtggagctcagggatgggtaggagccggggtgggaaggtcggagctgagtatggagctcagggatgggtagcagctggggtgggaagcttggagctgaacatggagctcagggatgggtaggagccggggtgggaaggtcggagctgagtatggagctcagggatgggtagcagctggggcgggaagctcggagctgagcatggagctcagggatgggtaggagccggggtgggaaggtcggagctgagcatggagctcagggatgggtagttgctggggtgggaaggtcggagctgagtatggagctcagggatgggtaggagccagggtgggaaggtcggagctatctacacgggtcccaaaaggccacaggtacaaatggcaccacgcagatggggcatgggggtggcataaagaaagagggcaccttgtccttgagcagacccatcaccctgtggccagacagaggatgagcccacaggacagaaggcacagctagagaggaggaggacagcccaacatggccactgggtgtcaaaggccaggcagcggaggcggaaggcagcgcgggcatggaaagcctggccagagggaggagagaggaaaactcaccactgtaggaagaggcaggaaggacggaatgctcagtcactgctgttctcagacacactcacacagcaggcctgaggccatcttgcaaaccacattcatgggaccttgtcactgtccctc

SEQ ID NO: 41555 - DNA, 1659 bp, Artificial sequence
  DNA replication origin
acagcatccctaatgactccataaatctccaaagcgtgcacctttaatctgacataattaaagaccgagttctttccaaatgaaacgtttgaaccaaggaaggcagctctaagtgtcccaggtctgatgctgggcagtgggtcacggcagcatctcctcctgcctgactatcctcagggacaggcttggccgggacgggagtggggacggcaggctcagggccccttctcctcgggcatgtccctcagacccccgcctgctcagaagggatggatggatgaggggcagggctgcccccggtgggctgggagtgggccgggcgttcaggctgggcagagtcacggatgttgtgtgctctcccagctgtgtgagggaagataaacagtgggggtatttccagtcctgctgcctcccgctaaggaggagaccccgggtgcagggcagagctgaggcctaccaggtcagccccaggaggggctgaggacatggctggctcggcttccctgggacatgacggggccaccatcctgcctcccccaggctgggtctgcagtgcacggtgttagtatagggtgtgatgtgtgtcatgtgtcctgcatgtggtgatgtgtacctgtgtgtgatgtgtgtgctgtgtatcctgtgtttgtgggtatggggtatgtgtggtgtctgtgcagtggtgtgtggtttggggtttgtgtacgtgtgtgatatgtgtggggtgtctgctgtgtgtgatgtgtatatgtgtaggttgtgtgtgtgtggtgtgtgtgtgcatgtgtgtgtggtgtttgtgtggtgtgtgtggtgtatatgtgtttgtacatgggttgtgtggtgcgtgtcgtgtgtgtgtggtagagtggtttagggtatgcgcacatgtgtatgtgttgtgtgtatgtgtgttgtgtgtccacgtgtggtgtgtgtgtggtgtattgcgtggtttaccgtgtgtgcatgtggtgtgtgtttgtgcatgggttgtgtggtgtgtgtcctacgtgtgtggtgggtggagtgtgtctgcacgtgggttgtgtggtgcatatcctgcgtgtgtggtgtgtgtttccgtgtggtgtgtagtgtgtgtggtgtgtgtcctgtgtgtgtggtgtgtacgttttcacattggttgtgtgttgtgtacgtggtggtgtgtgatctgggtatgtgtgcatgtgtttggtgtgtgtcctgtgtgtgtggtgtgtggtgcatgtgggttgtgtgtggatgtgtggtgtgtcctgcatgtgtggtgtgtgtgtgtggtgtgtgtcctgtgcatgtggtgtgtgtatttgtatgtggtgtgtagtgtgtgcggtgtgtgtcctgcatgtgtggtgtgtggtgtgtgtgtgtgtagtgtgtggtgtgtgtcctcgtgtgtggtgtgtgtatttgtgtgtggtgtgtagcttgtgtggtgtgtgtccttcatatgtggtgtgtgtggtggttgtgcttgcacatgggttgtgtgttgtgtatgtggtggtgtgtgatgtggatatgtgtgcatgtgtgtggtgcctatgggtcgtgcccaggttgtgtggtgtgtgtgtctgcatgtgggttgtgtggtgcgtgaggcaggaggaggagctgggcctgggcagcggcacatgagacacgcag

SEQ ID NO: 41556 - DNA, 820 bp, Artificial sequence
  DNA replication origin
tgggctcagggcccagttccaaggtgccaccaagtcaggtgggtggagccccaggtgggtggagctccagggagcagcaggtcctgggctgccaacccccagaatctgatgtaggcaccatgctccacagcctgaacttccctttaccagggacatgctcacaagaccctaggcctgcccaggacccaaggtcagccttcccttctcacccccacctgctgtcctggcagagagaggcccccaccacagggcggccatagtggacagagcttcctcctgggctgggacccaggggctgggactcccggccttgtccccctgggcaggacctggccacctccctgttgccccagggtcaggcccagccgtggtgtcgggcacccactaggtgctcagtcagtgctcctgggggcaactaaaggagagggcgggacgaggggaggagggaggcaggcacggggcgttggagagtgccggacgaggggaggagggaggcaggcgcggggcattggagagtgtgggaggacgggaggagggaggcaggcaccgggaattgtctgttgggagacgtttggggagagaatcccgtcccctcagggcccactccccccagaaacctggagaggtattgattgctctagtggggggcggggaagaggcaggtgattgcagagatttgagggtatttttttcacgtttccccagactccagtgaggacaggtctgcagggagctgcatccaaaggcgagtttcccgcacgcgctggacaaacccttctcggggctcctgttaggtctccctctcggtggctcggggtct

SEQ ID NO: 41557 - DNA, 1116 bp, Artificial sequence
  DNA replication origin
tagatggatggatggatagatgggtggagaaatgggtagatcaatggatcatgaatggaggaatgggtgggtgagtggatggatggagggatggatggtggatgaatggatgagtgaatagatatgtggtgtgtggatggatggatgggggatggatggataatggatggatggtggatgagtgggtggatggatagattggttggtgagtaggtggatggttagatggtggatagatgatggatagatgagtacgtatgtgggtggatgaatggatggtggatgaatggatggatggggatggatggatgaatgatggatggatggataatggatggtggataagtggatggatgggtggatggattggttggtgagtaggtgggtggttagattatggatagatgacggatagatgtgtacatatgtgagtagattaatggatggtggatacatggatagatgggtggggatggatggattaataatggatgaatgggtgggtggatggatgggtggtagatgagtggatggatggatggatgagtgaatagatagatggtgtgtggatgaatggatggatggtggatgggtgggtggatgttggattagtggatggattggttggtgaataggtgggtggtaagatgatggatagatgagtacatatgtgggcgggtggatgcctggatggtggttgaatggatagatgggtggggatggatggatgaatgggtgggtggatggatggatggtggatgagtgggtggatttgttggtgaataggtgggtggttagaaggtggatagatgatggatagatgagtacatatgtgggtggatgcatggatggtggatgaatggatggatagatggggatggatggatgaataatggggaatggaaaacacatgacagacagattttgtgctgaagactgcgtagaattgtgagacagcctccctgacctgttggaacttagaaagaagatggtttactgaggcagagtgtgactcagccccataagctggattgcggagggatgaggagatacagtgattgacacttactaagcacttcctgtagacatggccgggagcatcccgcaggaatctcc

SEQ ID NO: 41558 - DNA, 1081 bp, Artificial sequence
  DNA replication origin
ggccttaggcctgcagaagagcacaggtgcacctgcgccacatgggccagaatcaacccaggtgaattccagcccatgccattgatgccaaccatggacgaggaatccagctggggctgaagttccgctacgctgtcagttccactggggatgtgtgttgctccttcagcctctgccagacacacaggcccggttccagcacccgggtgtttgagggtgagtgtgtgggagtgaggctcaggaggaactgtgggatccaaagtcagtgaaaacggtgagggtgagggaggagggaggatggtggagggcaggggtgagtgaagggcagaaaggggcgatggggtgaagggcagagaggggtgatggggtgaagggcagtgggcaatggggtggagggcagagtggggatggggcggagggcagggggtgatgggtcgaggacagaggggggatggggtcgagggcgggggggatggggtggagagcagagggcatgaggcagtgggcagggggtggagggcatgtggggacagggcaggggtgggaggtgatggggtggagggcaaggggggacatggcaggagcagagggggtcggggcagagcgagggggaatgggacaccattattggagacagtggcagatataagcactggagaaaagcaggtaaaggatgtgcggggcaggggattggaggggacgcttgagcagacactgaaataatccgttatgggaagcgttatgggagaatgggagccaggaactgaaattgcagggggtgagcgtggtgggaactctgaggggcgaagggtgaggccggcatcctggtgttctcacacagggcaacctctcatttcatttccgttgtagccagtgtgtgagtcagccagggagcctcagcctttcccactggcttcaaaaagatgtggaggctgatggggaggaggaaggttccccagagcaggaggccatctgatgtaatgaacatgccttcctaagacgctgcctgggccgcagccaagtgtggtcgctctctgagcaatcgatgctgccacaaaaggtcctggcagcagcggcacga

SEQ ID NO: 41559 - DNA, 1084 bp, Artificial sequence
  DNA replication origin
ctccctgcttccagggcctggcctgcagccctgagccgtatcacccccaacccaaggcaccggggcagtgcccaccaaggctaccagacggaatccccacctgggataatgggtgaggaatgtcctctgggtcctccttcttcctgagggaaaggagacctggatcagtggttttttatctggagattggggatcctggggagcccaggaaagtaggccgtgggtctccacagtctcctcccacaacctacaagagcacttggaaaccgaagctttggccacgagcagagggcacaggcaccagcgctgggcggtttgcatgggattctattgctcagggctgggtgttttggggggattctatcagctcagggctgggtgttttggggggattctatcagctcagggctgggtgttttggggggattctatcagctccagcgctgggtggtttgcatggaattccgtcagctcagggctgggtgttttggggggattctgtcggctcagagctgggtgttttggggggattctatcagctcagggctgggtgttttggggggattctatcggctcagggctgggtgttttggggggattctgtcggctcggagctgggtgttttggggggattctatcagctcagggctgggtgttttggggggattctatcggctcagggctgggtgttttgggggaattccatcagctcagcgctgctgcaccaggtttgtcggactctgcagagggtgcggctcggagctaggtacatctcctcagtagacaaaaattgaagttaatcattactaaataattcacggaggctgtgtgggtttttctgtttgttagttctgcttttggtttttaaaatggagcctgtgagtagagacaaccaccccactgtgtctacctggtgtgtagcatgggtgcccatggggtctgtgtggcctgtggcgtgggtatcaatatccccacagacattgacagaaactgcatcaggaaaagcagtgcctcctccaaggtcccacagctgctacttagtggaaggtggcctcgaatacaggcccagtttcacccagaagag

SEQ ID NO: 41560 - DNA, 1532 bp, Artificial sequence
  DNA replication origin
gtggctgcagtgctgggtgtgtgtcggggatcatggaggagagaccgagacacagtcaccgtggtgcaaggagagtacacagctgagtcgggtctgaaggctgctgtgggcccaggagggctggagcacctcagccaggtcccgggagtgggaggaggacagatggcctctgcctggagtcaggggtctctgcccaggcctgtccctgcggctcccgctttctggatctcatggcacggctgcttcttgcggaccttgtgttgggaactcctgaggttcaggaggcggccaggcaccgtgggggatgctcctcgcacggggctggctggaggtgagcctcggatgccgtcactcaagagccaggagcagggccttccaccaaggccttctctgccaagggtctggcggcggggcaaggcactccctccacactgaccctcacagtggcctggggcccaacactgaaggatgtgtgtcctcgggacgcccaggttggcctgcactcgtgttggaggctgtgtagacagcagtcaaaggaaggagtgtgttggggggtgctgtgtgtgtgttgtgatggctgtgtgtgcctgtgtgtatgtgagtgtgtatgttttgatgcctgtgtgtgtcggtgtgtgtgtgagtgtgtgtgtgcctgtgtgtgagtgtggtgcctgtgtgtggtgagctacatgcctgagtgtgggtgggtgtagtgagtggtgtgtggtatggtatgtgtgtggtttatggtacatggttgtggtgtgtgtgtgtatgtggtatgtggctgtagggtgtttggtgtatgtgtgtggtgtgtggtttgtgtgtggttgtagggtgtgtgcatgtgtgtgtgatgtgtgtgggggtatgtggtgttgggatgggttgtgtggtgtgtgtgtgtggtgtgtgtgtgggggggttgtgtggttttggttggtggtgtgtgtggtgtgtggtgcgtggtttgtggtgtgttgtgagaggtgtgtgctgtgtgtggtatgtggtggttgttgtgtgtgggtgtggtgtgaatgtggttgtggtgtgtgtgtatgtttatgctgtagtttgtgtctgtgtatgctgtgtgtgtgtggtatgtggtggttgttgtgtgtgggtgtggtgtgaatgtggttgtggcgtgtgtgtatgtttatggtgtagtgtgtgtctgtgtatgctgtgtgtggttgtgttgtgtatgtgatgtgtgtatgtgtgtgtgtggttgcgatgtgactttgtgtgtgtggtaagtgtatgtgatgtgtgtggtggatgtgtgtgtgtggtgtgtatggttgtggtgtgtgtatggttgtggtgtggtgtgtatggttgtggtgtggtgtgtatgtgtgtgatgtgtgtgtatgtgtgtgatgtgtgtgtatgattatggtgtgggatgtgtgtgtgtggtgtgcatgtgtgtgtggtcgggcccctgcaacatctgggccttctgggagctgggttaggctgaccctgtctgggaggagcctctggggtgg

SEQ ID NO: 41561 - DNA, 1495 bp, Artificial sequence
  DNA replication origin
tgcttgctgagctccttcagccccggccagtccttcacaggtggaggaagcacccgctctccaggcctggttccacggcttccatccctgtgacacctgaggcagaccctcgccccagccaggccgacctcagcgggggctccagcctgcacccaggctgggaaggcctgtgagctgctgggctgtgctggtggcgtaagggacccagccgttcctcccgaggtgcctgccctgcccttccccggggagaagcgtccctcctgctggaggagccccggggctgtatggctgttccgaatgctcgcggacggggtctgtctcctttctgtggcctcccaccgaccctgctgtgcctccctgttctgggaaagccggtaccttgtttgaaaaaacggattttaacaacatatttctcacagcctgcttcccagagatctcgccaggatttctggtcactcctcgggttcagagagcctcacaacaacgccgggagtgggtttgggagcagatttgggagtggatttgggagcccctctgcccgctggggaggaatgcctcacctcggggctgggtgcccaccaccacaggccggctgaattcgcccacatgcgcccctctggtcccgtggtgacacggagcttcggggaaaagtcagcagacaggaacaggaagcaaggatcctgccccatctgggacacacagcgtggggacctgggaagcgtcacccacctggctgagcctgggtttctccgtctatgtgaaggtgtcaacgagggctctcacccaggcccctcctgagaacgcagccagagactcctctcatcccatcatcgtgaacccgagaccacacctgtgaagggggccccagcccaacaccgaaggactccagaacccccagagagcagagacttcaccagaagctcctttctttaaaaaaaaaaaaaaaatcccttttaaaacattttcagccacgtgatcaaaagtaaaatttgcccatctaatttattaaacttccacccaaacttagacatcaaatgttttattaatattttctatcatccctacaagttaaaccagccatgaaaattaccttcaacagaaaaaaaaaaaatgtcgaaaatgtattcatttataggagccacacagcggccctcctttggcaatttaatcagaaatgactgaggtgtgcccgaatacgttttctctgatacaaatattaaaatatttaattaatgtcaatcaggcccagaagaaagaactgttcacagcagccatttacccagagcagctgccaggccgagcctcaggcccaggctcagtgccccctccccggagcccccaggcagaaaaggaggaaccaccctgaggccacctgcaggtccctggcagcccagagcgtgcccggatgtgatgtgtcctctgtgggtgacagagctaaggaggtacctgggcacaccgtccataccccctcccttccatccttcctctctctatt

SEQ ID NO: 41562 - DNA, 1238 bp, Artificial sequence
  DNA replication origin
tgaattttcaagtttctgtcagatgagcaaaaggaaatggaaatttcctataaatatttacctttccacagcagcaggaataacaaggcctcaaatattgtttgaggccagtgaaactgaaaacgtggggacccctcgctcgaaggatgaagcatttcaggtcagtgacagcaacgcattaacccaggtgtgggtccttctagtgcggggccctgtacactgcaggaggaatcagttgaccagctacgaaggcgggcccagcaaagctggaatggccccacagggctgctgagaatctgcccgagggtaccacagatgccctcattccatcagggcccaaggtactgggttttggcgtgttggactaaacaccaatgaaactgtacaatcttgtgcttatgcctgtgtgtgtgtgtgtgtgtgtgtgtagatttgtgtgtgcaggccagtgtgtatgtgactatatgtgagtgtgttcatatgtgtgtgtgtgtgcacctgcatgtgtgtgtgaacgtatgcatgtatgcatgcatgcctgtgtgtgcttttgtgtgtgttcatgtgtgtgtgtgtgtgcacctgcgtgtgtgtgtgtgtgaatgtacgtatgtatgtgtgcatgcctatgtgtgcctttgtgtatgtgggtgtgttcacatgtctgtgtgagtgtgcacctgcatgtgtgtgaatgtatgcacttatgcgtgcatgcctgtgtgtgcttttgtgtatgtgagtgcgttcacgtgtctgtgtgagtgtgcacctgcgtgtgtgtggctgtgtgtgtttgcatacctgtgtgtgtgcctttgtgtatgtgagtgtgttcatgtgtgtgtgagtgtgcacctgcgtgtgtgtgaatgtatgcatgtatgcgtgcatgcctgtgtgtgcttttgtgtatgtgagtgcgttcacgcgtctgtgtgagtgtgcacctgcgtgtgtgtggctgtgtgtgtgcatacctgtgtgtgcgcctttgtgtatgtgcgtgtatgtaagtgcattcatgtgtgtgtgagtgtgcacatgcttgtgtgtgtgtctttctggatgcctgagtgtgccgtgtgtgcatgtgtgttggggagcacttgggatgagggtgtgcacttctggaatgacttgtcagtggccctgctgggtcccgtcttgaccccacctcacccggccttgcttccaggtggggccctgctgcttgctgagctccttcagccccggcc

SEQ ID NO: 41563 - DNA, 1261 bp, Artificial sequence
  DNA replication origin
aaaagacactaacaacaacatttttctctttctagaaacagaggcttactgttgtccaggctggagtgcagtggctgttcccaggtgtgatcacagcgcgctacagcctccaaatcctggactccagagaccctcccgccccaggctcctgagtagctgggactacaggtatgcgccgctgccctcagcttcatagcaaactttttagatggaggttgtttttgtttttgttttagaaatatggaagacactgaaatctttaaagagaagaaaatgctcttcaggtgctggggattgagttatttacgtcaaggcacatgactatacccggccacgggaggaggatggcgagtcgcgcttgcaaatgtttgctcacccggcacgtgtcacgagtgtgcgctccgcgcccatcacctttccaggcgctgaggatccggtcgtgaacaaacccacaacaatccctgcccttaaggagcttggattctggtggaaacagacaggacatatgtccaacaagcatttgataaagtgacacaccaaacagctgatggtcataaggttctcaggagaacagagcaggctgagctggagtctttgatggggttggggggagcgattgaaaaggtgcatttggcctaaaactgaagaggatgagaagggagctcgaaccttgaaggagggagtgccgggtggggccggggacactgagaaggctgctcagctggggagggggattgggaaggaaggaggaggaggaggactgagaggaccaaggtgagggagctccagcaagcagggctgagcagggtcaaggggagggctggcgcttctgctccgccctgggagcagtgagaaacggaggcctgggagggtgctgagcagaggagggtgtggctggtttctgaaggggccgcagcagggtggaacccactgcagccatacagtccggagccccgagggggcttgagccagggcagggcagtggggcggggagaagggtcagaccctgggtgcatttcacaggcaggtctgcaagcactgatgagagtgtggtgtggccagaagaggaggtgagatggctggaaggttctggtccctggagaggaagaacacaggtgttattctagacgtagtgctgcaggtgttgtggttctgtggggtcaggggctggtttgggcactcctgcttacgcctcctggtgaacatctaggtggaggtggcagtgggaaggtgggacatcctcagggaagatgtttgggta

SEQ ID NO: 41564 - DNA, 1233 bp, Artificial sequence
  DNA replication origin
caccttctgagtaatcattctcctgcaattcccctgtgctatggacattacaataaatttcgtaggtgttttttcctactactctgcattttgccagttgattttcagggtcctttcagaggacaaaggataagttttcccttggtctctacagagtcatgtatagcacctccataaaatataatattgaagtaaaatttaatgtattttagctacaaatatcaaacattgatgattctcaaaaatgtgttagtgttatttgggggaaaaacaagtcatagaaaaatacactcagtatgatttcatttatatgaagttcaaaacaagccaaatgtaaataatatattatttagggataggagttacaggtgtcaaacaattttgtgtaaaaaaaaaaaaaggagatgattaacccaaaatttaggattgtttttctttcaggaaaaaagcagcagcttgtgaccatggagggaaaaagtgctgggaaaagccctcatctgtggccaggggaggcacggggatggaatggatggcactgaagggtggacaggatgcctggtactgtagtatggacgggatggatggcactggggtgtgtatgggatggatggaactggggtgtggacgggatggattgcactggggtgtggatgggatggatggaactggagtgtggacgagatggatggaactggagtgtggacgagaaggatggaactggaatgtggacgaagggatggaactggagtgtgggcgggatggattgcactggggtgtggacggaatggacagaactggattgtggaagggatggattgcactggagtgtggacggaatggatggaactggagtgcagatgggatggatggaactggaatgtggacgaatggatggaactggagtgtggacaggatggattgcactggggtgtggatgggatggatggaactggggtgtggacgggatggatggaactggagtgtggacagcatggatggcactggagccttaccctggatgatgaggaacctgagcagatacagagggtgaacggatattgaaggtgggggatacactcattgagcagggctcttgctaaacctggatttcgtaaagaaatgcccacataggcctaggagaaggttcaggagcatggctaacaatgggggaagcaaagaattttcatcactgcacctgctggtggatgttgagccatggtcactgaaaggaag

SEQ ID NO: 41565 - DNA, 1230 bp, Artificial sequence
  DNA replication origin
ctctgtatctatctgtctattatctgtggatccatctacctccatctttatgtcagtctgtatctggctgtgtatctgtctatccggtgtgtgcagcttaatctgctataactgaaaatgagagtggccagagctggtgtgacaagtgggggtcccctgagctttctaggttttagtttctcactccaccctcgatcccctaaccatgcttgccttctttcctctgcccccttacctttatgatcacatgatacaggacaagactgctgagctgtagaggcagggcctcaggtacacaacagagcaatcaggaagcaggagctccataaatcccccttggatggatggatgaatagatcaatggatggatggatgaaaagatgaatgggtaggtggatgacagacaggtgtgtgtgtggataatgaatggatggatgaaaagatggataggtgggtggatgacagatgggtgggtgggtagaggacaaatggatggatggatggatggatgggtatagggatggagggatggatgggtaggtgaagggatgaatagatagatggattggtggatgcgtgaatgatggatgggtgaagggatggagggatgggcaggtgggcaaatggtgaagggatggatggaagaggatggcttcatggatggactgataaatggattgatggatgggtagatgatggatgaatggataggtggatgaatagatggatggagggatgcatggatggatggatggatggagggatgggtgaaagggtggatgatgaattgatggatgagggagagatggattgatggatgggtgaatggatggattgattgatgagtgaatgatggatggatgagtggaagatagatatatggagtggggatgatggattaatggttgactggatgatggatggatggatggattgatggatgggtggatgatgaatggattgatagatgggtggattatgcatggctagctgcatggattgatggatgagtagatgatggatggatgaatggatgggtggatggtggatgaatgggtggatggatgggttgatggatgggtggataatagatgagttgatggatgggtggacgatggatgggaacaggtattatggagtttgccattgttgcccccctttgttgagagggtttgagtgagaaccaacagagctgcctgtgctctgcgcccaccagaattttgtcctggc

SEQ ID NO: 41566 - DNA, 1105 bp, Artificial sequence
  DNA replication origin
catgttgatgagattgtggacaacttcgtcaaggtgcaccaacatgaagccctttgttggaaagggctcagaagagagatggaaatgattaatggttggcgaacacaagaatcttagggtaaggactggggcctgcttaccatggagccgacaggatggagagataaattaatgtcctcaattataaaggggcttgagatatggaaaactgctgtcgacaggcctccctctggaggaggaggacgaggggtcggagctgcacaaagtcatcgactgccccaagggcctcctggagagaggagaggaggggagctgtctcggatctggggcaggggcattggaatgaacgcccacccctctgagttgaggctgctgagggttcaggaggcacagccacccatcagaaaggggtgtcagcatcctctggtctctccctggtggagctgctgttggatcctctggcagaacactagggcctaagcagtttggacagaatgccccaggaagtggggaggggctaagaaaatcatgtgtgcagagtgggaggggctgtggatatcacgtatgcagaggaaattgtgtgtgcactgtgggaggggttgtataaattgtgtgtgcagagcgggaggggctctggaaatcgcgtgtgcagagcgggaggggctgtggaaattgcgtgtgcagagcgggaggggttgtataaatcgtgtgtgcagagcgggaggggttgtataaattgtgtgtgcagagcgggaggggttgtataaatcgtgtgtgcagaacgggaggggctgcggaaattgtgtgtgcagagcgggaggggttgtataaatcgtgtgtgcagagcgggaggggctgtggaaatcttgcatgcagagctgtgaggaactctggaaatcttgtatgcagagccccacttcagtgtctggggttagaaggggagccggtgggtgctggaaggaacagcgcctggactgcctgagaacgtctgggccttgtccgggcaccttggtgattttccattacctccctcattccctttcatcttcacttggggtttgaggaaccgcaattagcagatggtttgaggtctattagccagtgc

SEQ ID NO: 41567 - DNA, 813 bp, Artificial sequence
  DNA replication origin
tgactggcacacacctggctgcaggtggccctggaaacaaattgcagacgggttcagcctggtcctgggtgggctcccaaagcctgggcagtgagggcagagccgggggccgagctggagtccgtctggtggggtgtaggggtggcaggcaggggatttggctggcggggttgggagggggatccagacagagaggaaatggaatttgcaaagtcccgagggcatttctcaggtgcaatagttgacgttggagtgaggtccgagcagagcctgcagctggggcatctggggagaggggtcgggtcttggactgggggagggctgtgggtgggggctgtgggtggggctgtgggtggggctgtaggtgggggccgtgggtggggctgtgggtgggggctgtgggtggggctgtaagtggggctgtgggtggggctgtgggtggggctgtaggtgggggccgtgggtggggctgtgggtgggggctgtgggtggggctgtaagtggggctgtggggtggacagaggagcaggagtttgggatttttgagaatagaacacaaacctacaggacttgctgattagggaggaaaggggagctgttgaggtggaaatgaccaagccgttagctgaaagccacagtgcagtgggcaccctggccggcaccccgtccacctgttgggggctgaagcctccaccacacaggagacagacaggaggtgtcggaaacggagccagacaactgtgtggggactggggtgcctcagcctgcacgtccccagggctcccagcggcccggggtgcctcagcctgcacg

SEQ ID NO: 41568 - DNA, 1017 bp, Artificial sequence
  DNA replication origin
ccaacagcctccaaaaagagcctccctcaccttgcttgttctaaaggaaatcccatgaattcagtccccaaaggacctttgacttttatagggagggagggcagggtacggagagacccctccttcctctcggcctcccagccttcctgaggttccctccattccttcaacccagattttcatttgtgcttgacttcttgctttgtgctgtgtttctgaaactcttctaagcccatcctcccgctcactcctctaaagttaatgtcccagccaagaagcctcaaagcagggtgtcctggtgtggagtggacatggccaaggttggaccccaggggaaaagaagccgaccttgagcggcaaagacacagggtgggcgggggcctcatgagcatgcaggggatagatcagggtgggcggggacctcacgtgcaggcaggggatagatccaaccgtccgtgttccaccatggggacagaggatcaagagccgggggcctcagtctcagcagagcccgggtggcagagagggactaaggcctggaggaggccctgccgctctgcgtggaaggcaagagtgagccatgggatatgatggggagcagggttgtgactggagagtgttgctgggacatcatgctgctgcaggcggggtcagagctgaaactctgaagtggatgagggtggggtggccttgggaaggtgctcagagagaagggagggcccagccgggaaccgtgagccatggtggcatccgggcaacctcccttgtctgggggtggctatggggctttggctgcgccgagtcctttggtgagtgctgccccgctcactcctcccgagactgagcctccgaccgccctgccagcgtggtctctgtgtgaggagaagggtcccaggggagaacaacagccagagtgctggatcccgcagcccccgatgtgaggtcacacaggaggtcaggctgggccatgctgatggagcttctgacgggtgagaaggacacacacccaaagccacg

SEQ ID NO: 41569 - DNA, 833 bp, Artificial sequence
  DNA replication origin
tgcggctgagctggagtctgagggtcagagtgtgggattcaggacactttttctccctcgacctaagagaaggagccccagggcagagggcagtgagccaggactgatgcccaggagaccccagccagcctggggtccccacctcacaccttgagatccggagacccgggtggatgtggcatacccacttcatggctgcaggatctggagacctgtggggtcaggcttaacaggaagggaaaagagcacagtcaaccttgaacctccataaggagcatgaatgtgtgaagtgtgcatggtgtgtggtgtgtgtgtgatgtgtaatgtgtgtgtataagagtggtgtgtgtgtggtatgcgatgtgtgtgtgttgtgtgtttttctgtgtgtgtgtgatgtgtggtgtatgtataatgtggtgtgtatataggagtgatgtgtgtggtatgtgatgtgagcatggtgtgtgtagtgtatgtgtttctgtgtgtgtgacatggggtgtgtgtacaggagtggtgtgtgtggtatgtgatgtgtgtggtgtgtttctgtgtgtgtgacatgtagtgtgtacaggagtagtgtgtgtggtatgtgatgtgcgcatggtgtgtgtgtggcatgtggtctgcgtgtttctctgtgtgtggtaggtgatgtgcgtggtcagtgtagagatcagtaatcctcagcagcagcaaactcaggcattcattccccttgccctgtgcagcccctaaagcctgcagcctcggacagactccctggactcccacgcattgactcgccattgtccctgccaccctccctccccagtgcagctgtgagt

SEQ ID NO: 41570 - DNA, 1403 bp, Artificial sequence
  DNA replication origin
tctagagtcggcgggcagagggaatcggctcgaactgcgatctcctttttctctgcattattcacaggaggcttatggccagcatggaactccaggaaactccatttagagcaacatctgagtttctgtagaaaacacactgctctggacaaaccttgttaactgaggaaagaaacgttgagtctctgggactctgctgggactccggtgcacgggtgctgcccgtccccggggcggaggctctgcgaggcggccatccctaggtggatctgccccactgcctccttcaggctatgcaggcctgttctgggctcccccaggcccaggccggggaagccaaactcctgcagtgccggtcccaagcttgggggccccatgcacagcctgtgtgcagaggtcgccgtcggcctccctagcctgcacgggtgtacatgacccctcctgcctccagccctcccggacctgattctaacacatctccacttccccaacccgaacacactctcatggtagacacagcaaaaccttcctcccagaagcaaacctctttccagagaaaacttctctttccttcttctctgcttggatatcgtgttgtctacacttttcctaaagcaattatcccagtctgcatgcatttaagtgtgtgcgtgtgtgtgtgtgcacatggtgtagtacatatggtgtgtggtgtgtgtgtagagtgtggtgtgtggagtgtgtgtgtatgtgtgtgtggtgtagcatctgtggtgtgtggtgtgtgtgtgaagtgtgtatctctgtgtgtgtgtgtagtatatatggtgtgtggtgtgtgtgtagagtgtagtgtgtgtgtatgtgtgtgtatggtgtagcatatgcggtgtgtggaatgtggatgtatgtgtggtatagtgtgtggagtgtggtgtggagtgtggtgtgtggagtgtgtgcctctgtgtgtgtgtgtgtggggtgtagtatatatggtgtgtagtgttgggagtgtgtgtctgttgtggtatatgtggtgtgtggtgtgttgtagagtgcggtgcatggagtgggtgtctgtgtgtgtgtgtattttgtagtatatgtggtgtgtggtgcgtgtgtagagtgtggtgtttggagagcgtgtctctgtgtgtttgtgtggtgtagtacatgtgtgtggagtgaatgtgtctgtgtgtgtgtgtgtggtgtagtatatatggtgtgtggtgtgtggagtgggtgtctgtgtgtgtgtgagtatgttgtagcatatgtggcgtgtggtgtgtgtgtagagtgtggtgtgtggagtgcatgtgtctgtgtgtgtgttcagtgtgctgtgatgtgtgtgtctgtgagtttccagaagtcacatgacgtgcgatctcacagcggcttgaacgtggaag

SEQ ID NO: 41571 - DNA, 981 bp, Artificial sequence
  DNA replication origin
ccctgcctggctctggcaaagcagaggaaacagaagagagcccatccgtccacctctcgcccagcgcctccaccctcaccgacgtgtgcccacccgtccacctctcgcccagcgcctccaccctcaccgacgtgtgcccacccgtccacctctcgcccagcgcctccaccctcaccgacgtgtgcagcccccgcctccccccacaggaaaggccagcgatttcacggggccgacacgccgtccacgcgcagttctcagtgacagacgcagcgctcggccagggctgtgcttccccacacctgcaggcagcacggggttgcattaaacagacatcacagcctcgccaaggaaaagccacctcacccatgagtcaagggaagcagagaaatgcaggatcagggcggaggtctggcaggactgggaggctgcagctcagaattcacacagcagagctgagtccaggggaggcggggcgcggggtgggggaacgtgggggaggaacaaggactctcagaattaaaatggagcatcgtgaaagatacacaaacagatggatggaatttaaaaccaactgccagtcagacacaactcaagaaaatggaaagacgtcgtcgaagtttcccggtgaagcagaaggacaaaaagaccaaaaatgtgaatgaaaagggttaagaaactcaaaggattgaggcccagtgtgtccctgagtgtcgcaggaggaaaaagagaagagatggtgagcaggtgtttactggggaataggagagggctcacaggatggcacctgggacaggcatgggcgccgcgccccgaaaggttccctgactccctaaacacacacatctaaacacctcctgctgaaaatgcaaatcaccaagtcaacagctgcagagaaaagaaggccccctgctcagggggaggggactccacccagcaggcgattcctcagcagccctggaagctggaagacagtcggataag

SEQ ID NO: 41572 - DNA, 1703 bp, Artificial sequence
  DNA replication origin
caaagcacgctcacaccctccccttcagccttggcttctcatggtgctctgttgttccccagttgttcctttgtccaggctgcctctcctgaccaaagccctccctctaggattgtgctcacatagagcctccccaaagccttccataaacacttcaggtctaaaataacagccaccaccacatgaagagctaacgaccatgagcttgaatgtgggccaggcattgtgttaagtccacatctccagtctaatttaattttcccaacagctctgggaagaaggtgctatcatttccatgattttgcatggaatcaaaaacacaaagaatgaaataacttgtgcacaaacccacagcttgtatgtcacagagactgagttcaaacccagatagcacccatgaccctcagagctgaacgttgagattaatgggtggatggatggaagcaaggaaagatggatggatggatggatggatggatggatggatggatggatggatgtgtggatggatgtgtgggtgggtaaatggatggatagatggatgtgtgggtgggtggatggatggatggatgcgcaggtggatggatggtggaaggatggaaggatgggtgagtaaatagatgtgtgggtgggcagatggataggtacatgagtgaatggatgtgtgaatggatggatgatggtgggtggatggatggatgaatggatggatgggtgggtggtggatggaaggatggatcatgaatgagtgggtggatgatgtgtggatgggtggagagatgatggatgggtggtggataatcaatgaatggatgtgtggatgggtgtatggatgatggatggatggatggatgcatgggtagatgagtgagtcgatggatggtggaaggatgaatagatggatcatgaatgggtgggtggatggatgtgtgggtaggtagaggaacaggtgcctgtatggattgatgatgtgaatgtgtggatgggtggtggatggatggattggatgtgtggatgggtggatggatgggtggctgaatggatgttggtggaagaatggatggctggattgtagatgagtgggtggatgggtgtgtggatgaaaggatgggtgccctgtgagacctgcagagagtaaatagatgtgtgggtgggtagatggatagttgcatgaatgaatggaggtgtggatgggcagatggatgatgggtgggtgcctgaatgtatgtatgacgtggatgtgtggatgggtggatggatgggtggatgaatggatgtgggtggaagaatggatagctggattgtagatgagtgggtggatggatgtgtagatgaaaggatgggtgagtaaatggatgtgtgggtgggtagatggatagttgcatgaatgaatggaggtgtggatgggcagatggatgatgggtgggtgcctgaatatatgtatgacatggatgtgtggatgggtggtggatggataaatggatatgtgaatgagtgaatggatgatggatggatgtgtgagtggaaggatggatggatggagcatggatgggtgggtcaatggatgtgtgggtgggtagatggatgggtggatggatgaatggatgatgcttttgattttattggactgggctgataataaggccctaaagtcctctggaagtgatgttactctctgcaggtctcacagggcaccttgactg

SEQ ID NO: 41573 - DNA, 1285 bp, Artificial sequence
  DNA replication origin
tggcgccttggaacagagcctggaggggccactgggtacagctggggggccacgggctttgagtaaaggcttgaaagggttatgaagttgaccatgggaatttccagggaaaggtgacagctccttgaaggccctgaggctggggcggtcaagaaacagtaaagatggaggaagagcagctggggaggtaggaggagggcgggctgtgcccacctgggggcctgagcaaggcgttttagagatggggccaggcacaggagggctggggacctggggctgacctcagcctgggggagaaccgtctgagtgtactttgggggcctcctggggtccaggccaggtgagcccctgatgtgaaccccggcgctacaccttcacggcacttgcagaacgcacttggagggggcgcagccctcaaagtaagccggggcccagtgcctgacttggctgcttcacggcgggaaggaggggacggaagctggaagactgcttggttgtgggcagcatccccaaaccacagctcacgcccctgcgaggacccgcacagccgggagtgaaggccaaaacaccaagggcttcagaggaggaagggatgggagtgcagatggccggggagggcttcaggggagggagggattggagtgtggatggccctggagggcttcaggggagggagggattggagtgtggatggccctggagggcttcaggggagggagggattggagtgtggatggccccaggaggccatgagagccacatcaggccccagcacttccaaggggcgccaggagcacttggggctgctacagagaaggggctcccggctcactttggacacaaacccccgtctgagctgcctggtctcagaggccccggacaggagggactggagaggagtgttcctgtgtgggatggagtggccggtggactgagtggctttcctgggtgggatccctttcttggatatcccagagccatgggaagcagacctggaccacattcctggcatccagctggggccagaggggcagccagtcccgggcggcagagaggatggtgaggccaggcctgggaagaggcagctgcaaggaggacccctggctcgtgggagggcctggttgcagcctggaggagctgggcctggaacacaacccctgacttgatggaggacgcaaaaccaaacatccctgcaggcacctctggcctgcgctggacaggatggtgctggcctcctttccctgtttcctggggcacaaaggaacgggcagggaggtgttagggc

SEQ ID NO: 41574 - DNA, 1582 bp, Artificial sequence
  DNA replication origin
agtgatccttgaagctggagcaagatgaccccagacaagctgcgcagcccagtctgccctccacagtgagaatttcttacctgagattgtggctgccccacaggtggtatgcaaggagcagggagtttgacgatggctttgcctgccatgaaagggagaatctcagactacaaaggaaaaccagcgcctctggaagtagggcctggctccagcctctgagaggggcaggccaccctccccagaacacagcagctgaaatgccataccctcctttgatgcctggggtgggatcaataccacccttcccctcccctctcccagccacctctctccaagggagcggcatggtggcctacagatctcctgctgctcagcctccccctccacctgggcaggtgagtccggggcagggggagtaggaggccctgtgagacttgagcaggtgagtcgggggggtggtgtaggaggccctgtgacacctgggcaggtgagtccggggcagggggaataggaggcactgtgacacctgagcaggtgagtctgggcggggggagtaggaggcactgtgacacctgggcaggtgagtctgggcggggagagtaggaggccttgtgacacctgagcaggtgagtctgggaagggggagtaggaggccctgtgacacctgagcaggtgagtctgtgcggggggcatgtaggaggcactgtgacacctggacaggtgagtctgtgggggggcatgtaggaggcactgtgatacctggacaggtgagtccggagcggggagtaggatgcagtgtgacacctgggcaggtgagtctggaggggggtgtaggaggcagtgtgacacctgagcaggtgagtccggagggggatgtaggaggccctgtgacacctgggcaggtgagtctggaggggggtgtaggaggcagtgtgacacctgggcaggtgagtccggaggggggtgtaggaggcactgtgacacctgggcaggtgagtctggaggggggtgtatgaggcagtgtgacacctgggcaggtgagtccggaggcaggtgtaggaggcactgtgacacctgggcaggtgagtccggaggggggtgtaggaagccctgtgacacctgggcaggtgagtccggaggggggtgtaggagacagtgtgacacctgggcaggtgagtctggaggggggtgtaggaggcagtgtgacacctgggcaggtgagtctggaggggagtgtaggaggccctgtgacacctgggcaggtgagtccggaggggggtgtaggaggcagtgtgacacctgggtaggtgagtctggaggggggtgtaggaggccctgtgacacctgggcaggtgagtccggagggggctgtaggaggccctgtgacacctgggcaggtgagtccagaccaggtggggaaggccctgggccttgggccacagctcactctgacctttctttgttaggaagggagttgccactgtgatctctcatggcccgtgcttgggggtgggcacagggctggcatgccccccctcctcagtaccaacagctgaactctgcagatttcaccaggacacca

SEQ ID NO: 41575 - DNA, 1619 bp, Artificial sequence
  DNA replication origin
agcggcccgccccggcgtgaacagcaggtcccggcgtctgaggccctgagcggaagtcccagcgcgagcagaaaagatggtgggaagggggtggggctagagtcgtcgcgtgcagccgcgagggacgacgggaagaaggtgcccaggagccgccctcccctcgctgggcagccaggcctcaggcttggcggccttaggggctgggccgggagcccgcggagaggacaaggaggaggctgcggtgattgcccccgagggctccgtgggtgcgtactcaccgcccggggccctcgggaggcagcggcctgctctccactccacacccccagggccgccatggatctggctgctccgcgcgggagctgcaggtgaggcggacttggctgtgggctgtggtggggccgcgcccgtccgcagctgggcaggccacgtgcctcgcaggctggacctcccggtgcccgcgccctgggcacaccctgtctctgtctccgctttctccgctgccccagtcacccccttctcacccctaagaatcgcgcgtcagcctgtgacctgggtggactgcagccgcccagggactgcgcattcgctccccaagtgcgcagctgaggagcgaggccgggttcggggctaaggagccgggaggaagcggccgggctcctgaccctatacggaggtcatctcggaggagtgggatgaagggcggcgtggtggactgttctgactgctaaatctgctgtaacagtaaatgcatgacttccatcaggagggaagacactctgaatgagtggagaggcagctggcctggaggggccggcccaggccattcctggcccaggcagagcgtctgcacacgtgcgagggcagatgtgagacccggtgccacctaagagtgctctccaagaacctgcagctgcaggtgccgttgatcctccactggagccggcttccaccaggagtggggagcaaacaggaaactctgacgctcctgtgatggccccattactccgcgtctgactcctcacccagcagaccactatcgtggcttttcgtgaatttccctcagaccctgtttctaccctgactttgtctgtgaagctgaaggcagcctggggaaaacgtgcagtttctacaggacatgagctggtgacttacataatggcttatataagccccaaactcaaataagctagaattcccttggcccatcagaggcccatcatgaagttcctagttccatcaaatgaagtgtgagaagcccataaacatttagcattgagctcctctctgatgcaggagggaaagcagcaggaaggaaggcacccgggagacccagaggaacatctttgtttatccagcgtggctctgtggtcctcctgcgctttctcaccgctgggctggggtagacagcagcccaccaccaacatcctaaaatacagacggtagttctgctatgcttgaggtggctggaggtcaggatgccaggctgagggcagcccgcagatgggggccggctctttcttccagaggaagagtagggaaacattcacttcattgcataaacgagtcccaatttgcattttactgtatcgtaaaacccgaaggccttactttagtgt

SEQ ID NO: 41576 - DNA, 1069 bp, Artificial sequence
  DNA replication origin
cctcgctcctcagctgcgcacttggggagcgaatgcgcagtccctgggcggctgcagtccacccaggtcacaggctgacgcgcgattcttaggggtgagaagggggtgactggggcagcggagaaagcggagacagagacagggtgtgcccagggcgcgggcaccgggaggtccagcctgcgaggcacgtggcctgcccagctgcggacgggcgcggccccaccacagcccacagccaagtccgcctcacctgcagctcccgcgcggagcagccagatccatggcggccctgggggtgtggagtggagagcaggccgctgcctcccgagggccccgggcggtgagtacgcacccacggagccctcgggggcaatcaccgcagcctcctccttgtcctctccgcgggctcccggcccagcccctaaggccgccaagcctgaggcctggctgcccagcgaggggagggcggctcctgggcaccttcttcccgtcgtccctcgcggctgcacgcgacgactctagccccacccccttcccaccatcttttctgctcgcgctgggacttccgctcagggcctcagacgccgggacctgctgttcacgccggggcgggccgctggctgtgtccgcctgagctgaggtctatggcccagagggttgctgaccccgccatcctccctgtgtccagcccactgtctgctgccctgtgtccccacccgtcctgacccctaggctgccaggtggggacatggccatggtgtcattgcatccccctgctgaccccgcctgggccctgaccttgaccctgacctcctagaggcagtcacagggagagggctgcagggctggtggtagtggtgccatcctggcccccttcatgaccctgcctggccgctaatgctgaccctgacccccgccccccaggctgctgggctcacggtcctcacgtcatcagcttctgtcacggcccacctgccccaccaccctctccccatgactgccaccaggaggccaccctcatggggccatcagcccctccagcagctcagtccccgaagcctggccccag

SEQ ID NO: 41577 - DNA, 1182 bp, Artificial sequence
  DNA replication origin
gtcaccagctcacagggaagagcttttccttcccttccctggcaccagcattgtgatgggtaattgtgtcaacttggctgggccacagtgcccagatatttggtcaagcactaattctggttctcatgtttctgggagggtgctttttggctgagagtaacatttcaatcagtggactttggggaagcaggtggctctccaaaatgcaggtgggcctcattcaatcagttgaaggtcttaagaaaaccaagatggacctccccaagcaagaaggaattctgctagcagaggccctgggactccaactgcagctctccttaggtctccaggctgccacctgccttgcagatttcagactccacaattgtatgaggaaattccttaaaatacataaatatacatagatggatggaaagatggatggatggatggttgattgggtgggtgggtggatggatggatggatgggtggatggatgggtgggtgaatgggtgggtggatggatggatggttgaatgggtgggtgggtggatggatggatggatggatggttgggtgaatgggtgggtgaatgggtgggtggatgggtggatggatggatggatggatggatggacagatgggtgaatgggtggctgggtgggtggatggatggatggatggatgaatggatggattggatggatggatgcatggatgcatggatggatggatggatggatggatggatggatggatggatggatggatagatgaataaatgatggttatcccttcctttgctggctttcgagcctccgggagggagcagttgggtgtctgaggggcccaggtcctgaggcaggaggcagagcaagcagacactgcacccagcgtgctgtcgcctggcggtgtggacccctgtgcactggtgtgtgcatggatcacggggcagctctctctggagcccggtgggaggagcaggggcaggatgtgctgggccttctgctgagaagggtgggtggtgttgaggcagaaggaagagctctgtgccgctagcttgggacctgctagtgtgtgattctgaaagccggagagagaggccaggctcacctgggacatggaggcaaggcccaggtgtcagcaaggcccagagtgggcagggagagagcctctgcccatccatgcagagagtggggtgg

SEQ ID NO: 41578 - DNA, 1132 bp, Artificial sequence
  DNA replication origin
gtggatgacccacatagttttgggctggaaaaccaaagcatatactgagatctccccctctgcctgcagtgagttttctcttggaattccatcttgcccccatgccaatcctaaagtgtatttctgtgttgcatgttgcttgctgtgcagacactatcccctagtaaggaagaggaaggcagagccagccttcatcccataagtcagcattgactttcaaaagtaagattttttagtcaaagcaggtacagcagtctgaaatccatagtgcttttgatttgccaaggccaatcattggaaggagataatttctttttaagttatccaaaagtttgcttacaatgtaagaatagcttctcgatcctccttatcctcccaggcaagcccatggaattttcggaaaagggagagtcatcagacgggagaggactgggtgctggtgagcatcctggaaagtgcccagcacaacttatgcctggctgagcgcctgtgtgtgtgtgcctgtatgtgtgtgtgcatgttgtgtgtatgtgtgatgtgtgtggtgtttgagtatatgatgtggtgcgtgttgtgtgtatggtgtgtgtgtgctatatggtgtatgtgcgatgtgtgtgtggtctttgagtgtatggtgtggtatgtgtgggggagtgtggtctgtatgctatgtgtgtggtatgagtgtgttgtgtgtgtatggtgtgtatgtggtgtttgtgtatatggtgtagtgtgtgtgggaggggagtgtggtatgtgtggtgtgtgtggtatgagtgtgatgtgtgtgtggtgttcaaggacatggtggggtgtgtggtgtgttggggtgtgtgtgatgtgtatgctgtttgtgtggtatgagtgttgtgtatgtgtgtggtgtatgtgtgatgtgtgtggtgtttgagtatatggtgtgtgtgtgtgtgggggtgtggtgtgtgtatgataggagtgtgttgtgtgtgtgtgtgctgtgtatggtgtatgtgtatgtgataagtgtgtggtgtttgagtatatggtgtggggtgtgtgagaggaggtgtgtggtgtgtttatggtaggagtgtgttgtgtgtgtgtgtgtgtgctgtgtagggtgtatgtgtatgtggtgtgt

SEQ ID NO: 41579 - DNA, 950 bp, Artificial sequence
  DNA replication origin
acaccatcttcatggacacggacatgacacgcgctctgggcagcctggctagagctctgcccacggcacgtcagcccctccacttccgtctgaaaggtgccggccgcgtgtgtcacgcgagaccagtcctgcacgtggatctggacggggcaactgcgcgaagggtcatgaatcccgccggccagggaggatcgtctcctgtgcagaatgaggtgcggtcagaacacggcagaagctgggagctcccacccggctgcccgagacacctcccctcaagattcaccaaacaccacgacgtgcaaagaagaaagtccacgcctccgcggaaaacactgcggctcggcaggtcaatccaaacctggaaacacctcggcgcggcctgtcagtctgaacccggaaacacctcgacgcggccggtcaatctgaatccccagaaaacaccgcggcgcggcaggtcagtccgaacccggaaacaccgcggcgcggcctgtcaatctgaacccggaaacaccgcagcgtggcctgtcagtctgaacccggaaacacctcgacgcggccggtcaatctgaatccccggaaaacactgcggcgcggcaggtcaatccaaacccgggacatcattgctaccagggcggaggagaatacacgcaaaatataccagggcggaggggaatacacggaaaatataccagggcggaggggaatacacggaaaatataccagggcggaggggaatacacgcaaaatataccagggcggaggggaatacacggaaaatataccagggcagagggggaatacaggcaaaatatttcagggctgaagagaatacaggcaaaataaagtgcatctcctagaattcccgcaatccaacagcgtagcccgattccatttccaaatagacaccactttctaaaaacgtcacggaggaagatgcttcctaacgactc

SEQ ID NO: 41580 - DNA, 1037 bp, Artificial sequence
  DNA replication origin
gaaggattcccaggggcagctctgtgcatgcatccaggaggcgcgcggcctctggcggagcctgacagctgtgggtggacggcagcaagcacacctttaattgctgccaaattttagtcctaggtcttaatgacagcagccctggctccagagcgtgaggctctctgggagagtcaggggctccatgtggggggctccgctgtgtgagtgggaggagcacagagcaagatgatgggcagcggctggaggtcacagagcaagatgatgggcagcggctggaggtcccagagccccacccagagccagcaatgcctcctgggctggactggaggctgctgtgtgggtccctgttcactgagcctgcaggaggcagagaatggggagagtccgtgctcctctcagaccctgtcacagaacaaacagcactgggctggagcagggaggctggggtgcacggcggggctggagcagcgaggttcgggtgcaaggctgggctggagcagcgaggctggggtgcaaggctgggctggagcagcgaggctgggatgcaaggctgggctggagcagcgaggctgggatgcaaggctgggctggaacaggaaggctgaggtgcagggctaggctggagcagggaagctggggtacagggccgggttggagcagggagtctagggtgcaggattctagggtgcaggattgggctggagcagacaggctggggtgcagggctcggctggagcagggaggctggggtgcagggctgggttggaacagggaggctggggttcagggctgggttcaaacagggaggctggggtgcagggctgggttggaacagggaggctggggttcagggctgggttcaaacagggaggctggggtgcagggctgggttggaacaggaaggctggggtgcagggctgggttggaacagggaggctggggtgcagggctgggttggaacagggaggctggggtgcagggctggccagcctcagaacatgtgtgagcctccaccctggcaggtggaggcgtgg

SEQ ID NO: 41581 - DNA, 2075 bp, Artificial sequence
  DNA replication origin
tcgctctggaactgggtttgaccagcaatgccgccgcccatttgatttacaggaacccgggtcctatttccacctgctgcagcccacacacctgcccccaccccatcctaaggcccagagcttccagaagactccagaaacggccttgcctggtgggatgccccacagccttcaggctcacctccctccacccatggaacccccacagaggccaccagacctggcccctgggcacctactgggtccccaacaagctccgccctccagggccaaagtgcatcccctgctcaccctgacccccagcattgacccctctgcccacccagctcagctggatgcctggacaagcatacagactgtgggtctggagatgggggtgggtcagtgggtgtggggacggaggatggtgaccaccatgggggccaggcgggccatgtggacagagagcgagccaggcattctgtggggttttaggcttttctgactctgcccactccagtcaacctcagccacccgaggccctggtcatcgaagagacctcatcatgggcagtccctgcacccacagcccagccctgagctcacagccctcctgcccttctgccgatggatggtagatggtagataggtagatagaatgacaggtggataggtggatagtggatggtggatgggtagatggaatgatggggtgaatgatggggtggatggtggatgggtagatggaatgacgggtggatggtggatgggtagatggaatgatgggtggatggtggatgggtggatggaatgatgggtggatggtggatgggtggatggaatgatgggtggataggtagatggaatgatgggtggatggtggatgggtagatggaatgaggggtggatggtggatgggtggatggaatgatgggtggatgggtggatggaatgatgggtggatggaatgatgggtggatggaatgatgggtggatggaatgatgggtggatggtggataggtagatggaatgatgggtggatggtggatgggtagatggaatgaggggtggatggtggatgggtggatggtggataggtagatggaatgatgggtggatggtggatgggtagatggaatgaggggtggatggtggatgggtggatggaatgatgggtggatggaatgatgggtggatgggtggatggtggataggtagatggaatgatgggtggatggtggatgggtagatggaatgaggggtggatggaatgatgggtggatgggtggatggaatgatgggtggatggaatgatgggtggatggtggatgggtagatggaatgatgggtggatggtggatgggtggatggaatgatgggtggatgggtggatggaatgatgggtggatggtgggtgggtggatggaatgatgggtggatggtggatgggtgaatggaatgatgggtgtatagtggatggtggatgggtagatggaatgatgggtggatggtggatgggtggatggatggatggaattatgggtagaagggtggatagtggatggtggattggtaaatggaatgatgggtggatggtagatggtggatggcggttgggtaggtgttatgacgagtgatagtggatggtgtatggtggatgggtgcatagtggatgggggatggtggatggaatgatgagtgggtgagtggatagtggatgatggatgggtagatggaatgacaggtgggtagtggatggtccatgggcaatgagggatggaggacagttgggggatgtggtgctatcagggctagtagaggatgaagtgacatagtgcttgcaaacccagagagcagcgtgtggcagaggagcggcccgagggcagctggtctctaatattgctgttaaacctctccattaacctagaagatcaaggaatttctagaacggagaaacacctagccttgatgcctagaacctctcctcccaaaagaaaaggggaagagtgacagtgcttcaaaaatgtgctaggggagagagagggcagcccaatattctcctggttatttttcaaatctgcaatgccacccgctgt

SEQ ID NO: 41582 - DNA, 1329 bp, Artificial sequence
  DNA replication origin
gggctgcaggtaccgagccctgccccgcggggaggcagctgaggcccggcgggaattcgagcgcagcgccggggggccggcactgctgggggacccggcgcaccctccacagctgccggcccgggtgctaaggccctcactgcccggcccgcggcgccagccggccgctcccagcgcgaggcccacggagcccacgcccacccggaactcgcgccggccctcgagcgccgcgcagccccggttcgcgcccgcgcccctccctccacacctccccgcaagcagagggagccggctccggcctcggccagccagagaggggcccccacagcgcggtggcgggatgcagggctcctcgggcgtggccagagcggacgcccaggccgaggaggcgctgagagtgagtgacggctgcgtgggctgccacctgtcacccggcccgggagagcgcttccctcccagcgggcagcctgccccagccagccctcggctctcaacccgggggtcagcgtttcctgcaggagcctctgctagctccagctggagcactggctggttgaggggaggggattgaacacttggaacccagaccccggctggggatggggagggaggctggagaccaccatctgctcccacagggctgagtcttggtgccggccaagccctgaccccctccagccccacccacgcccctcgtcacccccggcccctgccgtccctgcgtcctctgcacccccagcccctcacgtcacctcctgccctccccacgcaaatcctgcgctcctgtcacacggaggggaacaaaacagggtagcagcagggacgtgggggtgtggccgggaccccagatgaaaaggaaggcaggtggcacccttcgaccagcgtccaggcagcgtttcggattcccccaaaaggagggcggggctgagaagcaggacaggaaccacaggattctccgccccgcgccacaggtcagcggagagagagaggcctgcggattgtgacgcttcttctcgaatccctgtcttgttctcactgtatagtcacacacacagcccgtcacatgtatcacgtcgtgaaacaaatatccgtggtgtggatgcacccccactaacttagccctttagcagcaagaaaatcccatttatccttaaatcctcagcacccagcccagggtctaccataaaagttaaagagtcgaggctgtaataaggggtgggggcagatgtttcaccagatcagatgcccccccaagctccttccaaaccgcgagcgttgctctctctccagttctaaagcggacggggggagtttgtctttcccgagtgt

SEQ ID NO: 41583 - DNA, 1185 bp, Artificial sequence
  DNA replication origin
agtcacacggggatggccacgcacaaacgcacggggctccagttaattctccaagaagaaaaacattttgttctgaaaaacgcgactgtgatcttgaaagtggtatttcgtggatgtgtcccaagggcccagcacagtgtctggcacgtttagagcctctgaaaagagaggagaaagaagtgaagggaggaaggagacagagggcaggggagggggaagggagggtggggaaggggaagggagggagaggggaagggagggagagggggaaggaggggaagggggaagagggaaggtggggagggggaaggggaagggggagggaggacagaggggggggaagggaggaggagggcgggggagggagagggggaagggggagggagggggatggagggggagggggagtgagggggagggggagtccctagaacccgcccccgcccccatggaggaaaggagccggcattcctgcagcatttggctcctccaaggccccttcacttcccttccgagaggtcactgtggctctggactctcccagcacaaggagtggacatggacaacagtgaaagtcctacttgagttggccagtgtctcagccttcaaaacctcccctcggccagtgaagtgacccctaacctccctcagttcctcgccctgtaccccatcatcagctgcacccctgagagccatggagggggacaggagggcggggccgagtggggggcaccctgggcttcacggagcttggcctctgcaggacccagcctcatgtcgcttcagggctccatcggcttgggagaagtgcagctgcaaggagaagccaggaatgttacttcacttcgcttggaattctaacctctttcctcaccgcagcctgaatgttccagtcagtgcattaacacacagagaggaggttgtcaatcccctcgcaaatgtggccacttaacaaagatgcagcttattgtcagcgcgtctttcatgagcttgtaaaagagacacaaagaggctgggtgcggtggctcactcctgtaatcccaacactttggaaggccaaggtaggcagattgcctgaggtcagcagttcgagaccagcctggctaacatggtgaaaccccatctctaccataaatacaaaaattagccgagcgtggtggcacgcacctgtaatccctgctactt

SEQ ID NO: 41584 - DNA, 1358 bp, Artificial sequence
  DNA replication origin
aacccctcctgctccccttccccaggacctccttggtctgcacacctggtcccaggcctggctggtgtggggaagggctctgcacggatgggtcctggggacctcggagcctgtcatccacagtggccgggagtggaaggcagggcccctgccctggtgaggccagcggattgagcgtggaattgtgattcacatatgctggctgcctgggtgccagtggacgccggcggatctgacacatccaggggatcagtggatgccggcagatctgatgcactcaggtgacccagctccagacaagtggggccgggtcaggaagcttctcaggtcggggactgggagactgactccaggagggcagctgtggcccaggtttcctgtggccgccctcaggggcggcagagcaggatctggaccccacgcagtcacagcagaggcctccctgggccccatgggaacgctgggcctggatggctcttgggtgtccgaatctggggagcggccagcccttgcatctgcactgatagtccctggcttcgggctcagggcagaggccagtgtgagatctggctttctcccagtggctgcccccagccctgctgtgtgaccttgaggggtttgacaggggtcctcgcagggctggtgggagacggttgggggcaggccaggttgcccacagaaaggagtccggtttgggcggtgagtgcgggaaagtgggtgtctctgaatggtggcctcggctccaggagcagcccaggctggggtgggaggtgggaggtggggctgcttgcaccaggagtggtaggtagagttggtgagaaagggtgaaattgaggatgtttttccagaggaagagatgagacctgttgatatctggggcccaaagaaaagagacatcctgagatggagggagggggcctgagactgcagggcctgggaggtggcgctccggggtcccagtggtcctggccctgcatgtccatttgattgatggctctgctgtttgcctggatgctgcccctcctcccaggccagcagcagcatcccgcccagccccagctgtgtgctccatgtgagcttgcactgtctgggataagccagctgggaccccaggcagattggggtgctgttaggggcctgcctgctttccttgggggacagcagtgtgaggcctgggacccaccaccttgcctgagccttcagggcctcaagagcctattgcccacagtcctctgtggctctccgaggtagacggtggtgttgctgctaaaacgatggtcactggagctttgggcaccgaggtgatgagaccacacattgccccaaaccgtcatttcagttggccaggcagctggact

SEQ ID NO: 41585 - DNA, 742 bp, Artificial sequence
  DNA replication origin
ggtcaggtgacacggcggctgagctccgagcccagatgacaccctcacagccgagctctgccgtgcccgtccttcgtgcacccagcccatcccttcggctgcgtgtgaccccaggacccgggttccggttttcaggtgttatttctggtcagtggtttggatccctcccaggagggcctgggtggccaaggcagcgggaggtgccctgcggtggcacagcggcactgtctccactcgctgttcaggtctgggacacacagtgctgttgctcagctggagacggggcatcccagtgacggtcaccttgcaaggacaggagagacccctgcccaatgttcgattcagatgtcaagactgaagatgccacacacacaccaggagggtgagaacgtcccatcccttacaccactgaggtttccaggggagcaggagccccccgccgcgccccatccgagctggtccaaaggccagggtttatcgtgattggggtggggccggggcgggggttccccgggatgccaggggcttctgtgcttcgaatcttctacaggcactaaagtgaggcctggccggtgtggggcccagggaggagggagaggggaggcatcaaagccatcagcagccagtcctcagacagtggagtgaaatcctcccgaccctccctcagccaggcggtttccagtcccacaaaatcccccgataaatcaggacctttgactgggacagaccagggaggcgcggg

SEQ ID NO: 41586 - DNA, 899 bp, Artificial sequence
  DNA replication origin
gaagatgtgtgctgagaggtgcctggacagccaaggaaggcttcggggaggtgacaggcgaggagagaccaccaggaagtgaggaactaggggacagaaaggagggagcccgtggccacctggggtcttcaagggtcctgtgggcagggtgggcatggcacggggggtctcaggcttccctgtgaggcctctgaggccatcacataggggaggcagctcaggcattgccaagcagggcaggaagtgggggctcaggggcattgcttgcgggggcaagtgagagggctgtgggaggcagcgggtgggtcacccgaaggtggggagctgtcacctgcctgggggtgttcccttcaacctctacatgaggccgagcaagagttaaaggaaaggtggggtgggggacaagccaggggttggggacaagctgggggttggggataagcccggggtgggggacaagctgggggtgggggacaagcctggggtgggggacaagctggggatggggggcaagctgcgagtgggcaaggtgcgccttcccggaaggcttcgatggcatagctgggtttccagatgcccagggaaggatgaggatatttgtcctgctatggggatcctggaacctctgcatcctgctgctgggctggtgtacctgaggtgctggtcagggtggaggtggcatcccccccatggcagccagccctgcccctgccagcaagcctgtgggcacagagctgcatctggcgaccccactgcactgggcctgcagggggcagggggtgtccaggatgcaagcaccacctcccccacaggtagaactttgagagcttagaacctctgagagctttgaaattcctctagaatttgaggggaagaaatctgtcaacacacagcttctt

SEQ ID NO: 41587 - DNA, 1119 bp, Artificial sequence
  DNA replication origin
ggccacatgggggtggcaggaaccaggggcagcaggtagggagtgaagaccctcagtcagacccccaggaggtccagcccaaatctgtgttgctcactccatcccctagagacccactcgggctccaaatcctttgggcccaggctctgagcacccaggttgtgcttggactgcgagcacagggggtgggaggccctgcagccccttcctacagatgcgcccctcccctgaggctctctcagggtgggggtcccctcgggtctcgtccctgaccccccggcctgtccccatgcccggtcagtgctacctctgagcctcctctgtgcgccatcaccatctccatccccacagagcctcggtccagccctgcggtcttgtggacagtgacccctggcctcacaggccctgtcctctgggtgcccactgcactgaagaagttgctggggaggagcgaggggtgaggggccccacctgatggccgagcgctcacccccaggctgggccgtggcactgagtcctgtgagcatctggaggaagggaggtcggtggagtaccacggtggccctcaggggcctcctcccccctcccccagtgctcccccttctgagggatggctctgagagggactcagagtgtcttcctgtctacctggagatgagagccggtcaggcggtgtctgtggccggagctggaggctgtcagagtgtcttcctgtccacctggagatgacagccggtcaggcggtgtctgtggccagagctggaggctgtcatcctgttccctctgctgggctcacttcagggcagcaaggcttggctgggccgaaggccaggcgccgggcagcacagctgttccatctctgtgagcttcgagggcctgtggatgccggggagtgggggctgggagcaatgtgcaaaggctggaggatcccaaaaatgacccccacaccacaagtaggagagaaggcctctgctagtttacaaaaatcacattgttctcatggaaagcagaagattacggccaaattctatgcatatttcagtataatgagtgtccaaagtgaagtgcccagaggtccccctgcccccccactctcgggacctagccaaagtcccccct

SEQ ID NO: 41588 - DNA, 2233 bp, Artificial sequence
  DNA replication origin
cgtgacggcccaggaacgtccctaaacaaggcgccgcgttctcgatggggtggggtccgctttcttttctcaaaagctgcagttactccatgctcggaggactggcgtccgcgccctgttccaatgctgccccggggccctggccttggggaatcggggccttggactggaccctgggggcttcgcggagccgggcctggcggggcgagcggagcagaggctgggcagccccggggaagcgctcgccaaagccgggcgctgctcccagagcgcgaggtgcagaaccagaggctggtcccgcggcgctaacgagagaagaggaagcgcgctgtgtagagggcgcccaccccgtggggcgaacccccttcctcaactccatggacggggctcatgggttcccagcggctcagacgcggatcctggcctcgcccgccgtccaggtcgtgcgctctccagggttctgtctcccagggcgcgccctcgccgcggtcctccttactccagggcggtgcgctcggcttgagcgtggggagggtgggcgtgttggttcggggagttggtgcgtcttggcttttcagaaccaggagggagcaagaggttccctaccttttcccccaaaaccagagcctttgacatctccctgagcccacggggctggtgcccacctcatgagcagatccgttctggcccaaggccaccgggaccggagccggctggggatggggaggtgtccacaccacccgcaccccactgacttccccgcagcctccctaccttgctaggaccccgggccctcccagcccccggaggagcgcctcggcgtcggcagctgagacccagagcactcagggcaggaagccgccagggtttcatgtttgggaaccaagttcacagtgtggcctcctgttctgactgacaccactccgccctgtcttggctgaaaaacctgtggcagttgggttaaaaagaatgaggaggaacttagtacgccgatgtgaaaaggtcttcaaaatagagtgcagagcaatccaatttccctcggttccaggctgtgccctagcgaagcccacccactgtgggggcgcccactgagtcatgctcacctccctgggttgactggctggtggggggtctggagtctacacgatgactggctggtggggttcaggcagggggttcaggcagggggctccgtatccagcgtgggatcctagcttcccgctcaggtgtgtccagctggcctcgtcccctgcacccactcctcctgggtgcagctgcccacccagctgtgcagggttgttgcatggagtccggctcgtccttccctaaaaccagcactgtttgcttgtgaaattggctcaaagttgagctgctccttcctagcttggggcgtgagcagtttgggaaagccgatctgtctttcccatttctgaggctgtggtgggccttgtatgcaggaggacgggctgctcggagaggctgggatgattccaaagtgtccgtcagtgtgtaatgctgtggacatttttggggggtcctcctggatagtgtcggagtccatttttccgggtctcaagcccctgccaagctgccgccgagccctgggctggcccccggaccactcctgtccctggccggttctgtcaccggccggggagtccctctggtttggggaggttattcctgcctgacttcaggggaggaggaaacagtcatgtgtctggcagtgcgggcaagaaagggagggcagaaacgtgaggcttagggagctgggggttcagccaggtggggagagccccttagtcacacggggagaggacaggggctgcagggagaatgcagtgaggagctgagccccaggtccccttcgctgtgggtgggccctgccttgggccacatgggggtggcaggaaccaggggcagcaggtagggagtgaagaccctcagtcagacccccaggaggtccagcccaaatctgtgttgctcactccatcccctagagacccactcgggctccaaatcctttgggcccaggctctgagcacccaggttgtgcttggactgcgagcacagggggtgggaggccctgcagccccttcctacagatgcgcccctcccctgaggctctctcagggtgggggtcccctcgggtctcgtccctgaccccccggcctgtccccatgcccggtcagtgctacctctgagcctcctctgtgcgccatcaccatctcca

SEQ ID NO: 41589 - DNA, 1738 bp, Artificial sequence
  DNA replication origin
agaattagtactttatttttatttttaagaggtaaagcattatgttggggaaagtagggtgggtttccaaatttgcattttttatattaaaaataaagtcaagatttggacggtgtggccattttattcctacagccctagacggctaggtgagccccaaggacgggtggggtgctggctgcagggggcggggacacgcctttatcttgaaaactgtcatgggatggcattatttgttatttcacctgatcatatttttattttaaaacttcagttacataaaagttttaaatgctttttttaagcctacaccgtttgtaacatctccatagaaacttggaaatcaagtcttccttagatagttgctgtcctgcatctggcaggtgcttcctatctgtcgtggctctccttcccacagccagccccgcccggcaggcccctccccaccacgagcagctggtggcccccaggatcactcaccgcccacgcagaaaggaagcccacgcagaaaggaagcgggtgcaggagccaggtggggacaggccgtggagcactcagggctaccaccgagaagcccagctaatggcgggtgcagtttgcaccccttctctgccacccacagcctgatcgtgctgtcgatgagaggaatctgctctaagggtctgagcggagggagatgccgaagctttgagctttttgtttctggcttaaccttggtggattttcaccctctgggcattacctcttgtccaggggaggggctgggggagtgcctggagctgtagggacagagggctgagtgggggggactgcttgggctgaccacataatattctgctgcgtattaatttttttttgagacagtctttctctgttgcccaggctggagtgtaatggcttgatagctcactgccacctccgcctcctgggttcaagtgattctcctgcttcagcttccggagtagctgggactgcaggtgcccgccaccatggctggctaatttttgtatttttattagcaatggggttttgctatgttgcccaggccggtcccgaactcctgccctcaagtgatacacctgcctcggcctcccaaagtgctgggattagaggcttgagccactgcgcctggccagctgcatattgttaattagacataaaatgcaaaataagatgatataaacacaaaggtgtgaaataagatggacacctgctgagcgcgcctgtcctgaagcatcgcccctctgcaaaagcaggggtcagcatgtgttctccggtccttgctcttacagaggagtgagctgcctatgcgtcttccagccacttcctgggctgctcagaggcctctcacgggtgttctgggttgctgccacttgcaggggtgctgaggcggggctcctcccgtgcggggcatgtccaggccgccctctctgaaggcttggcaggtacaggtgggagtgggggtctctgggctgctgtggggactgggcaggctcctggaagacctccctgtgtttgggctgaaagcgcagcccgaggggaggtccccagggaggccgctgtcgggggtgggggcttggaggagggaggggccgaggagccggcgacactccgtgacggcccaggaacgtccctaaacaaggcgccgcgttctcgatggggtggggtccgctttcttttctcaaaagctgcagttactccatgctcggaggactggcgtccgcgccctgttccaatg

SEQ ID NO: 41590 - DNA, 1148 bp, Artificial sequence
  DNA replication origin
cctccaaaacgtttcccagtgcctgcttagtgacaagacatgcacacaccaagcccagagtcagggtgggccctggagcagaggccggtggttggggagaccccatcaaaggggccctcggatggacaaggtgtgggcctcgctcaaggcctgacaagaagcagtggccacgtggccaaagaggcagaggtcgaggcaaggaagagaaagacggtagggatgcctgtgctgccagtcctgctccaggcacaccataggcaggtggccccgagcccctgcgccaggtcccaagtgcagccagctccacggggaaccaggaagcacctgcccgggccacgtgcgcagggcacagccggggccacagctcctcccagaggcatgtgctgccagcgtgtcctgcacagagggatcttggggtctaaaccctggcacatgagggtcccagacgctctggggaaaagcagctcagggcacagggggagcctcctgtgatggggtggatgtctgagcagagctggatgatgctgggacagaaggctctaagaacagggccagaggccaggcccgggcaggggccatgtcctgcagtacaggggtccgggagcacagcagagggacccccaacactggagcggacacatgggtaaggagtagggaagagacagtccagaccaatggggctcaggcgagagggagaggaagccatcgggcagagacagacccggtgctcagtgcccgtcccacagtcccggcgagggggctgggcagtgcccttctccaccaggcaaacagcggagcactcacctccgactttagctgtgccagggcccagcagacaaagacgctgctcaccacagggacactcaggtcaccgagcccacggcccccaaccaccccagccggtccccggagtctaaggcctctcaactcaccaacttctcttattatcaaaaaagagaacgaggaacagcttctcatcagacttggtctgcatgtgctccccaatcttcagcacgtccaggggtggggccgggatggtgacgccgttgtggtggccaggcacacggggcatcttggggtcgatgatctgcacgagaaggacccgctgaggtcattgtgaggctcacacccataaacaaccccacctg

SEQ ID NO: 41591 - DNA, 1030 bp, Artificial sequence
  DNA replication origin
tcccggggaagggttcatcacacaccgaggggctctgggctgtggccctgccggggtgcctgcggaggtggcgcctcctccatcctgccttcgtttccctgtggaacgtccagctctgtgtggctgctggttgccaggcactgtcaaggctgtctggggttgtttaggttcagtggtcatttgcagctgcacaggggactgactgcagggtgggtgccctcaacttcaggcccctgggggagggggaggccccagggtttggggtcgcacagccctcactgtggaaggcagccatgctgtgagggggcatcaggacggagatcccccaggtgggagggacagcagggagctggtctggcggagggggagccaggactttggtttcccatttggggtgtcagttgtgtaaatgaggcaggagcatgctgggagccccgtccttgcggcaaggagggctcagaagggactgtgctgggcacctggagttggagccttgtagcctggagggcaggagcttccctgggtccgtgggaggctggtggccccaggtgggctgcagggacagtggggatgcaagggcctggaccccacaggggaggcagtggtgctgccggggtggctgagaaaggcctgggagctgggctgtgctcgggggacccaccctgttgctgcaccttttgtgggggggcggggcgtgccccgtgtcctgctgacgcctgtgtcctgctgacgcccctctccgcagaagtcggccagagcagcatgtggatctccactgatgccgccgcctcggtgctggagcctctgaaggtggtgtgggccaagtgcagcggctacccctcctacccggcactggtgagtacggctctcgtggcgcctgcgggtccagaggaggctcacacagctgcggggcgggggtggtccgaggaggctcacggcggtggtccaaggaggttccacagctggcgggggggcggggttggtcagaggaggttcacacagctggaaggggcaggggtggttcggcgag

SEQ ID NO: 41592 - DNA, 987 bp, Artificial sequence
  DNA replication origin
aggaaggagatgcctcctgggctgcactgttggccccggtctgccccttgtacaggccctcccgcaggctctgccgtagccgcgactcagtctgccgagtgcagaggttcgggctgttgctgtgagctggccctgccagggctgacttccccggggctgcgtgtcagctgggtgggggccacgccacagctgggattccagcctgtctgatgagcctgtgggacggatctgcagctggcagagggcttgtctccaccctgtgctgaggttggtgtctgctgacatggtgaggcaggtcagtgcagtcaggaggagcagggtccgcaccgtgagctggtgaaaggggcttgcatttcgagtccttgggatttccagtcacagtgatgcccttgccagaggctccggggcgtcccctttagtccagggcagctgtggtcccttgaagtgcacgtgtggaagtccccctgccgtgcacgggcgctgagcacgtggagaactgtggccctcaggaaaggaaggatgcatgttcctcggggtagaaggtgcggagtacgcagctttgtcccttcaggattgcagaggacggaggcttgaggcagggttgttggagggacagtgtggttgctgctcgtgagctgaaatgtctgcctgtgttacgctgtgattttccaaagcgtcttgtggcttcgatacagaaacctttgattgacatagcaggtggccaggtgggcaaaatattgcggaattgttcttgcagacttaactaggttttagtttcttagagtagctggtttggattagataaccattttgccatttggaatatgtgacaagttccagggactggaattctaggatcctgactgatacattgacggggtctgagaggcttatgcccgagttgtatcgagcatgttctgagcttttcccatgtgcagttcagtgacagcctgagatggcccagagtcagtgagctttgagaggagt

SEQ ID NO: 41593 - DNA, 939 bp, Artificial sequence
  DNA replication origin
gccgcgcggcctgcggcggccgggcttgggaaccggcaccgcggcctccccgggcgtttgcagggagacgcctcgcgacgaacgcgaggcttccccgggccttttaaaacgagtgacacgattgaggcgcagttcacgggaaacgcggctcttgtgagcggacgcgggagttctgagaatccgtagcagcgggaccccctgccccgcggggtgcggccccgtctccccagaaagcgcggccgcccgtgtctgtttttgagggtctgtcgccaggtggttgtgtagttagtggaatcggcggatgtttttgtttggccggcccagcgccgtcccgagtgctgtgtgctgcacacaacttcgcacagctcagcggccgcggcccctgtggccttgaccgagaggcccggcgcgtggccggcttctccctgggcgggcggtgggaagatggaagcggccgtcttgtgggcagccttccccgcctgtggcccgcagggctcttcgatgtacttaagggaattattccttgagaagctacgtgtgtgcccccgcggatccctcccagtggaaatgcttgtcccagtggaagggccagggacagaaccggcccaggggggaagcggtgaagcagaggaggtcgtgggtcgccctgccctgctgagggcctactttccccgggtcccagttgcatgttgagggtatggagctgctgtggccgtgaagccttcggttcagttctccccttgtagaaagtgttgcgatgaagagcttcacggctccctgggagagagtgggtttccaggggctgcttgtcgttagggcgactcaggactttgctgtcgaggggaaaatgacaggttcgtttctgatctggtgagtaaccaactgttgcttctgccccacctcagtaatgacgcgtgtcggcgtcccgggtgcactagg

SEQ ID NO: 41594 - DNA, 1634 bp, Artificial sequence
  DNA replication origin
cgcggccgcgggagcccggcaagcgggcgggcgcgggggccggcgcggccgaggcggtgctaatggcgcccgcggctcctccgccaacggccgcgcaggccgggccccgccgccgctcctgggcgcgggcccctctcggccgcggcggctccgggcccggcagcggcggccgcggactctcgggcagcggctcgcgcggcgcgggctcgggctcggggcccagctggaggcccggctcggggggcccggccggcgggcgcgggcgcgggcgcgggagcgggcggcgggcggcgggcgcgggacgcggggctggctcggactccagggccgggtcgctcgctcgctccccagcgaagcaaacaatgcggcgagcgctccgcccggcgcgctgcgtgcgagacgcgccccgcccgccgccgccatgacgcgcggactccgctgcctcggccgcgcgcgggggagggggcgccgcgaggagcgggggccaaagggggccctgaggcggcggggaccgggctgggagtggggggtcgggaggatggagagtgggggcccttgagttagggaggaccgggccagaaggtccctgagggggtcaggaggatggagaatgaggggccctgaggcagggggacgtaggcctaggagtggggggccccgaggcaggtggggagcagccgggagtcgggggctttgaagcaggggggtaccggctgggagtgggggtccctgaggcagaagggcattggcccaggagtggggtcgctgaggcaggagatggcccaggagtgggcggctctgaggcaggggctaccaccggcctggagtggggggcccacaggcggggggacgggccgggagtgggggtacctgaggcagaaggacattggcccgggagtggggggccccgaggcaggatgggggagcagccgccagtcgggggccctgacgggggaacggccaggagtgggggtccctgaggcgggggggaccagctgagagtgggagtccctgaggcagaaggccattggcccaggaatggggggccctgaggcagggggcgattggcccacgagttggtgggggcctgaggcagggggcgattggcccacgagtggggggaggcctgaggcagggggcgattggcccatgagtggggggccctgaggcaggaggctattggtccgggagtggaggtccctaagaggacagagggggccctgcgggggcactgggtgggagtggaaagggcactggccgggacacgcgactaggtagaggtgggtggtgcagccgggctggggagcctcccctagtgagtgtcaggcccggtgtgcaagtagtcctgccagtgtgagggccctgccgaggccggcgtgaagcagatgccctttaaggttgcaagaaaaggcccctgcgggtgggagttgagaggcctgagtctctgccttcactttggccttttgtgtaaactctaaaattcagtggggtcataacaattttcactccaagattaaatcccaaatgttttaaggtgaggcaggagctccttggtttccttgagaatttgtgatcaggacgatggtgctgtggaatccctgggttccagcagcacagcctgtggcatccaggca

SEQ ID NO: 41595 - DNA, 796 bp, Artificial sequence
  DNA replication origin
gaaagggcactggccgggacacgcgactaggtagaggtgggtggtgcagccgggctggggagcctcccctagtgagtgtcaggcccggtgtgcaagtagtcctgccagtgtgagggccctgccgaggccggcgtgaagcagatgccctttaaggttgcaagaaaaggcccctgcgggtgggagttgagaggcctgagtctctgccttcactttggccttttgtgtaaactctaaaattcagtggggtcataacaattttcactccaagattaaatcccaaatgttttaaggtgaggcaggagctccttggtttccttgagaatttgtgatcaggacgatggtgctgtggaatccctgggttccagcagcacagcctgtggcatccaggcaggcccctcaggaagagcagctgtccaccctgggacagaccgtccccacgggggcagccgagcggccccactgctcggggcactgcaccaaacaccttattgggagtggggtggccttgttcgcccaagtgtccctgataggggccaggccccacaggccttttcctggccagtcctcatgcccatggcacccagtgtgtgggttgtgacgtgacgactcaagggcaggtaggaccccagccaaggccccagtggtcagtcctgatctaggactccctgcagacacacccttgagcttagggggtacaggccactggggccctgacctcttctgcaccagacccaggagcttcgtgtcacctccattctacagatgtctgtttacctgtggccaaacaagcaagctg

SEQ ID NO: 41596 - DNA, 1083 bp, Artificial sequence
  DNA replication origin
gtgatcaggacgatggtgctgtggaatccctgggttccagcagcacagcctgtggcatccaggcaggcccctcaggaagagcagctgtccaccctgggacagaccgtccccacgggggcagccgagcggccccactgctcggggcactgcaccaaacaccttattgggagtggggtggccttgttcgcccaagtgtccctgataggggccaggccccacaggccttttcctggccagtcctcatgcccatggcacccagtgtgtgggttgtgacgtgacgactcaagggcaggtaggaccccagccaaggccccagtggtcagtcctgatctaggactccctgcagacacacccttgagcttagggggtacaggccactggggccctgacctcttctgcaccagacccaggagcttcgtgtcacctccattctacagatgtctgtttacctgtggccaaacaagcaagctgagcccgaacgcttctctcctccacctcagggaagccagatggaaaccaagctggaggttctccacaacacagagcaaaagtaagacacagtctcatgaaagagaagatgaaaagacacgaaacccttcacagaagaggagacggggacagtggcctctcagacaatgcaggtgatgctcagaggagtgaagaacaaagcctcgaacgtaggcatgtcacagggatactcaggaaggccttcggagaggatcttctttagaattcagactcatcctacagaggaggggttgccaaaatactaagagaattgaaccgtaactcatacacagtgaaactagcgttccagtgagacagcaaaataaaggtgtcttcaccgccggttaacatccacatttaccacacacgcagtctgtaaaagtactagaagaaataccttaacaaagtgaaaagtggacccaagagtaagacgtggatgccagcaagtaaatcagtctggtccgttaaaagaaaatcaacctgagagaaatcccggatgaactcaacatgacacatggtaaggcggggcgcagaaggaagtgaaagtgcacgaaagctcttgtattgtttggttcg

SEQ ID NO: 41597 - DNA, 2091 bp, Artificial sequence
  DNA replication origin
cccaggcatctcccccgttgcatcgcccccacgcgggcatcgctcccacccgggcatctcggctctgtcctgccctggggtggccgcagcccgcggggaggaagcgcggcgaggcgcccacaccgggaaagtgtctccgtgactctgcgaggttacactccgggtgcgtcgctgcgggctcgtgggctcgtgggctgcagccccccgctcctgtcgggtggacgagccccgggcccgcgtggagctgctcggtcaaggccggcccgggaggggcgcggcgcagggcgggcaggggcggggtcctaggtcaacgtccagccccagacccagccccgccgccggatccaccgtgcctctgtttccccattcctgagaaatcggaacgccggcggcacccccttctccgggccggagcctgcgccctccggattgcgcgcctctgtccaggcggcggccgggggtgggagcgcgcagcgggccaacttccctaaagggaactgtcgggagggcgcccagaagggaaagaccaggaagcgctgggtgctgagctggagtctggccccttcctgggggaccggggagggggctgaaggtggggagaagaccgccggggctgctaggggggcactgagggagcgtccagggggagaactctgggtgggcgacgccgcaggggagctgcctggcaggggcgagggcctcggggaagtggagcttctggccgagagctgcatctgtggccggggagggaaagggtcacaagggcagtgcgcgccgggagggaagctcaggccggggggaagggactgcgcggcggggacaggtgcgtcgggtgctggacagtgagcaggagcccgccggtgctcaggtcacgaaggtgctggagccgggggagctggaacgcaagggggttaagggaacgcgctgggaagggtgggggcggcagctgctccaggctgcggtggccttggttctgtctgagggtccatgggtggaaaggcatttggagcttgtgttcatagctgggactgccagatttggtggataaaaatacaaaattgcgtgggaccggacgggcgcggtggctcacgcctgtaatcccagcagtttgggaggccgaggtgggcggattacctgaggttgggagttccagaccagcctaaccaacatggtgaaaccccgtctctacgaaaaatacaaaattagcggagcatggtggcgtgctcctgtaatcccagctaccagggaggctgaggcaggagaatcgctcgaacccgggaggcgaaggttgcagtgagtcaagattgggccatccaggctgggcgacaaaagcgaatctctgtctaaaaaaaaaaaaaagtgcacagcacgtacatatactaaaaaattattatctggaattaaaatgtaactgattgtaccgtattttatctgcaaccctaatcataacaggcatgttgttctctgtatatagtccagtcaacagcaaaagtatgtaaaaaggtgaaaaaactacttatgacacatccctaaaggaataactttaagaacaattaggtgtatattgcccagggtttttgttttttgtttgttaccttgagtcggggtcttgctctgttgtccatgctggaatgcggtggtgtgatcacagctcagtgcagcctcaacttcccagactcaagcagtcctcccacctcagcctcctgagtagctgggagtacaggcacctggctaatttttgtatttttagtagagacggggtttcatcacgttgcccaggctggtcttgaactcctgggctcaaacaacctgcctgcctcgggctctcaaagtcctgggattacaggcatgagtcactgcacctggcattgcctagttttttgtttgtttgttttttgagacggagtcttgttctgtcacccaggctggagtgcggtggcacaatctcgactcaatgcaacctccacctcccgggttcaagcgattctccagcctcagcctcccgagtagctgggactacaggcgcatgccaccatgcctggctaattttttgtgttttcagtagagatggggtttcaccgtgttagccag

SEQ ID NO: 41598 - DNA, 1680 bp, Artificial sequence
  DNA replication origin
tgtgcccaagatacaatatcttattttttctttttcttttttttttttcagtctgcaagtgcttggtacatacacagatggtatttatttgctgtttgtcttaaattgcattcttatgcatcatagagactgcgataaggagaagaaaaaatattttctacaggaccatccaaacatgtaagtggcttttcatgggacagtttcccatcacgggaaagacataagtcgattcttagtcatccagagtgtcagtatcttattttttcattcatctgaaccaaagtgtgacatcccagggccaggtgttttatctgagttccatgcacagactgtgagccccacctgtacagggcagtgcgagtcagggatgctccgcactgaggcagaagagcagctggtgccctggtcctctgtccactgaggctgcaggtggacccacagcatcttccgaaggcagggagccctccgtgcttggagcactgtggccctggagggttcgccctcatgtgatgtgactttggttgagtttcttagctgtgaattaagattatgagcccagcttgggggtagggcatggagctgatggtgtcacatgtggaagcagctgggtgaccccgagcccggtgaccactggtcactggggaggcacagacctcgctgtggcagggtcctgagggccagggcctcaaaggagggtggctgtgtccctgggccccgcgggagtaagggtgtacacctgccagtcccctgcctacagtggtggtggggtggagccccatggtcccttccatctggaatctcagacctggcccccctctgccaccctgtgcctcccgtctgcctttcagggtagcaagaatgctgtgcgccccactggggagggaggtggggaggactccagagcgtccaggtgggggctgctgcagaggagatggtttctctcgggtgcagaggagggttgggccctgggcacctactggtcactcttcgccacgacggggacctcaccacgttgtccctcatccacgtcacccgcccaacccacgcggagggtcctgagggcttcaccacgcagccctgaaggggcagagctggggtcacacaggtatcggaagcccacgctgtggccccaggagaaggttctggatgtggctcctatgagtgaagggtggactcacagcgctgccggaataaagggaaaccacaggcaggagggaagcgcgtccaggatccgcggccaccggcctctcagactgtcttctggggccaggtcgcgaggagatggaaagcgggggcatcacaggctcgtctgaacccgcgcgttcattcggccacaccgaccccaaacccctgcatgcgggcaggacccctggttctcctgcgcccaccccagccctgctggccgccggggcatttgagggatggttgcggggggtcggagggtggaaggggcgtcgggcagcctcggtggggaggggaagaggcttcccgtgcactatggactcccgcattcgggaagggaggcgctcggggttggggagggaggaaaaggcggctgtgttcggggagggggcagcgagaccccgcccgggctacgggttgcaggatggagcggacgggaggaaggagccctgacgccgcggaccccacgcctgccggccgtcccctccctccctgcct

SEQ ID NO: 41599 - DNA, 945 bp, Artificial sequence
  DNA replication origin
cctggccgggcgggaggacggagcgccggaggcccggccgctggggcggggtcgggcggaagacgcaggcgcaatgcgcgcttcggctccgcccccgggtccaggagggcaaactacgcaggcgcagtgggcgctccggcgctggcgggcgacgggaagggcttaggcgctctggctgggcggggcgcgggcgccttggtttcgtcccgtggcttggcagttggcagcggctcggcgcgcacccaacggcccaccgcgggtttccgggacggctagcagcgcggttcccggtcccgccccgaacccccttacctggcgcagaggccgctcagtgcggtgcggtcaggcctcgtgggctgggacctaagccgttgaccctaaggcgatcggggctccccgcgcggcccccccgggggacgggattaacgcctaagccccaagccgggtcggcgggaggagggcggccctctgggcgagcgcggggccggggctggcggtgcggagcgcacgggactcgcccgcttctcagggtctgaaggaaatgtgcacttttaatgtgttatttcctaacacaaatgtttgagcagaccaaataaactctgcatgctgaatgtggccccgaggtcccccgttggtgacacggctttcggcattttctcggcctgagtgtgagagtgagaggagcccgcgtggcggtcaccggctggagcgggagcgtggagttatcacggccgcctctgcccggagcccgcccctgccccgcggctgtgccccttcacccgcacgccgactgttccaaagtccacgtccagcctgcagccgggttttctatggtgcctgagctaagaatgcttttctcgtttttaagaggttgggggagaattaaaacagtattttagcatatatgaaaagtatatgacattcaaatatcggccgggcacggtg

SEQ ID NO: 41600 - DNA, 1072 bp, Artificial sequence
  DNA replication origin
gcgtccggcggcgtcgcgggcggcgggcggcggggccgcgggaggggcgcgggggcagacaaagccgcggtaatgaatggagcgtccgcccgcgccgccgtcgtccgcagccggccgggagccgccccagaggccgggccgaggtgagtgcgcgggcgccgccgccccgccgcctgccgcgagccccgtcccccgcggaccgcgccggggccgggccgggccgcgccattgtctgcgccgcgccggggccagggccggggccaggcgggcgggggcgcggttccgtggcctcggggtccccgcccggcgccgccccggacccgcccccgcgcggaccccggccctgacagctggcgcgggggcggcgccgactgagcggccgagtgccgggggtcggcgcccggcctggcccacgtgcccgcgccgttgcttccgggcggacgggacggggctcgggctcggggcgccgcccgggtccgccgggagcgcgctgtcccggccacgtcgagttaaccccgcgagccccgtccctgggacttctctggacgtgtcattcccgtcccacctccaggaagggccacctgggccctgcttcatgtctcagcccagacgggtccttgcgacgcgccccgaggcaggttattgtacgtggttctggggatgaccgttcacatttaatgaataaaaatgtaacttgccttgcgaaccataatttcaaatgtttttcgactgcagtggttttcctacacccaaatgagctcgcagtcagttttgtttcttcttttgtcccgttgtgtggcccacaccgccttcgttgctaagagaatcgcagcccctcgggctcccttctgcgcctttctattccgggtggccctggtagacccgggcacctctgtggaaacacgtcccggccaagctgagccgtcagaagcttctgttggtgttctcgtgttggtcgaaagggaagttatttattttgaagttaactctgatcagattacgtttttagaaatccattcagacctcatagtgaggccagtttggtaaagcaagggcatcctgcgacttttta

SEQ ID NO: 41601 - DNA, 1592 bp, Artificial sequence
  DNA replication origin
cactcaacaaggctgccgaagaagaaatcggtaaaaactcctacatggggttctcatcacaccagctcacgtgcttattaaaaattccagcagccgggagcggtggctcattcctgtaatcccagcactttgggaggctgaggcgggtggatcacaaggtcaagagatcgagaccagcttggccaacatggtaaaaccccgtctctactaaaaatacaaaaaaattagctggagtggtggcgagtagtcccagctacttgggaggctgaggcaggagaatggtgtgaacccaggaggtggagcttgcagtgagccgagatcgcgccactgcactcctgcctgggcgacagagcaagactccatctcaaaaataaataaataaattaattaaattaaataaaaatatgttccaacggccgggcgtggtggctcatgcctgtaatcccagcactttgggaggctgaggtgggtggatcacaaggtcaggaattcaagaccagcctagccagcatggtgaaacctcatctctactaaaaatacaaaaattagctgggcatggtggtgtgcgcctgtaatcccaactacttggaaggcagaggaggagaattgcttgaactcgggaggcagaggttgcagcaagccaagatcgcaccactgtactccagcctggacaacagagccagactccgtctcaaaaaaaaagaaataggaagcaagccggatgtgttggctcacgcctgtaattccagctactcaggagttcaagaccaacctgggctacagagccagaccccatctccacaaaaataatcccagctactcaggaagctgacatggggggtactgcttgaggcccggagttcaagaccaacttgggctacatcatgagaccccatttctacaaaaataaaaaataaaacggaacggggagcatctacgtgccaagatgtgggaggtgcacacagcaagtgctgcttggcagtcccccacaaccccactccacacctctccacccaggggagttccccagcaaggaagagttcagctgtggggtgaaaacattacgtgctgactctgacactcctggcgggcccccagcacctcctcggacccaacaaggtgtgccttctgctgatgaccagcacagctcactttcgagggcatgagaagaccaagggtgagtctggattctctgccaggagcacgggaagaccaagtcaacaccagcaagcacgaaaaccacgacgaaccccccaccaggcgagggtgaacggacactgtcctgcactagcccactctgctgggcagctgggcagcagctgtggctaatctaagtgacgggtgcttcgagagcacccacaggttaaaacgggcccaggccatgacactttaaaatggtggtttacagaacaatggcatctcagattagggaatgacctgcaaagaccctcttgtccccatcaatccagattttaaggcctctaccgaaattgatcaaatcaggctaagcatggtggctcacgcctgtaaccctagcactttgggaggctgaggcaggcagatcgcttgaggtcaggacttcgagaccagcc

SEQ ID NO: 41602 - DNA, 961 bp, Artificial sequence
  DNA replication origin
ggaggccggagcagcacggccgcaggacctggagctccggctgcgtcttcccgcagcgctacccgccatgcgcctgccgcgccgggccgcgctggggctcctgccgcttctgctgctgctgccgcccgcgccggaggccgccaagaagccgacgccctgccaccggtgccgggggctggtggacaagtttaaccaggtgggaaggggccgggcggggtcgtcaaccttgggcccggggtccccctcaccctgcatccggggtcgccccaccttgggcccagggtcgccctcaccctggatccggggtccccctcaccctggattcgggatccccctcaccgtcgatccagagtccctccaccgtggtcctggagtccccctcacccttgacccggatccacccccaccgtggaaccagggtcgacgccaccgtgggcctggagtcccctcaccctcgacctgggctcgcccccaccctggacccgggtcaggtggtaccaagcactatgggcactgtctcctcgcaggggatggtggacaccgcaaagaagaactttggcggcgggaacacggcttgggaggaaaagacgctgtccaagtacgagtccaggtgggtgccctggagcacccctgtgggtcttggcctggcgctgtcctgggaagtcgtgtcctgcctttggtgcctgtgttaatgacagggagacagaacagcccccgaggcaccagtcacccgtccgagtcacctcggcttctccctgaggactaatggctggcccctctctggccttccagcttctgctctggtccctaccccctcaacagacagtggcttttcaaaatgtaaactggaacaccagccccacttgtgggaaccgctcctggcttcccctgacagtggggtccccttattctctgtgcccggagtcctggctccccggcccctgcacccaggttggcgtat

SEQ ID NO: 41603 - DNA, 1019 bp, Artificial sequence
  DNA replication origin
gtgctcggccccccagggactcagctggtgtttccctacttctttccacggccatccctgtggactctccaccatgctctgatcccactttctgagccccccaagggcccacccagcccccgcccctctggcctctgcccttggtctgcaccgtcaggacctcatctctaggtggtcccatcagcacatgaagcggaaactgcctgagagggctgaagtggacaagagcagcccccacctcgcctaagctgagctgtgccccctctagggatttggggcaccctggcctagggttagagggagaaagggagaggccgtgaggctgctgagtgcaactgactcaggaagagccagaggcgagatgcagggccaggcaccactcagcctgcccaagtgggctgtggctgcctctgcgggccggggacccacggggcagagtcctaccacaggggctcttccaatacccaggtaagcgtgaccacctggggcccagtgagcataggtgcactgagatggggttcgtgggtacagaacagtgtggacatggaggtcagtagtgccaggatggtgcacggcctgggaagggggggccagggcaggagcaggacagccacctaccactggcggcatcggcggggtggcgcggggaggcgacaggaggggcggcgtgactgaggagtgggtggtggggaccaggccaagtgggacttgggggctatgaggagcccagggaggaggccatggccccccggaacggagctcccagagcctgcagcctctcacccgcagccagctttcttcttgcagtgtcttcattcccagatgaggaacgggcaggccctgcggtttgtgagtggctgtttcctccagcgaagcccccaaagatgcttttcccctgcctgagggtccctgcttgtacatcctttgaatcactgaagagggcccataggttggacccctgaaacccacctggtcacgtcttcaggttctcgcccaaggcagggccctcccctcctccc

SEQ ID NO: 41604 - DNA, 2115 bp, Artificial sequence
  DNA replication origin
gggggacggggactggggggggcggttgagcaggaatgggggacgaccccgcaagaccctgcggcagggccgaggcgagggcgcaggcagggtccttggaaccgcggggctggggtccacctgcccgggtgctcgaggggcgcctgcggggctggggctggggctggggctggggccgggaccgggagcgccgcctcctgggggggctctgatccgcccctccccacgcggcgccgcccgcgccccgcccgctcccgccggacacagcggaccctgcctcggatcgcgacccctgcccgggcccagcaggtggaccgcgaggccgcgcgaggtaccgcccctcggagccgcccggcctgggtcggggaccgggacgcgcgcggccagcaggtggcgctgtgggaccgccctgctcggcccggctcccgggactcggccggcccctgcccgctgcacctgccccgtcacacctcggcgctgccggggcgtctttctaaaaggggaacttggaagggggaggttggggtgaactgtggacctccgctgtccttctgggcccaggcagagaccctgccatagccctgggggagtcccaccctctgggagccaggactggggtctgcagggccgagagggcctccactttggttcccagaccccggcatcttgctttggcacatacgcaggtcctggagatggcttccatccccacagggcactccttgtcaggctagaagcttctagaagtgccccctggtcaagcccacccctggctttgctgtaaacgcgtcccttggtcgaatgcaacagacagtgggcgggatccgcaggatgagacgttctgtgagccagcggttctcaacaggcagctgttgtgtcctccaggggacaggggaccgcctctggaggtgctgtgggttgtcacgacctggtgaggagtgcttctgccagggcacaggacaccctgccacagaggatggcccccaccagaggacaagccagctcccgctgccaccaaggcagacagatgctcacagcagtccctggacaggggcctggacctcagccaaggcatgttagacagggaggcggccatggtgtgaacgtgggtctgctctgggaacacgaatcatggggtggggtccgcgcaggccgggaccacctatgcgtgctgcgtcctgctgtcctggatgtaccacatccccctgaagatgaccgttgcctgctcaacctcatgacagggccggtctaatagccagtgccagcgggcaaggcagagacacagccatggggcatcccatggccaggctgtgcatctccacaggggcccagaaccacagcaggagtcctcgacgcaggcacacactgaggatggcatgggcctcctctgcactgtgtttggggagggtcttccacaggcacttgaccttaacccctcctttaccacccgtgcctttggtctgcagagtcagatcgtaagtagcagccgggacaccggagttgggcttggacggcggtggagctggtcctgctctgtgcctgttcagagctgtccttttgtgtcccccagtattgggttggaacagagtccccaaatgtggaacatactgttccagctcccagaagccttccaggtgccgtgtgtcctggcgggggctgcaagaggcagccacttatctgtcctctgctttggaggggattttctcgctcaggagggcccagtgtgctcaccatgtcttggtcatctggtctcattagcacagcaccatcgatagagggggccagtgtgacatcctggggacattcattcagctggtgccagtctctggattattgtgagagagggcaggaacgttaccatagccctggggaggaactgagtgtttcctgttttgagttccaaggcagtgtgactgatcttcctgccagacaggagatggagaagaatgcacacccagcagtggcctcactgcacacctggggctggggagccttctctagcaaaggcgccacatctagctgggttgtttttgcaacagtccactctcctccaggacccacccacctgccttttgcagtggtcagattggtggaataaaaggagatccttggccg

SEQ ID NO: 41605 - DNA, 2610 bp, Artificial sequence
  DNA replication origin
gcacctccattgcgtcccctccccccacctcctcgtagcgcccccatctgctccccgcccccgcccgccggggaaagcccagctgacgcttccggcaccgcccccttcccggcagggccgctccccgcccttcccgcccgcgggagcaacaccgccccccgcgccccaccccgcgccccgccgcccgcccgggtcccccaagcccgctctgcgcagggcggggtccttcctctgcaaagggcggaccgaagacccgggcgccgggcagaggctggaggggggcccgggtggggtgaatccccagtgggtgcccgctccccacccccaccgcgaccaccagcccccgctccgagcagggactccgaggcttgcgggtgaccctcgagtggtggccgccctgtggcccagagagccccgtcgcaggcaggtgggtgagcgcagaaagacgctggccctggactgccgtttgaggggtgaggggccagatacccctccctggctctggggggatcctcccaaaggccagaccggggtaggggggagagcggaccctgctcaacggctgggaacggtctctccagaaggatcccccgggagtgggtggagggggtctctggagaggtgggtgccctgcagcctcctcaggccaggccactcccggcccctcactggtgcagagcagccggcttggggtttgggaagaccgcagccccagggaggcggggaggggcgctgggcctggagggggagtgtgtggcctgagagccggtggcccccaccagccacattacagtaagcctttctgggccccagcaccgccccccactcccctgcaggacctgggcccttctgccccccgacccccagggcccacctggcacaggctcagtccacacccgcgtgctggtcacgggcatatgaggaggagggcagggccactgggccagggccctccaccctgagtcaccccactgacgaccacccttcccaggtggcaggcagagtccccaccccaggcctgcggggtctgggagtctgaaaagggacagagccggaccggggggctgagggagcagcaggggcaggctgaggagagcaccccactgaaggccacaccctttgagtcatcctgtggtggccaaaggcccagccccctcctcacagctcagcacgctgaagaagtctcagggtgcctcacctcacccagcccccaggtcagctgaggacatggctgaggcgccaagaccgcctgccactctggagccagccacagacaggcagcgccagggaggtgtacaggcaaaggcactctgtccagcgggcaccactggcggtggacgcgacgggaaggggcctgcactcttggggtgggtgagcctggggtgagagtccagggggcacaaccttgagaacagtgtcctcggggggctgctggtgcccgcccctgaagctctggaaaaacaacagaaggctgcatggagaggccaggagaacacgcacagactcagtgaccagaggggccaccaataggtgaccccatccccgggggtctgctgtgccccggcctcggtgctggctgggaagaaacaggatgtctccaaaccgtgcctcctccgtgggagaggccggccccctgccccggctccccaggacctgcccgagaccctcctgggattacccaggacctgcccgagaccctcctgggattaagttgcagtgtatcctggtggggatgtgctggcccagtgacaaaggggccacagcctgaaggagcccgggacccgaagccgtgcccagccagataagctgcatgtggtggacggcggagagctgacgggttgtgggcccttttctgaggactaggaccccaggaggcggtgtcctctgctgctctgtttcacggcccagaggctcctggagtgtgggacacacgtgaggaggggtgaatgtcagaacagccaccgcagacaggggctgaaagtcatgtggcaccacagatcccagctgtcctctggaactgagagcaggggacggtcacagcactggactggctgacagggacgggggtgatggccaggcagcagcatttgaccatcagtggctgtgaaggcagctctctaatgagttgcagggctggagcgggcccagggtcagagctgcgtggggttgtggaggtggctgatagaacagcatgttcctgggagagggacaggcagcccacaagagactgctcagcttgttggagcaaaatatattagggttgtgtgatgcggaggtcaagggtactcgctccaataaaaagtcagggccggtcgtggtggctcaagcctgtaatcccagcactctgcgaggccaaggcaggtggatcactttgaggtcgggagttcaagagcagcctgctcaacatagtgaaaccccatctctactaaaaatacaacagttagctgggcgtggtggcaggtgcctgtaatctcagctactcgggaggctgaggcaggagaattgcttaaacctgggagacagaggttgcagtgacctgagatcacaccaccgcactctagcctgggcaacacagagagactctttcttgaaaatagataaataaggccg

SEQ ID NO: 41606 - DNA, 1259 bp, Artificial sequence
  DNA replication origin
aggtggacctccccccgccccaggctggctttgggtgaatgcatctgacttccagaagccccagagcaagaccctagagtagctagaagccccaaggggaccctgggcgtggcgggagggggcaagggaaaagcctccagagggttcagggccctcccctgccacaggagacccagtgagggctgcagggacagcctggatctgtgcagtgcagatggcgtggaggggcagaagtggcacggttcccgcgtgcacagctctgagtgagcgcaagtgtggctgctgtgcacacccaggcagcgggtgcctgaatgggcctgtgtgaggggctgggactatttatagccgctcctagcccagaggagctattaatagccagggttgagggggacggacaatgtctcctgctggccgctgcctgcgggtggggtgggggtgggtgccattctgtgcccggagacacccggggctggtaccccagcccccacccaggcttcggcacaagggccactgttatctggtcagcagctgagccaggggtctgcattcacctgggacagcaggctgggggtgcaccaggctacagcccccaccctgctctccccggaggccgttctgcagccacactgaccctgaggaggatgggatggtgggcacgtgagctggcagcagcagggcaccccggatggaaagggatgctgagaccaggacccccatatctggttctcagattccagcatggggaaggggtaaggaagtgctgtggggaccgcagagccagaagtggatttgagagaggccggccctgcaggccccccaacctgcctctggcagtataaccaggtgtccctgaagtaaacaggtgaactgaggccaagtcagatgggccttggagccactggaggggtgtggatggagggctgtgggtggaggagaagggccctgccagaattcaggctggtgggggcaacaggcagcctcatagcccgctgtcctggctgaggctcattccctgtgatcatttttgagaaaaaaaaaaaaaaaaaaaggggggagggcgcctagcttgtaaaaagaccagatcccgaccccacgaagggtgaagtgtgacctgggtggggcggggggcacccctccaagccttggctgcacccggctccctgtgccacacgcgtccccagcatcaagaggcgcaccccccacctctccctaagcccagccaggctgcagagaaaacaggaaagctcggaggcccagcc

SEQ ID NO: 41607 - DNA, 1441 bp, Artificial sequence
  DNA replication origin
tttcaccatgttgggcaggctgaactcaaacctgacctcaggtgatccatcaggctcagcctcccacagtgctgggattgcaggtgtgagccgccgcctggccccagcgcagagttcttgacttgcagccttcgttgtccttgtcccaatgctgccagccacacctgccaggggctcaggtcaatgctctggcgtcctccaatgccctggagtcagccagcaagcccagctggctctaccttcaacaccatgatggtaatctgttgctctgctgtgtcacaaacgactccaaattatagtggcttaaaacaacacacatttatgacttccaggtgggtctggaatccaagtctggtttagcagtttccctctgccccagggtctcctacaaggctaaaatcagggagctgtttggggctgtggtttaatctcaggggtcacatgtacatcttaaattctgcataaaacagttttatataataaaaggccacttctcacagcatctctggccccaaaaggggcggagtttcctggggggctggtgagcagtgacactgtaaaggggcggagtttcctggggggctggtgagcagcgacactgtaaaggggcggagtttcctgggggggactggtgagcagcaacactgtaaaggggcggagtttcctgggggggctggtgagcagcgacactgtaaaggggcggagtttcctggggggctggtgagcagcaatactgtaaaggggcggagtttcctggggggggctggtgagcagcgacactgtaaaggggcggagtttcctgggggacctggtgagcagtgacactgtaaaggggcagagtttcctggggggactggtgagcagtgacactgtaaaggggcagagtttcctggggggctggtgagcagtgacactgtaaaggggcggagtttcctggggggctggtgagcagtgacactgtaaaggggcggagtttcctggggggctggtgagcagtgacactgtaaaggggcggagtttcctgggggacctggtgatcagtgacactgtaaagggtcgtagagtttcctgggggacctggtgagcagtgacactgtaaaggggcgtagagtttcctgggggacctggtgagcagtgacactgtaaaggggcgtagagtttcctgggggacctggtgagcagttgacactgtaaaggggcgtagagtttcctgggggacctggtgagcagtgacactgtaaaggggcgtagagtttcctgggggacctggtgagcagtgacactgtaaaggggcgtagagtttcctgggggtactggtgagcagcgacactgtaaaggggcggagtttcctggggggctggtgagcagtgagacttttttccgggtcccaaccccccaggacatcatgcggtcaggagctctgggctggcgcaagcgcacc

SEQ ID NO: 41608 - DNA, 952 bp, Artificial sequence
  DNA replication origin
caaccacggggaagcacagaggggtggggggatgtgggggacaggggggtatagcggggggaggcgggcatggggcctgggccaggctgtgttatgggggagccggtgcagggggtggggcctgggccaggctgtgttgttgggggtagtaggggtggggcctgggccgggctgtgtttggggctgtggtgcctgggcagggctgtgttataggggggtgggggggtggggggcctgagtggggctgtgtttgttggcgcaggggggtgtggggcctgggctgggctgtgttgtcaagggtacactggctgatgagggaattctctacccagctaagcaagtaactagaaggaccgggcccagccgcctgctggagctgccgggggtccaggggcagccgccctgccaggcctactctacggcaacacggagcgtttgcagcagcttctcccaggccctgtgggccgagggctcaggagtccagggcagcgcaggacgggcacagctgggggcccctcatagccagaagggcccctggtgaggccaggcagagggcggctgcctttccacagtccattcgcccactcagccacatttgggggtctctgcccaccgggctccaccctcctcccactccccaccccagctatgacatcttctcgtgccagcctcacaggggccttagactggacggcagcgtttggctcgcaaatgaggaaccgaggctggaggttaccgggacaggggcggggaggctggtgggggctgaggaagggtgttgggaggctaaggtggtgcagaggaagggggtggaaaggctagtgggggactgaggatgggggcgtggagtctgggaggctgaggccaggggcggagatctggagggctgaggatgggggaagggagctgggaggctggctgactgaggacgggggcggggaggctggggggc

SEQ ID NO: 41609 - DNA, 1175 bp, Artificial sequence
  DNA replication origin
ggatttcagcagggagaaggcagaactgccatgtggcacgctgagcactgcccagccgcctcatcccaggagccctcctcccggggtctgtgcccaaaaccacaggctcttctaccgggcgcccactgggtgctgtgggacgtgctgcttggtacaatgtcgtcagattctccgcacagcctccacagaaatcgcagtgcctctccagagactgagcctgatagagtctggggatgtgtctgtgactctgggctgggtcagcggaagagcagggacccaggccgaggtgccaggacggccccaaagggccaccagggaaggcactgcagggccaaaggccaagagctatgaagtgggcagggctgtggtccaggcccaaggccagggtggcctgtccctggtcaacaggtcagaggtcccaggtgagggggccctgcacgcctgccctggcccccggcccaggcctgggacacacaggccacgcagctccggctcaggctgagtcgtggtctgggtggtggcaaggccacagctctccaggttggcagatccagtgaggctgctgcgctgaagccacagttcccaccatcactgcagcccccgggcgaccaacagaggcagcccccctccagctgggtctcagcgtctgctccactgaggacagggttcaggacgggacactcccacagcatcttctatgtttgtgcaggactctttctgcagagtccaagtgacggatgccaggcggccatgctcactggggcccaggccccgggtggcttatggaatataaatggtctgtgctggtagcaggtgggggtaacctggtgggaacagctgcctctctaacacaggccaggcctcagctgaggggtaaaactggtgtcctccaggcagggacagaggctggaagaggcagccaaagcggctgggcctgagttcatgcaggtcgcccacacccccagctcccactgactaggcgccccactccaccccaggcccaaccctgggatgcctttggtgaaacgttgcaaaatcctggcacagctctgctggctcctatctgcagcgggtgagaggctgcgacgaccgagagtggaggccagaggggaaagggcctctccccacaacaggcatcgcctgcccccgccactgccctgggagcacccagtctt

SEQ ID NO: 41610 - DNA, 1143 bp, Artificial sequence
  DNA replication origin
tccaggcagggacagaggctggaagaggcagccaaagcggctgggcctgagttcatgcaggtcgcccacacccccagctcccactgactaggcgccccactccaccccaggcccaaccctgggatgcctttggtgaaacgttgcaaaatcctggcacagctctgctggctcctatctgcagcgggtgagaggctgcgacgaccgagagtggaggccagaggggaaagggcctctccccacaacaggcatcgcctgcccccgccactgccctgggagcacccagtcttggccgctgcagcctgtgtgggctggaagacgaggtgcagcaggtgcccctcccaagctgggaacagctgggggagtccggtctgcggggagatgacgcagagctccagcccagggcctggggcggccgtactgggacattgattctgggtggcagcaggtgctggtgggggccaggcccatgggctggggaggagggcctgtaccctggtggcccaggggagccacaaagggtccaaggcaggactgtgaggggctcacagtgggaaaaagaccatggtggccaagggggctcacactggggcctgggatgagggtgggagcgggcaggtggatcggcaggagggaggtttgggaatgggataggcctcggtaagggcttgggggcaggtgaggggacgccccctcctcaggcatggcctgggttggaagggcatcacatacaggcaggacaaggccgggcgaccctgtgggataggcacggggcaactggaaacaggctgattaaggaggccttggtcattggcttggagactgggggtggacaggatccccagggaaggagggaagaggggcgggatgggccggcgggaggcaggacagtggggacacagcctggggagcaggaatgggggtgcccgtggagcatgaaccctgttaacactcccctctgcaatgccccagctttgaggaggtgtctgtaagtgtgattctatgtgtgagtgtttgtgaattggtgcgtgtgagcagtgttagcatgcatgtgtgtgtgggagactgtaagtggccccagccaccttccattccacctcctcatcctcccgaatccaggcaggccagcctggcttgggtcaccat

SEQ ID NO: 41611 - DNA, 1506 bp, Artificial sequence
  DNA replication origin
ccgaggcctgtgtggcaggaatcccatctggaggcctggaggaatctccagcacacctggagtgagcgggaggagggccgtggaggacaggcacaccgtgctttctgaaggagcaagtcctcctggatcttagttaagggacacttgagggtttcagagcaagacccggggcctagggagagccagggtggggtgcctgcccgccagagcctggtcttctacggccaggatgactcagggaagactggcctggagcctgacatgtcagactcaaggaagactagcctgacatgtcaggctgaggaccctcgcccctccagactgacatgaactcaactgtagtggtcaccccctagacctaccgtgctctccagcatctctgcccacctctgctgcgtgtccagcacagaagagggcagccccactggaccctcaggtaggtccccgggaggacccacatgggcagcagcccctcctccttcgcaggtgctgtgtggatactgctggaggggaaggcttggggtgtcatcctaccagggatctgatctcgggggagccctgtgctgggtgcgtggtgggtgggggaaggctaacccaccagccccaaccctgccctcgtactgcgggagagaactggacagagctctgggaagcagcggctggagggggaggggcctggggacaaacaatgtcgcgttggctttgatcctcaggacccaagggacaggaagagatgagctaggcaagagaggagcccccaggagcacaggcatgggcccaggcagcgggcgacgaagcgagccccagagggcgcccagatggcaggtgggcctgggccagtcccgagagccacagcctcagaagagctgaacaggggagtggtgtgtgagtggtcagcgcagggacagcgatggtgactgtatagagatgagaggtcagacttaggggaggctggaagctccgaggcaagtgtgtgtgcgcgctgacggtcacaccagaccgcccggggatgtctgccacaatatttagacccctgagggccactgagaacgcctggcagtgccaagaggaccagcccctgggccctctggcccccaactctcaacccactagccctggggctggcgggtggccactcacgtcctggaaccctgagctgctctcaggccggtgactttggaccaatgttggcaatctgtgggtttgcaccaaaccacacaggtgagtcagacttctgtacagagagcagggaaggggcacgacagggtgaagtccagaccagggcaatgtgtaccccggctgttcagcctttgagtgcggctgtcgcagcaatcaaggtgggctccctggtggaggtggacagcagctgctggagagcccggagggcagccaggaccgtgtcagacggcaggagtcgggcggggccactccaggcaccggccagcagggcagaggtaccagggagggccctcgggctgcgggcgtgaggtcagagcccagggtgag

SEQ ID NO: 41612 - DNA, 920 bp, Artificial sequence
  DNA replication origin
aaattaaacgctcaggctctggccccaccccagctttcagagcccacaagcagactgtacaaagtcaataatttaaaacccaaaccctgggcacagtgcctggaagtgtcagggtcacccactccccttaagttagccactatacatgttcatcttctgacaggcggggccgggacagacgccaggcacaggaatcagggcctggggtccctggaccacagccaccccctcccctgcctccccactgtcccctggggcttgggagaggcagactgctcagaggaaataacctcaacaaataaattaaacaataaatagccccggtgggccgagggcacctccagggggtcacaccataaataacagagttggcggcgggtacggctcgcgtgggcgggcgggcgcggaggccaggacttgcattgtgtgtgcaggacgtgcccagacgcacaccgcaggactgagggcgggaggtgggcttgggaccctgcgccggcggaaagagctccgggtgggcaggcagatgggaaggccgcctccggacacagcagcacagaggggcgtctggggttcaagtatccacccagggcaggcgggacctcgaccggagcgtctttggacagacagagcttgagaaaaccaagtcccgcgggaccagcgttcaaaaggcactcaaagcgaaggtcaccaggggtcagaggtcactgcttccgcaggaggagacggcccacgcaggagaaagtcagggtctgggggcgtcccaggtctggccaaggcaggtggtcccctagctcccagtcaggtgcagctcctcacaagctctcgctgctggacgtggtgctggccacgtcatcagggtcgagggtgcacagccgcaggtcacagctctccgggacgcccccgtcagcccccagcatcca

SEQ ID NO: 41613 - DNA, 1573 bp, Artificial sequence
  DNA replication origin
ttttaaattattgactttgtacagtctgcttgtgggctctgaaagctggggtggggccagagcctgagcgtttaatttattcagtacctgtgtttgtgtgaatgcggtgtgtgcaggcatcgcagatgggggttctttcagttcaaaagtgagatgtctggagatcatatttttttatacaggtatttcaattaaaatgtttttgtacatagtggataatcctgtatttatggggctgggcatcctgggggaagagaggggctctgaggaagggctttggctgctgggtgacctgacaagtttcccgtggggctggtagttttgcccacgggggaaacgggggaggcccagctgggtgccagcctccccagtgccacaggctacttcatgtggcttgtggcccaccgcactaccccgtgctgcacccagggagaagagcagctgcctcctggggtgcctctgggaggtggaggcagggagccaggccctgaggatgcagcaacccacactagtcaggaggtcattcctcggtggtcccaggaggatctctgcagcccccacccagggaggccttgccagtggaaatggccatacttgcatcctggcttggtggaaacagagacgtgcgggggggtgggggagggagtccatgctgcctcagagggtggctgggggttttgaaggacagggaggagtttgccaggcacatggggtgggagtgtgttccgggcagtgccaaggacgtgcagaggacatgagggtggggtttggtggagggtatcggggtgttcagtcagttatagttagaccctggcctggcgggtgtgtggtgagagagtggggtatgaaccaggttcgggtgtgtcaatgggcctggccacaatgttcctggtgggtagaggaggcctgggtggagggtcccagtgagactgctcccccacccccaccccaggggccttctgctcaactgcccaccctgtgctgggctgtggggtgccccatgttggcagtggacctgcacctggggcatcacccagtctgccaagcgcacctactcggctctctggctcctggagccctgtctgccccctgcctcccatctgcccctccgaataagagtccctgataaacagcccggggcaggcagcaccatactggacagaagactgtcccaggcccgaggccagaggctgtggcagaggcgggaagtttgggaaagagaaacaggaggagacgaaagtcacccttcccctggagagcaggcagagagggctcgggtggggggctcccgcctcaggttgtgactgttcaggacatcagtgggtgtttgtggcctctgctgtggagatccaggagcacctggagggcagctgctcagttaggcaggtctctcggggccctcatctcaccctacagcctcaggccagcaggggagatgaggaggtgccgggaaggacaagccaccggttcccatagacctggcccaaccagcgtgccctgagtccagtctggtccagtgaggcttttcccattaccccaccccccactgccaaaatgggaccctcgggcagca

SEQ ID NO: 41614 - DNA, 1028 bp, Artificial sequence
  DNA replication origin
ccccatgaacaagcaaggggcctcccttggggatgggtcacctggacccagctctgaatgacccaggtgggggaaacagcctcagaggccaggcgcccacccgaagtcataagcggccaagcaggcccaggtctgcaagctaggaggagggtgccctggggtggatgtgcttgggtaccccatcttcccctgagagaggctcagggcggtgggctggttctgacctggactctggccccagatcctgcaggcagcaggtccagaccagtcacctggtgtacaccctgcaggggtgagcatggctggggatacacatcatccctcaacccgagtggccaaggggtactgcagccctggaggctcctaggcagggtgggaggggcccagtccatagggaaggacccacctaggagcccacagaggccctgcaggaacacagtggattctgctgggcttcgacccccagggagaggccagaccgcaggtctagggtggggactggcggggaggaaccaggcctacggtcacttggatcctgccagagccccagggagtgtctaggggaagggtgtgcaggagcccagacagctggggggctggagggggccagggaagggttggggaggccctgaatccttccccttcgtccagcacccaaagtcaagtggcccagcagagccaaagcagcagaggtggggtggggccggcaggggagcagattcctggcgcttgggctctggagctctgcttgtctctggaccaggatggtgccctcagagatgtctctgaaagctcactatgggccgccccaggagccagaaaaggcccacaggaatcctccaccagctcctgccgcccctgggccgtggtgctcagtcaggcagatgacctgtggccgagagcctgaggaaggacccgaggctggctgggccctgtctcctcctgagtcagggggtggagggctatgtccagaggcgcccccaagcgcgccatcccctgtgctagaaggccagagctatctcgctggg

SEQ ID NO: 41615 - DNA, 1181 bp, Artificial sequence
  DNA replication origin
tcacagccagccacgccctggccttccaggggaagatggggctcccagaagcacacccaccccaggctagcctcctcttggcttacagacctgagcctgcttggccccttatgactttgggtgggcgcctggcctctgggcttcagtttcccccacctggatcattcagagctgggtccaggtgacccatccccaagagagaccccttgcttgttcatgggggagcgaacacccactccacccatgctggctggcatctggggcacggcacccctgggagattctgcagggacctggccaggaggatgggtctggacctggtgcctgcaggtgcctccagctgcccccggctgtcccactgctcagggcctggaggctctgtggagggcgggcgaggcggggaggtctgtgctgccctgtgccaggctttgcaggtccctggcatctgcaggacaccccgctctgcaggagcaggatctatctgctcatcagaaccagccctgtgtgcggagtctcgggtctgggaggggctccctcagacccaggttgtctcaggtccaggatggggctggaggagagggagacaggctgccttaggaaggactgtctgggagaccagacccttgaaactccaacctgccttcctccaggccggaagcttcctgggtctcgtcctccaccctctgctccttgcccccaacttccagaagactgtgcccaggctccgtaccccccaccccgcccacgtccacacgctgacctctcttcccacacctggtccaattattctctgcacgggtggtcctttgctgatttgctatctaaaggtgtcctttagaaacattctgccaagttctggacagcgtccaccccagggggagtcctgaacaggctgtggtcctcagtgtcatgtgaccgctgcgtactgtggtgagtgcgtcgttccagctgtcagtgcaggctgggccacacagatgccgtcctggctcactcggcagccttggaactgattggtttgtccacagctatgcccctgagggtggcctggtcagtaaacaggtcgggggaggggccaaggctggtcgtgccccacagcctgcccggcacccacacagggggcaaggttccgctccgaggtccgttcttcttgccaggctgctcgaccgcctctgggcccaagg

SEQ ID NO: 41616 - DNA, 925 bp, Artificial sequence
  DNA replication origin
tatcaccatcagcctttgcacaggtgggctccccagtggggcctgggagacagcacaggcagctctgcagagatctggggagaggggcttggcagtggggcagcaggtgcaaaggccctgaggcaggcggaggggccaggaccacagtcccatccagcactcgccctgggccctgcctcctggtctactccatgcccagggtccccctcaacagtctgttccgtgtgggatgagctgaggggaggaagcaggggtctcagaagcacaagggccctgagcagagccctggggactgtctcctgctgtgagacaggactgggcaggggctggcaggcatgtgtctgggtggcccatgccagccgtggagcaggccaggggctgctctgatgcccacaggactgcccatttgccagcacaggacctggccctggagggtcctggagtcccagctctaccctgaagcagccacctcagtcctccctctagaaaggaccagcagggtctaccgggccacccaggaatgcaggcaactcttatgatgtgtaggcacctgtgtgtccacatctgtacacgtagaaaagtgtcggtgggtgtgtaaatctatacatgttccaagtgtgtgtgtctgggtttttgtgcatgtgcatgtgtgtgtgtgcatgtgaatctctgtgtgtgcaggtgtgatttcctgtgtgcacgtctatgtgtatatgcatgtgggcacgtgtctgccatgtatgtgtgtgctccaatgtgtgtgatcctgtgtgtgcacacgtgtgtgtgcatgcacgcgtctgcacctgggcaggacctggcctaggaagagcctggagccaagactagcagttctcccctcccccgcccccaaatgacgtggccgctgccaccgcgtgactcaccctcccttcactcaaagggc

SEQ ID NO: 41617 - DNA, 1652 bp, Artificial sequence
  DNA replication origin
tgggggcaccgtcggggcgtccccaccacctcggcgcccacgtcgggttttgcgggggcttcccacgtgggcccctgggtgggcgcccacgccccatgcgcctcccctgcgccccagcctggcggagtcctccaggttcctgcccctcaggcagccgcaccctgcctggtccgcgggaccccctacaaagccctgacctcctctcctggaccctcccacctgggcccgccgcccctacctcgggctgcgcgaccacccgcgggcaccctcgtctcgcagccccgcctggacctcttcctagctttgcacttccccagaccccggccccaccgcccccagcctcctgtgtcccgtaggtccctctggcgctgcgcccccacctcctccagtctggctctgtgtccccgcgaggtgctgggtcccttcccacccccgcctcctcctccctggtcccactggaggggcaggcagggccggggccgagtctccacacctgaggaaatcccttcctggcccggtcccacccacggccccctggcaaccccacaggccactggccaccctccaggaggttccagcagatggggtgtgtgtgtgtgtgtgtgtgtgtgtgtgatgtgtgtgtgatgtgtatagtgtgtgtgtgtgcgtgctatgtgtattgtgtggtgtgtagtgtttgtgtaagatgtgtggttgtgtgtggtgtttatgtatggtgtttgtgtatggtgtgtagtgtgtgtgtatcgtgtgtattgtgtatggtgtgtgtgttgtgtatgtatcgtgtggtgttatgtatagagtatgtcattggtgtgtggtgtgtgtatcgtgttatgtgtgtcgtgttttgtgtgttgtcttttctggtgtctgctgtttgtgggtggtgtgtatatatcatgtgtggtgtgtggtgtgtgtgtcatgtgttttgtggtgtgtgctgtgtgtgtatggtgtgtgttgtgtggtgttttgtggagtgtggtgtttgtgtgtggtgtgtatgtatcatgtggtggtgtgtatggtgtgtcatgtgttttgcattgtgtggtgtatatagtgtgtgtatgtggtatggtgggtatgatgtgtttgtggtatgtggtatttgtgtcgtgtgttgtgtctgtgttgtgtgtggtgtttgtgtgtggtgtgtatgtatcgtgtgtggtgttgtgtatagtgtatgtggtatagtgagtatggtgtgtttgtggcatgtggtgtttgtatggtgtgtgttgtgtgtggtgttttgtggtgtgtggtgtgtgtgtggtgtgaatatatcatgtgtggtgtgtgtggtgtgtgtgtcaagcatttactggtgtgtgtgtgctgtgtgtgtatggggtgtgtatggtgttttgtggtgtatgctgtgtgtgtatggtgtgtgttgtgtgtgtgtggtgttttgtgtttgtgtgtggtatgtatatatcatgtgtgttgtgtgtgatgtgtgtcatgcatttactggtgtgtgctgtgtgtgtatggtgtgtgttgtgcgtgtgtggtgttttgtggtgtgtggtgtttgtgtgtggtgtgtatatatcatgtgtggtgttgtgtgttgtgtttgtgtggtgtgtgctgtgtgtgtgtggttgtttgtggtgtgt

SEQ ID NO: 41618 - DNA, 1046 bp, Artificial sequence
  DNA replication origin
  misc_feature (1)..(464): n is a, c, g, or t
nnnnnnnnnnnnnnnnnnnnnnnnnnnnnnnnnnnnnnnnnnnnnnnnnnnnnnnnnnnnnnnnnnnnnnnnnnnnnnnnnnnnnnnnnnnnnnnnnnnnnnnnnnnnnnnnnnnnnnnnnnnnnnnnnnnnnnnnnnnnnnnnnnnnnnnnnnnnnnnnnnnnnnnnnnnnnnnnnnnnnnnnnnnnnnnnnnnnnnnnnnnnnnnnnnnnnnnnnnnnnnnnnnnnnnnnnnnnnnnnnnnnnnnnnnnnnnnnnnnnnnnnnnnnnnnnnnnnnnnnnnnnnnnnnnnnnnnnnnnnnnnnnnnnnnnnnnnnnnnnnnnnnnnnnnnnnnnnnnnnnnnnnnnnnnnnnnnnnnnnnnnnnnnnnnnnnnnnnnnnnnnnnnnnnnnnnnnnnnnnnnnnnnnnnnnnnnnnnnnnnnnnnnnnnnnnnnnnnnnnnnnnnnnnnnnnnnnnnnnnnnnnggtgtgtatatatcatgtgtgatgtgtggtgtgtgtgtcatgtgttttgtggtgtgtgctgtgtgtgtggttttgtgtggtgtgttgtgtgtggtgtgtgtgtcatgtgttttgtggtgtgtgctgtgtgtgtatggtgtgtatatatcatgtgtggtggtgtgtgtggtgtgtcatgtgttttgtggtgtgtgctgtgtgtggcgtgtgctgtgtgtgtggtgtgcgtggtgtttagtgttgtgtgtggtgtgtgtgtcatgtgtttagtggtgtgtgtggtgtgtatatatcatgtgtggtgtgtgtgtggtgtgtgtgtcatgtgttgtgtggtgtgtgctgtgtgtggtgttgtgtgtggtgtgtgtgttatgtgttttgtggtgtgtgctgtgtgtgtggtgtgtgtggtgtgtatatatcatgtgtgttgtgtgtggtgtgtgctgtgtgtggtgtgtgtgtggtgtgtgctgtgtgtgtgtggtgttgtgtgtgtggtgtgtgtggtggcagaacccagcagggagatagggagggaggtggaagttcctttggggaaagacttccttccctaag

SEQ ID NO: 41619 - DNA, 904 bp, Artificial sequence
  DNA replication origin
aggaacccggagcgagggcgcgagggcgcgagggctcaaggtctcccgtctccccgccccctcgcttcagcttttactgggggagatgtctttgaggacaagctcctgactcagcctcaggttcccaggacgcgtgttcccctcgcagctgaaccaacccgacggggcgctcctggagagaccctcccttcaccccaggagggaccccacgggcgcctgcgtcctgcgaagctggcgattccactgcgtggcagcgctgctcccctaccccgggagtctggagggagccgggtggacacaggctcagggtgaccctcgccacctggatggcctcagggtgaccctcaccacctgggtggccgcagggtgaccctcaccacctgggtggccagggcgagcttctccatctctgacctgtgcctttttatccatgaacgaggacccgagggcaggctgcccagcgggccgggctcccacccgggcagggcctcaggcagctctgcgcgccctggagcagtgggaggtgccggttcgctcatctggaaatgcccccgtccccagctcccctaggccttcccaggaacacccacaacggttcatctcagaataccgatgaccagtggttccagcaccatttgctgagaaaattttcctttctgcactggatggcccctttgccaaagatcaaaggagatgatgagtttctgtgggtgtatccgaactatctgttcccttctgtggatctgtgcacctatcactttgccgattccacgtggtcatcactgctgtggcgctatagtaagtgttaaactcggatagtcagctgggcgaggtggctcacgcctgtaatccagcattttgggaggccgaggcgggaggatcacctgaggccaggagttcaaga

SEQ ID NO: 41620 - DNA, 1586 bp, Artificial sequence
  DNA replication origin
gccgggcagaggcgctcctcacttcctagacggggtggcggctggacagaggctgtaatcttagcactttgggaggccaaggcaggcggctgggaggtggaggttgtagcaagccgagatcatgccactgcactccagcctgggcaacattgagcactgagtgagcgagtctccgtctgcaatcccagcacctcgggaggccgaggcaggcagatcactcgaggtcaggagctggagaccagcctggtcaacatggtgaaaccccatctccaccaaaaatacaaaaaccagtcaggcgtggcggcacatgcctgcaaacccaggcactcggcaggccgaggcaggagaatcacgggagcccgaggcagggaggttgcagcgagctgagatcacggcagtacagtccagcctcggcaacagagggagaccagagagggagagggagaggagagggacagggagagagagggagagggagagtctctttctctttctctctctctctgtgtgtgtgtgtgtgtgtgtgtgtgtgtgtgtgtgtgtgtgtgtgtatttatattcaataagctaaagggaaatatggacatgaagctaaagaaaagcagaagaacaaggtgtgaactaagaggcaatgtcaataagatacataaattataatagggaaccaaatggacaatatggagctgaaaagcaaaatagcagaaatgaagaattcggctgggcacggtggctcacacctgtaatgccagcactttgggatgctgaccccaggaattcaagaccagcctgggcaacatagtgagaccttgtctttacaaaaaaaattttttttaatttgccaggtgtggtggtgcatgcctatagtcccagctacttgggaagctgaggtgggaagattgcttgagcccaggaagccaaggctgcagtgagtcacattcatgccactgcactgcagcctgggcaacatagtgagactgtctcaaaaaagaaaagaaagaagtgaagagttcactcgaggggttcaatgtcagatttgtgcacatagaagaaaggatcagggaacctgaagacaaggcgattggaattatccactctgaagagcagaaagaaaaaagatgcagaaaaatggaataacccgagggatctgggacaccatcgagtgtaccagcatacacctcacaggagtcccgaaaggagaggagaaatagaaaagggaagaaaaaattaaacttgaaggaatagtatccccaaattccccaaatttgatgaaataaatgaatctacatatcccagaatctcaacaaactgcaagccagataaactcagagatccacagtgacaaacactgttgtcaaactgtcaaaaaaacaatgacaaagcagcaagagagaagcaactggtctcgtacaaaggagcctcaataagatttttagcagatttctcatcagaagccttggagaccagagggcagtcgtataagtaaaggtaactacacaggaaaatagaaaatcaaggattatgatagttttggtttgtaactcctgtttttttctatgattcaaaagaccaactcataaaacagtaat

SEQ ID NO: 41621 - DNA, 865 bp, Artificial sequence
  DNA replication origin
agtctttggggactgttaagaggctgtgttcagatctcagctgtcctactgtccctcccagacaagggaggaacctgctggaggacacacgcgtgctgccaccaggcggcagtggctcttagtgctggtgctgagccggatcagccgccccagcacccaacacggagcgcccacagcccagtgcacccaccgcctccttggccagggacgctgccctccctccaccaccaccgccggaaacccacccccacacctgccaggagaaaagtgctgaggaccccgggccccagaaaggggggtgcggtaggggcgggcaggagcacctgtactggggtgcacagccctgctcacatctgggccacagtataacacgggtgagccttggacgcccgcctgcctcattcactcatgacacacagctgagcaggccttgggccctgggccccgacccagcaccgggaacaaacaacactggcaaagatcccgggccctgcagctgggggaccaagtctggggctgcctggcactaaggagggtcttgggtcagagtgtcagtgctgacaccaggacagtcccaggcaaactgggatcatggagctgacctttgcatgagagagacaaccagagccaagtgacataagtaagcgagggggcgtggctggtgccagtgtggggtgaggaatgaggctgggagcacgatggggagtgtggggagctgcaatctgaaatagggtgggtctgggcacggtggctcccgcctgtaatcccagcactttgggagaccaaggcgggtggattacttaaggtcaggagtttgagaccacctggccaacatggggaaaccccagctctactaaaaatacaa

SEQ ID NO: 41622 - DNA, 1099 bp, Artificial sequence
  DNA replication origin
gctggaccctggcccagtggtcacttgagtgggtgctagaccccatgggcctggcagccagggtagggcccaactgacctgtgtttcggggagggttcctgcagacactgaggcactggaggtgctgtgggacacggtctactaccacccggagagccagacactgagctgggagcccgcctgccctgtgagtggccatgtgagcctgtgctggcgcccggggccgggggccggctgccgtaagctgcagcaatccagccagctggtgcatcgcagagtgagtgcctgctcagcagggatgggggtgggcatggatgccacagcctgaccccagccctcctcaggtgcagtacccgctggtggacacccagccccagctctgcctgaaggtgaggggctgccacagcctgccagtgccctatttggggaggggccagggggcatcagggcggggagtggggcaggggcccttgcccagccctggagcctagcctcccaggcgtccctcagagccccctcctggtctgacagtgggtgagctaagggcctaaggaggagaactgggcccagagcaccctgaagctgacccagcctgtccctgtccctgcccctgtccctgcccctgcctcacacacactccaccctcctgcacccctcaccccactttgcagttctctaccagttgggggtcctgggtgcggtgccctttcgaacagcgtcgcttcccaagtaagttctccatgaggcctacgcaatgtggacgcagcacagaacatcctttatatcactctgtgctggtcagggaggtggaataacggtgccaagccagtgtgggggaggtacagtgggcaggcgccaggcccactggggaaggaagggaggcggtggggtgctgggccggatgggggtctcacccttcactccccacagcctggaaaatgaccatccagccttcgcccacaaagggccacctccgggtcaccttcttctcgtccagccccgcccacttccaggtgcacctgtgtcacaggaggaagtcacagctccctgcctgccaacgcacactccaggccagcccgctcccttcagcctcagtgag

SEQ ID NO: 41623 - DNA, 1399 bp, Artificial sequence
  DNA replication origin
gcccctcaccttcaggcagagctggggctgggtgtccaccagcgggtactgcacctgaggagggctggggtcaggctgtggcatccatgcccacccccatccctgctgagcaggcactcactctgcgatgcaccagctggctggattgctgcagcttacggcagccggcccccggccccgggcgccagcacaggctcacatggccactcacagggcaggcgggctcccagctcagtgtctggctctccgggtggtagtagaccgtgtcccacagcacctccagtgcctcagtgtctgcaggaaccctccccgaaacacaggtcagttgggccctaccctggctgccaggcccatggggtctagcacccactcaagtgaccactgggccagggtccagcgcagtcctatgggtctctgagccctggctcaaggctgtgcacgtgtgtgcatgggtgcatgtgcatgtgtgtggatatgcatgtgcatgggtgcgtgcgcctatgtgtgtgcctgtgcatgggtgtcatgggtatgggtgtgcgtgagtgtgcctgcctgtgcatgggtgtgtgtatgtgtacgtgtttgcatgggtgtcatgggtatgggtgtgcgtgagtgtgcctgcctgtgcatgggtgtcatgggtatgggtgtgcgtgagtgtgcctgcctgtgcatgggtgtgtgtgcatgtgtacgtgtttgcatgtgtatgggtgtgtatgtgcatgggtgcgtgtgcatgggtgcgtgtccatgggtgtgggtgtgcgtatgcatgggtgtgcctgcctgcgcgtgggtgtgcgtgtgcatgtgtatgtgtgtgcatgtgtatgggcgtgtatgttcatgggtgtctgtgcatgtgtgtgtgcatgtgtatgggcgtgtatgttcatgggtgtctgtgcatgtgtatgggcgtgtatgttcgtgggtgtctgtgcatgtgtgtgtgtgcagcgtcgctgagcagaaccgagagcaggacgtctctcttgtgcccctcagacagcccctcttgacaggcttggttttcccaggtgagctggtccacgtgcgcacacatgtacattgcacacacacacacacttatgcacatccacatctgtgcgcaggttcccttggtgacaagcccttccgagcaggctcagggatttaggctgggcctgctccttatctcatccccccacgtcagtcctcatggtggagtcagactggccgcagccattcccacccttccgcccgttggcatcgcaggacacttgccgttttcaaaggggcagatctggatccgcaccgcgtcaggggtcgcagaccagccctgtgggaggggctggggtcagcgcagcccacccatccctgtgctcccctcacccgccccaagtccagg

SEQ ID NO: 41624 - DNA, 883 bp, Artificial sequence
  DNA replication origin
ggacctgcaccgaacggggcgggagcggggacgggaggtgggtggggcctaggcctggccgggggcggggcgcggaggtgggtggggcccaggcctggccgggggcggggcgcggaggtgggtggggcctaggcctggccgggggcggggcgcggggggtgggcggggcgcggggtgggcggggcctaaggctgaccggggcccggggcgcggaggtgggcggggcctaaggctgaccggggcccggggcgcgggcgctcactcgcacaggggcgccggcgtcctcgcaggtgaaccgcttgaggcagagccgcaggtagtagtcggggctcccggaggccctgggcacttgcaccagaatcgccttgcgcctccggtccacccagtagctgagcttccccgctgcaggaggcggcaagtcggggccgcgctgggaccagcggtcaccgacgcggggctctgtctgtcccgagagccccgacgtggtggctcctgctgggttcagacgtttgggagtcgcccgcccgagggcccctcaggatttcccaaatggggcagaagaccccggggagaggaagcctgtcgcagcgtctgagggtcttcgcaggggcgtcgaaggagggaactcaccgaggcagtcgggcacgctcctccccacgtcctcctctccgcagtctgcaaaccgcagaggcaatggcggggtgcgggctgccctgccctcaggggccatcctcctccacccgccccccatccacgcgctgtgcctctgtcatgcgacctcgaattaagccagaggtcttgcggggatctgtccagtgtgagggccaggcccctgccctgggcaagtcccaccccaagccaggccctggaggctgaacggtag

SEQ ID NO: 41625 - DNA, 929 bp, Artificial sequence
  DNA replication origin
acgaggtgcctctggtccagctggaccccgcagaaatgagggatggtcctcagggtgacatagaggtgctgggccacgctcaccgcaaagcagccaaagtgcacttggagctgagcaggtgcaggtgtgagctgcgtggactcagaggcactgcccaccccacccggccagctccacttgcatggctggagcttagagccagggatggcgcccaggaggagtggcgcccagtcttcgggacttgggtggcagagccctgccttggcctcacctgctgccccccctgctgccggtgggaggccctggccacccacacgctctgacactgcgtctcctgggtgtccaggctcatggcacaggcctccaggccccgcaggcgctctgggtggaggaaggacccggcagggtgcatcagagcagggccgcccctggctccggacggggccgtgggaccctgttcctctgccttctctctgtgaagtgcggttagcagcccccctccctcaccaggccgcccaaggtttgatgggaataaaaggcacctgggcccactgctggacctgcgggtgttaactcccaccctcgaggccacctctcaccatgcagggtgatggaggcgcgtacacgcaggagcatcgcgcagccgtcagaggggacacactgcatggcagtggaggacgtcagggcctccaggactgacctggacatggacacggggcgtggccggcagaagctgttaaaaatgttccctggggagggagaaggagcgtgaggcctcgagttccctggtgctcggaaaggctttgtgggtggttctgggaagggggagagagccctggggctgcagtctttgccagggggtctttactatcttgccccaggccaactggagagcaagtcccctggcatgtggtgagcccccaccccga

SEQ ID NO: 41626 - DNA, 1241 bp, Artificial sequence
  DNA replication origin
catggcagtggaggacgtcagggcctccaggactgacctggacatggacacggggcgtggccggcagaagctgttaaaaatgttccctggggagggagaaggagcgtgaggcctcgagttccctggtgctcggaaaggctttgtgggtggttctgggaagggggagagagccctggggctgcagtctttgccagggggtctttactatcttgccccaggccaactggagagcaagtcccctggcatgtggtgagcccccaccccgagacacactccaaaatgtctgtgggaccccaggagtgggcctgggtcaggggggcaggctgcacaccagtctgcatcagagcagtggaagctgctgccccacctggccagcaagggggcaggaagcccaccacgacttgctggcaagctctgtcgactctgctcaaagacgaacagcagaaaaggccaacacgggcttgctgggacacctgggaggcgaccccaaggttgctgcagcccaggcctctgtccacagggaagcggccgcatcctcacagggaggacttgcccccagggccttctgctctgagaccaaacgccattctgagcagcctcaccagacgtgggcagtgtggagctgggtatcattttgggcactgggggctttgctcagccaggtttgcaggtgggactcagagcagaacttcacgtgagccacagagcctggcaacccagctgttccacaggaggactgccaccctctttatagaaggcatggccaccgaggcgtgggacccacatgctgttggtgagacagtgcggctgctgctcagcggagcccacactgaacacagcaccctgctgaggcaggagagtaaggaatgagggtaactgggggtgaagggagaagcaaaagaacagcaggtgcagccagttccaggcaagattaggcagcacaggccacagcctccctcctgtgataatgagacttcacttcagcctctgattggttgcaggccgatcctccacagggtgtaacccactggaaacctccaaagggcagctaggagtgttaccaaattcttttagctttatgaaaaccctgcggagcactgcatttggggccttggctgcttgcttcggcctgctcccgctctgtggagtgctccttcgcttcagtaaatctgtgccctccttactccattattttttgttgctttacttgtgtgttttgttcaacacagcaagaacctaga

SEQ ID NO: 41627 - DNA, 968 bp, Artificial sequence
  DNA replication origin
cactcgggccacggggccagccctgggtgggcttcagagtccaggaagtcaggagagagagcagacgcccttcgcctctccagcccaccccggcctccgagcccccagcggggattctttctctcctgaaggtggatgcggggagtccaggccacagtgggcgcccagaggggcttcagggcacctggcgggagggaggcccggggacccacgccactgcccccctgcagttccacacaggcggcctcactgggcctccccacgctgcctccgccgctccctctgtgcccgggctggtctgggctgccctcgcctgcccacctgaggcctgctcggatcccgttccccagaggctgccccgggtgagcccggccccttttgcctgggcggagccctcagcagcctggggtcagctccgccggcccctcgtttgaggccctgctccccaccaggggccgaggccggggcttccatcaggacgctgggtccagcctgtatactccgcccacgggcggcgggtttcgtggccatggcaggcggaggagggtcactcacggcagtctctggggagttattggggtggtcggcaaatgggtagagacggtggggtgagaacgaagactcagaggccatctgcagggtggggtcctgcgctggaccctggaacagaaaacagttcactagtagcacgtgattccacaccagactgagggtcactgactgccgccgattccacaccagactgagggtcactgactgccgccgattccacaccagactgagggtcactgactgccgccacccatgtggctccccaggttttgcagatgcacgggaaactgttgagatgaggggatcctgggtaaactctctgtaaatctaaacatattccaaaataaaaaatatttagaaggaggtgtagccaccggtaatgcccgctccacaattcaaggaacagaagtgggccc

SEQ ID NO: 41628 - DNA, 2245 bp, Artificial sequence
  DNA replication origin
ccccagagttcccagcctcggggggtgccctccggagtgggggggggctcatagggaggaccacacaggggaggtggccttttgcatcttgaggggaggtggaggccagggacttgggtggaatctcaggtcttaggagagggctccccttaggggctggggctgaagccaggggctctggggtatgagtgcccaggacagattccacccctctgccagcccagccagctttccagggcccttgtctaccctcctggcctcatgcatgcctgagggaggtgcacgccggcggcagcctatcccgccggcctggagccatctctgcaccagtggccgccctgtggggaaccccattagggtgtcctcggaccccaaaggccccaaggtttctggatgcttcctttggaaacctagaaactccacaagtgtctggccacagtcttctggccccaggcggtggaaagtctcccgggctgctgtctgtgaagcgagccctgttttgccgggagggggagtgtctcgctcgctccagctgtgaagagcagcctccaccctctgtttgtctttggggctggagctgcagggtcagcctggagccgctgccacagggcatcctgcaaacttgccccactcacatccacgcttaccagtgggagctctcactgcacagccagatgctggctgggcaagcactcgcgttcttgggcctgacctggggcactttccagagcctggccatcccccggattacagaatgtggcctctcctgttctcaggtaagctcctgcctcctcctaggcccctacactgtggcagataaggccctggtttctcctcaggtgggtctggcctgacgctctcagcacatcagcaggtgaggggttgcagggccctggggggtccgagggcagcgctggtgaaagaaggatgggagacctggcctgaccctgccgagctgctccgggaagtgtttgctggaagctcaaggcagggtgagcccacctcggacccacctgtgacctccaaggaggctgtgttagaatctagggcagcccgcaagcccatccggggctcccaccccaccccgctcggctgctctgagccatcgggagcccgcaacacctgggcttgtgtagacacctgccaaggaaacactcggagaacgtgctgagaatgagatgttggcagtggaggtggctgggttggggtggagggctctcactgcacagcccactcactcagccttacaggagagggcgcttcatcagcacctgcagcaggaagtgtacccagcatcccaggaaggggccccggtgcccaaggctggccgggcacagtggggacacaggcatggaaagggcacagaaggtgtcccggaaagggaggactcactgaggacctgctgggtgcaccgttcctggcatggggacagcagttagcaagatgtgcctttagggtggtggcctggtcacctcaggggacacttgcggggacatccagcagctccacagggcctgagacgggtccagcagagggctcagctcagggaggggagcagcaagggctggagtgctgggtgccatgggcaggctcagatccacagggcattcgtggaacaaggaagaaagcaggctgggatgcgtgggaaccggtggcagcaggggagatgggcgggttcaggtgggaggggtgtccaccggatgccaccctgcagtggagatggaaaacagggagggggcaggcctggggatcctggctaggagggggaaggagaagcgagagatgagacctcagaatcgacttttgcctctgggaggaaatggtccctgagttgggagacatggggggaggcggccttgaagtgcaagctggaaagctttgctgaggcggctgcggggtatgcaggcagcctcccggtccgaggtgtgaccgcgctgtccacgctaggacggccaggtgatcctggggaatgggtggggaccaagattgaaccctcagtactccaaggaaaggggcaggggcaagggcaggggctgaggcgggtggaagaggccaggaaggaggggaagtgctggaggggagaggagaggaggggtttggcggggctgagggagggtctcatggaagatggggtggggagggttgagcaggaggggtcaaggggtgacaagaggagcgggaagctggaggtgggtgtaggggcgctgcctgggcagccttggacagggcggtggttgcgaggggg

SEQ ID NO: 41629 - DNA, 1738 bp, Artificial sequence
  DNA replication origin
gccacgcgcgtctccgtggaaacctgcgcggagctgaggccgagaacacagcgctgttgtggtgaacccgcgtcctcgccgtggttttcttgggaacctcgtgcccagcacccccgcacccgctccggaccctccgagccgctctggggaaggctccagcccgggtcccgggcggacgctggttcgttccttcccgcgttcgtccgacgagtctcggcgccgcccagggtctccgcaccccgtttcctcccatctggtgcccagcgcgggcgcggagggagcccccggggttggaccctcagatcccttcaccgttgggcttctgggcgaccgatggtcactgggctgtgtggccgtgctgccctggagacccagacttggaaagaccccacccccaccccaggcctcgcccagctgcggtgggtgatctcggtggccggggcccgcccaggagcccgtggcctggctcttcatggatactgagcagggccaatcccccagccctcagagacagggctggagccctctgacctcaggctggagagggtggccgggggcctggggcagagggcagaggccggccccactgtccttccctgggccttggaaccagcaccagccacaccccgtgggccgtccctacacgagatcaccgactactggccacctgcagcccctgcctgcgtcacggcacgctgggatggcgccttcaggcaacgggtgtgtcgtggtgggggcctgtcccagagaggcctggagagaggtttgggtgtgagtgggcccatgggggagggacatttgtcctttcccaatgatcctgctggccgtgcccatggacatcgtctgggacacccctgccacagtacagcagcccccatcgtcccctggtataaggagggctggaggccaggctgaggggcgaggcccagctggagtatctgtcttacagctcagccagcctgggataggggatgacagtggcccgtcctgagccacccccaaatgtgcctgcctgctgctgaccatgccgtggcatggaggctggcactagccactctctccagggcattgtggccacaggcacgctgctgcagggggcgggctcagccccatctactctgcccagcagtgagtgcataagttccagcccatggagggctctaggccaggcgggggcagggtcgaggtgctggcccaggaggcagggaggtgggcagtgcggggtggtgggagggagggaggacttcacggtcacagcagcccctgccgccttccctcccctgggaccgaaccccagagcttgtttctcaagctccctcctgactacccgagcccacagtgtgaggcccacagcctctcccagcctgggggtggtgccgccctccacacttggggtgtcctgtgggtattccaggcagaacaccccagctagacactcccaggctccccagctattaactcccgccatcccccccccacacacacacagacacacacacacacacacacacacacacacacacacacacacacacacacgtggggcagtgccctcccagaacctgaggcaggtgcagaagcctctgtgcctgtccaggaagggaggagccaggaggacccaagaactgcaccctggttctctccaaccccctgccctggctggaggcaaatgggaagcagtaagcttctgcccagaaactttcctatgcatttgatgctccaaataagaagatgacac

SEQ ID NO: 41630 - DNA, 1491 bp, Artificial sequence
  DNA replication origin
ctggcctgggcaacctgaagtttgactcaccagccccagtacatgggggacggggcttggcacaggctcaccccactgagaagggctggccagggacccgggacagccccagggcaaggacagcggttggaggccagtgagagccaggccaaggccccagcctctcggatgaaagggacacatggtggtcacacctgccagccttgcctatcctgtgacgctccgaggaactgcgtgaaagttctcaaaacgcagcagctcccatgcagggggtggccttgctgagtggccagccctgcggtggacggcagctacctgctctcacccatcacggctgccacctttgagtccatgcaggagagggcacggtctgcagccgcctgccacaccacgggcaccacgtggccgcctgccagaccacgggcaccacgtgggatggtgggcctggggtgtgcttcctccggcagctcctggcatcagaactgcccatgggccctggtgaggtctgaccacaggttgtgggtagcaggtcttctagctccaccaggagccccagcccaggcccacttcgaaggtgccagtgtgtccagatggcctgcactgggtgcagcctcttgtggggactcggtggctcctggagcacccccagtcttaacactcccacctccctcctgacccctccagctgctgacccatcctgggactctgtggctggcccagcatgctgctggccctcgcctgcaggcaccgtcctgaacccaccacccacttggtcctggcccagtggggatgggtcctcagcaccaggcatctgaacctgagcccaggcacagcagggcaggacgagttggggtgggggctgctcttctccaaatctcctggccggttgggtccttctaggcaggactcacctggaggagggctgagagaggctgacaagctagaggcagagctggactgcccctctggggtggggggccaggtggaggggcgttagggagggtgaggggggtggggaaggggacctcccatccgcagagccttcatcccagagggacgacaccctacccccgcccccctgcgtttgagtggaggtcttggttttccgaaagctgggggaagcaggtgggctccatgcaggagcgagttgggagccacctggggctggtcttgcaggtgataagggtgaccctggggggcctgcctgggggcgtggccttgaggggcgcgggcgtcgcctgttggtgggtgtggattgagggacgggtgggtgcggtccggggacctggggtcgaggtcaaggggcgctaggcacagtcagggggcctggggcgcggtcgggggtgggctggggtaggagaggacaggggcgaggtttcagggatctgtgggctcagggtctgtggacgcagtccagggttcccggggggtgtgggaaggtcagtgggctggaggagcggtggcggggggcggggtgggcggggcccgggg

SEQ ID NO: 41631 - DNA, 1081 bp, Artificial sequence
  DNA replication origin
acagaaggagccccagggtggggtagggatgtggggtgaagaggggactccctggttttcctagccgccagggctgtaggttcccaagcagccacagcccagcccagaagtgcaggcaccaccctgctggggcacccaccgcccacggcaaactccgagccccaggctgagtcactcttcctggggggctgggtggggagagcccccagtgcctatgcaaagcagtccttggcttccgggaacctcggaagggctgggccagcttggcccataggacaggccagggcccacgtggcacaagcagggcatgagcagcaggaagaacgaggtgggaacagctcccactccccagggctctcatcccagcggagagacgcacggaggccgggcacaggactgggaggtcaaatctgccagggtggcccagcgcagcaggccaggtagcactgcggggcagggccttgtcccccaggcacccagggcctgatgggacccaccggggtgcccagaaagtgtgtgtccagtaagtcggggcagaggctgggcccaccctaagtgaaggaggaggggacgtggtgtctgcggctctccgtgtgtctgtgcgtgattaatggagcatgcatgagctaaccgagcagctggtgtggggcctggaccctgctgagggaggggaggcccaaggcctgggccccaaccctgtatggaggccagggctggggtgagactcattgtggggtgtcagcaggctccggggagccactaaagcccatggggtgcactcagtacctgggagtctgggacccagaccagcccttccagggaaaaccaccaaataagggcataagataggaaaagcatcacaaaaacaagcaaaagcagcaggcaagacggtaaaggaggaccaggtccaggccagggaaggtgagtgagcccaaggagagggcgctctgaaaggtgcccggccccgaagctcctccctctgagactttgccaccagggccacctggagctctgggtcccaaggccctggagtgtggggacagaagacaccccatgcccccaacaatatgcagccccaaac

SEQ ID NO: 41632 - DNA, 848 bp, Artificial sequence
  DNA replication origin
caggacggtgtgatggggtctttacgagggtgtgtgggggtcttcaggacggtgtgatgggggtctttacgagggtatgtggggtctttaggatggtgtgatgggggtctttacgagggtatgtgggggtctttaggacagcgtgatgggggtctttacgagggtgtgtggggtcttcaggacggtgtgatggggtctttacgagggtatgtgggggtctttaggacggtgtgatggggtctttacgagggtgtgtggggtcttcaggatggtgtgatggggtctttacgagtgtgtgtgggggtctttaggatggtgtgatggggtctttacgagggtatgtgggggtcttcaggacggtgtgatgggggtctttacgagggcatggtgggggtctttatgacggcacgcaggtgttgccgcctccctgattcccactgcgattcaggggctgggacccactcacggagatgcctcttgccccacgggaggcgaagttcctcctgcagcaatcccgcggctatggcccgcagggcacattcccaggtgtggggatcactcaggaaggccagtgacgtggcctcccagacaccaatgactccccagtccccacgtggtctgcctgccacagggcagtgttgccgtaagcaatgttgccgaccaaaggagtttatgttcccctttaccaggtcaccagcgggaggcagctggaggcttagcccagtgccaaattaccatgctgaagaggaaagatctcctctgcctttgatcctcacacaccagccatgccaccagggttctccctccagaccctcctgcccggtgctgccagttcactgggcggattg

SEQ ID NO: 41633 - DNA, 1494 bp, Artificial sequence
  DNA replication origin
tgagccaccacgcccggcccccatcgggctcttccgagcctcggccacacgttcagacttcaggggctgccacaggctgctcttggcctcagagtcgcggagaaggacgtggggcaggggcgcggctgaccagcagggcagcatcagccgttcctcccgcgtgggggtcttcaggacggcgcggtggggggtcctcgcgagggcgtggtgggggtctttaggcagcatgacgagagggtcttgttttttttgtttttttgagacagagtcttgctctgttgctgaggctgaagtgccgtggcgcgatctcggctcactgcagcctccgcctcccgggttcgcgccattctcctgcctcagcctcccgagtagctgggaccacaggcgcccgccaccgcgcccggctaatttttagtagagatggggtttcaccgtgttagtcaggatggtctccacctcctgacctcgtgatccgccgcctcagcctcccaaggtgctgggattacaggcgtgagccaccgcgcccggcaatagggggggtctttaggacggtgtgatggggtctttacgagtgtgtgtggggtcttcaggatggtgtgatggggtctttacgagggtgtgtgggggtctttaggacggtgtgatggggtctttacgagggtgtgtggggtcttcaggatggtgtgatggggtctttacgagggtgtgtggggtcttcaggatggtgtgatggggtctttacgagggtgtgtggggtcttcaggacggtgtgatggggtctttacgagggtgtgtggggtcttcaggacggtgtgatggggtctttacgagggtgtgtggggtcttcaggacggtgtgatggggtctttacgagggtgtgtggggtcttcaggatggtgtgatggggtctttacgagtgtgtgtggggtcttcaggacggtgtgatggggtctttacgagggtgtgtggggtcttcaggatggtgtgatggggtctttacgagtgtgtgtgggggtcttcaggacggtgtgatggggtctttacgagggtgtgtgggggtcttcaggacggtgtgatgggggtctttacgagggtatgtggggtctttaggatggtgtgatgggggtctttacgagggtatgtgggggtctttaggacagcgtgatgggggtctttacgagggtgtgtggggtcttcaggacggtgtgatggggtctttacgagggtatgtgggggtctttaggacggtgtgatggggtctttacgagggtgtgtggggtcttcaggatggtgtgatggggtctttacgagtgtgtgtgggggtctttaggatggtgtgatggggtctttacgagggtatgtgggggtcttcaggacggtgtgatgggggtctttacgagggcatggtgggggtctttatgacggcacgcaggtgttgccgcctccctgattcccactgcgattcaggggctgggacccactcacggagatgcc

SEQ ID NO: 41634 - DNA, 1189 bp, Artificial sequence
  DNA replication origin
tcccaccggctggagggggtgttctggggccctgggggaccgtatatctggggagggggagggatccgccctaggggtgctgtgtggtgccccatagccaggcaagtctgaggtggacggcccgtcctcgccttgtgagcgaggcagagctgagctgagctgcccctcctgcctaacacgccactgtctctggagatcgggctgtgcgtgaacatgcggagcctgccctggtacgtcccggccaaccccgactccttcttcccacgctgctacagcctctgcaccgagagtgagcagcaggagttcctgggtaagtgaggagacggcagagggccccagtgctgtcagcagagaggcttctagaaagatccccctggtgctgagacagactgatggggcagggtctgaggatagaggaccggggagaggcctcccatggtcatggtcatggcagtacagaggccaggggccccgggagggagggcgggcagtcaaggagtgtgtggttctgtgctaggcttgtggacagcgcggcgagcagctggggcaaggccggctccgtggtcggaggccgaggggtgcagctggacggccgcagtcacagagacactgcagggagaagggcaggcagactgggggtgtgggagcaggcctgggccccatcggctatgagggcgggaagtggggcgggttggggagcctccgtggccctggccccatctccagtccccagtcctggctcggacagatagggcgaggctgtgctgtcctttcagaagacttccggcgcaccatggcatccagcatcctcaagtgggtggtcagccaccagagctgcagcaggagcagcagaagcaagcccagggaccagagggaggaggccgggagcagcgacctgagcagcaggcaaggtgcgctgggccggggcagggcagtgccaggccaccagagctcggggcctccacaggggccctcccgcctcctgggtgtggtcagtcctgagggttgcagcagccggggctggatacagcgatgcctcagactctctcgattctcatggcagacgggttttctgttctaaccgtggggctaaacgtcaaagtcaccccgtttgtaaagcacctggcagttaacgcagccctgggacgtccgagtcccacactcactgccacagtcctgtgccgcggac

SEQ ID NO: 41635 - DNA, 1664 bp, Artificial sequence
  DNA replication origin
acccagtcatttgactcctagggagcatttacccacgcaacgaagacgagtctgaagagggcaagggcaggaaggaagagagaggcgagtgcagggcctccacgacccgccaggagagccctccacacccacacgtttaatttcccagtttcccaggaagctggccagtgggatcggggtacaggaggcaggagccagcgccccccaacacccctggggtcctccgcctggaccgtccaagagaaggcgcctggttctgcagctcagtgaagtgcctgcccccagagtccctgatttcctggcagcaggctgcagccagcactgcctctgagcccgggccactctgggcgagtggctggcacacaggcaatacacgatacccactattttcttctctcccgtctccatctgaagaagaagccaacgatagccccttcctctctggttccatactggcctccgacagcttgccctttgctcctctgacccctagaggagagggtgtggtggttacaggaaactgggagggtgtggggggctctggggatggagagggttctgaggcccaagctgagggtcaggtctggggttggggatcagctctggggttgggatcaggtctgggttgggggatgaggtctggagttgggaggtcaggtctgagttggggtcaggtctggggatgggagtcaggtctggggttgggggtcaggtctggattaggggtcagctctggggttggggatcaggtctgggttgagggatcagttctaggttggggtcaggtctgggcttgggggtcaggtctgggtttgggggtcaggactgggtttggtgtcaggtctgggttgtgagtcaggtctgggttgtgagtcaggtctgggttgggggatcaggtctgggttggggtcaggtctgggttgggcgggaggtctgggttgggggtcaggtctgggttgggggtcaggtctgggttgggggatcaggtctggattgtgggtcaggtctgggttggggtcaggtctgggttggggggtcaggtctgggttgagcgggaggtctgggttgggggtcaggtctgggttggggtcaggtctgggttgagggtcaggtttgggttgagcgggaggtctgggttgggggtcaggtctgggttggggtcaggtctgggttgggagatcaggtctgggtttttggggtcaggtctgggtcggggtcaggtctgggttgggggtcaggtctgggttgtgggcatcaggtctcaattggggatcaggtctaggtcgagggggaggtctgggttgggggtgcaggtctaggttaatgaggagaggtatggggttctgaaggcagaggggagtggacagctgtggagttcccagaagatgggggaaggtggggagaacagctctgggctttcgagggcgggcgagtgggtagagttgggcaggtttagtgggggagttctgtggttccgagctaggcgggtctgggattcctagggtaaggggtctagaatttggaggcccggggcggggagggggtaggcctgggtttccgggtgtgggaggcgggtctggggttccgaaggcagatggggaggaggggtcctgtccgggatcggaagcgcggacgggcctggggttccgcggtcgggggtcgtg

SEQ ID NO: 41636 - DNA, 1065 bp, Artificial sequence
  DNA replication origin
agccagcactgtccacggggcctggcagtggctcggtcacttttattcctgtatgttgaacacaagctgatggaatttaaagcagaattgacctcattaattgagctagaatgattatcatcaggttgttgaaatagcaatgcgtttgggttactggggctccgactcgagccctggcacctgctctttgtgaaggccgtgggcacgagggagctttggtctcctgggctggagggcggctgggccactctgctcacacctccttccgcctgcagccatcctacgatgtgctgctgctgctgctgctgctagtgctcctgctgcaggccggcctcaacacgggcaccgccatccagtgcgtgcgcttcaaggtcagtgcaaggctgcagggtgcatcctgggacacccagaacggcccgcaggagcgcctggctggggaggtgagtggcctgcagggggagggggcactggggaggtgagtggcccacgggggtgcccagccagggaggtgagaagcctgtggggtggggggaagctggggaggtgagtggcccacaggggtgcccagccggggaggtgagtggcctgcagggggagggggtgctggggaggtgagtagcccacaggggtgcccagccggggaggtgagtggcctgcggtgcaggtgctggggaggtgagtggcccatggggggcccagccagggaggtgagaagcctgtggggtgggggcactggggaggtgagtggcccacaggggtgctcagccagggaggtgagaggcctgtgggtttcaggggtgctggggaggtgagtggcccacaggagcacccgctggggaggtgagaggcctgcggtgggggctcctgtcctggtgagggcctccgagggccacacgacgtggccctcgaagattcattgtgccactttgtatttttaaaaacaccccagaaaaaccccgaagaagtaaaatgtctttcttttcttttttttttttttttttgagaaggagtctcagtctgtcacccagactggagtgcagtggcgcgatcacggctcaccacaac

SEQ ID NO: 41637 - DNA, 895 bp, Artificial sequence
  DNA replication origin
agacaggcgtctgcctcggagctggggacagaggcggctcccgggtggtggtggccatctccgggctctgccctcctccacctggtgccctggacttggtcgcagcccctcccccgcccaggccagatcccctctgccccagacctcgcttcctctgccaggaccctgggtcccagtgacctttgatactgactcccctcagactcaccccgggggtgctgtgcgtgagagagagccccctccccaccgcacccctgcagtgctgtgcgtgagagagagcaccctccctgcctcctgctagggtcttccctgctcaggagcccctgggcctggagcccctgcctggagggatcttcttccagatctggaaattaggttctgcagacggagggggatgggcagttgttttccagtctcgtgtctggacctgggtgtgggatctggaagactgcacgcacaacatgttggggcaggagtattttgtggggagaggtgccattccttgctctaaatattggcagatcccctttcttctctcctccagataacagcgtggggggtccatgctccgacatggctgggggaggctggtccatgtcctgggctgcggcggggctgcgtctgtcctacaggaggagtccaggatgggcgggtcccaggtgcgggtgtggttgatgctgggggacgtgggtgagtcaccaatacacagacagtgaagcagaagttgaagggtcagggtccagcctggggacggggcgcgttgtaacctgggattctgtcgctgtcttgcagagctgcctcctggtgacctcggggttttcgctgtacctggggaacgtgttcccggctgagatggattacttgcgctgtgctgcaggctctgtaagcagcttcc

SEQ ID NO: 41638 - DNA, 1218 bp, Artificial sequence
  DNA replication origin
gctcgaagctccgcccacccacgcgaggccccgcccgcccgctcgaagccccgcccacccggcggtcacaccgccttgcgcgctcggcatgacgtcactcccaccaggcacctcgccttgtcaggagctgccaggcgccaaccgccgacctctgaccgctacgggtcccggctcgcgcaacgaccccaaggcgcatgcccaggcgcggcgaccccattggtggcgggcggcgggagcggcgcgggcgcgtgcgggcggcggcagcggcggtgacggcagcctaggccgggcgagggccatgctgagcctcgcagccaagctggtggccttcttctggaggacggcggacacccctagggaggaagccgggcagctggagcccgagctcgcggaaggtggctcgcgggaggcggctgggaggcgggtcccgggccctcgcgtgtcggccacgagggagccgcgcccataggtctttgagtgcagtgcgggccggcaggcaacgctgggcccggcctttcctcatctccgctggcggggatccccgttcgcctcaggaggcttccgaccccacagcatcccgccgctctgggcgcccgtcctctgtgaggtctctccggtgacaccagcccctcttcccgccctcactttgtgtgtttacgccgagcagctgccaagtcgtctctccatgtcgttcctccctgtccgcagcgtcattggcggtggtgtgtctagaaagccccgaaaaacgcggccccgcagacttggcctgtcctttcagaacgcgctgcgccaaggcgtgccatttccttgtctggttttcaagcccatctttctaaagcccgggatgcgcccggatgccctcaccgttcctttctcctgaggtgtttgtgtgtgtgtgtgtgtgagacggagtttcgctcttgttgcccaggctggagtgcagtggcgcaatctcggctcaccgcaacctccgccttctgggttcaagtgattctcctgcctcagcctcccgagcagcggggattataggcacccgccaccacgcccggctaatttttgtatttttagtcgagggggggttcgccatgttggtcaggctggtctcgaactcctgatctcaggtgacccacccaccttggcctcccaaagtgctgggattacaggcttgagccaccacgcccgacctctcccgaggttctgatggcttctcccgatgtt

SEQ ID NO: 41639 - DNA, 1879 bp, Artificial sequence
  DNA replication origin
gcttgcagtgagccgagatcgcgccactgcactccagcctgggcaacagagcaagactctgtctcaaaaaaataataataatagtaacaattttaaaaagctgggcatggtggcgtgcatctataatgccagctacttggggggtcaaggtggggggattgcttgagcccaggagttcagggttacagtgagctctgaccagtgatgcagtgctcagggtttgaagagagcgtgcacacaaaccgctagagataaactcaaagcacctggaagctacacccgcccccccttccccccgagaatggcagatactagaaggtggatagggctgagagctggaaagaagacagggatggtgagagcatggactggccgagcacttctggaaagcatggagaggcacccatgcgaaagcagaaagtgcatctggaaaacaaaggcagccacccagcagccacactcgggtcgctcggaggggctggaactcactgcactgggttatctgggagtgactgagttgtcggggagggggggtgacttggttatgtgaggggtggctgggttctctggggtgatggttatctgggggtgactgggttatacgggatgggttatctgaggggtgcctcggttatctaggagatgactggtttatctggttacctgaagggtgacttggttatttggggatgatgattttatctgggatgactgagttatctgggggtgactgagttatcgggtgaataggttatgtgagaggtgactgggttatttggggtgactggtttatctggcagtgactgggttatctggggtgaataggttatgtgaggggtgcccgggttatttggggtgattggtttatctggcagtgactgggttatctggggtgaataggttatgtgaggggtgcccgggttatttggggtgattgtttatctggcagtgactgggttatctggggtgaaaggttatgtgagaggtgactgggttatttgggaggtgactggtttatctggcagtgactgggttatctgggttgaataggttatgtgagaggtgactgggttatttgggaggtgactggtttatctggcagtgactgggttatctggggtgaataggttatgtgagaggtgactgggttatttgggaggtgactggtttatctggcagtgactgagttatcgggtgaataggttatgtgagaggtgaccgggttatttgggaggtgactggtttatctggcagtgactgggttatctggggtgaatagattatgtgaggggtgcccgggttatttggggtgattggtttatctggcagtgactgggttatctggggtgaataggttatgtgaggggtgcccgggttatttgggaggtgactggtttatctggcagtgactgggttatctggggtgaatagattatgtgaggggtgcctgggttatttggggtgattggtttatctggcagtgactgggttatctggggtgaataggttatgtgagaggtgactgggttatttgggaggtgactggtttatctggcagtgactgggttatctggtaggggtgactgttatcggggggtgagttggtttatctggggtgcctgggttgtcagggtgactgggttatctgccagggctgatttatctggaggtgcctgggttatttggggtgactgggtttatctggggtgactgggtggttgggtgctgggattggatgtagctgaactgcctgcctcaggatgaagtttgctggaagtcaggggctggcatccctcagaaaacatgcaaggatctttaaaaacgcagacggcgtgaaagctcaaagcagacacatcccctacgcagcccagggaggcag

SEQ ID NO: 41640 - DNA, 2182 bp, Artificial sequence
  DNA replication origin
gcgtcccctcccgcccgcgcccccctcgccgggccccgccccgcgccccccgccccgcccgcgccccccgccgggccgcgccccccgccccccatgcaccacctcctggagcagtcggcggacatggcgaccgcgctgctggcgggagagaagctgcgggagctgatcctgccgggcgcgcaggacgacaaggcgggcgcgctggccgcgctgcttctgcagctgaagctggagctgccgttcgaccgggtggtcaccatcggcaccgtgctggtgcccatcctgctggtcaccctggtcttcaccaagaacttcgcaggtgaggccggcggccggggcgcggggcgcgggcagagggggcgtccgcaggtgtccgggagctggcgcttcccgcgtccccggcggctccgtccagccgcgcccaccgtggcctggctgcgtccgcggcgtcccaggcaccttccacagccgcccccatcctagcaggtgtcgctggtcgcacagacccctcgtctctattttattgttgttcttccttccattcgtccgcccatggccgcgggtgggactaggcctgtctggacccaggggtcccaaatgtcatgagacacggggtctggtttggagaatgtcacaagcagcgcctgaggggatgcagggtggccaggtggggaccaggaaaggccgggatgggtgttgacagcagagagctgattacaggggctggtggagctgccgggcagggttcccaggctggacttgggtggaaggagggcagagagagtctctgagaggcccaggccctccacccctcaggcagggcgaggcctctccgggtgcactgggggcctccgaaggtttgaagcaggggggctagcatggggcagggccacgtgtcagagcagggagcctggagctcctgcagggagatgggggctggaccagggcagggacccgcgctggttagatcaggacctgtgggggcacttgaagccacccaggcgaggcaggaagatggacagagcagccagcctgcctgtgagcctctgcggggtggggtcctggtgcctctgccctccccaaggagtggggcgagacaggtggagccgagaacttcctcccctggggtctgggccaaggcaagggggatcagggtctcctggcctgtgtggcccagaggtactagtctgcagcggggaggggtgttgggaccctggggccctctcttctgcagcctccaaacctcagcagaccctgcctcagcactggcgcttcccaaatctcccagatgccttgccttaaggagtccccgtggcctggagacaccaggcctgagggtggacattggccaggctgtctgatcccacccaggggtggaggaggcctctgctggtctcctcttcgacactggaggccagaccccggggattagaggacccctggggtgggcacacagcacactctgcagagcagggagcccaggcgtgcggtggggccttggggcaggcccagcatgtccagacaccacgtgtgttctctgtgtttgtagcaaccaagtaccgcaaactaggcagtttcaaacagcagacatttatctctcatggttccggaggccaaaagtccaaaatcgaggtgtcggcagggccctgctccctcccacagctctaggaaagggacattccagcctcttcagcctctggtgctgccggcaatccttgggcgccttggctcgtggccgtgccaccagtctctgcctctgtcttctcatgggcttcttccctccctgtctgtgtccaaatttcctttttttttgagacagagtcttggtatgtcgcccaggctggagtgcggtggtgcgatctgcaacctccacctctcgggctcaggtgttcttcctgcctcagccccgagcccccagtagcagggaccacaggcatcccacaccacacccagctaatttttgtgccatgttccccaggctggtctcaaactcctgggctcaagtgatcctcccatctcagcttcccaaagtgctgggactacaggcgtgagccactgtgcccttttctcttcttcaccacccccccgctttttttatttttattttttgagacaaagtctcgctctgtcacccaggctggagtgcagtggtgcgatgtcggctcactgcgacctttgcctc

SEQ ID NO: 41641 - DNA, 1701 bp, Artificial sequence
  DNA replication origin
catgttggccaggatggtctcgatctcctgacctcgtgatccgcccaccttggcctcccaaagtgctgggattacaggcgttgagccaccgtgcctgacccattttttgtatttttagtagagacggggttttgccatgttggccaggctggtctcgatctcctgatctcaggtgatccgcccgcctcggcctcccaaattgctgggattacaggcatgagccaccgcacccggcccaactttcttctttaaagcggaaaggaagcgagcgctctgcccccgagcaccctcccaggagcctatgggctggttcctctttttggcttcatcatccttggagggccgagcgcagcccctgatgccgcagggcagggttgggcctgagggcccgtgtggccagctgctgtctcaggatgcagtaccctcgaaggttgggggccaagtcccagggtctccaaggtgggctggggaagggtctcggcccccctcagcctgcagagagtggagaatgtagcaggtgcgcagccaccgccaggattagcttcctgtggctgctggaacaaacctacaagtcagaagccagatgcgagtctcatggggctaaaacgaaggtgtcagcagggctggctccaagggggaacccactttctgccttctccggcctccagaggcctccacattcctggccttgcagcccttcctgcgtcctcagagccggctgcgtggcgttctctctcccagccccacttctgtcctcacatctcctccctgactctgaccctcttagaagaaccctgcaattgctgcccaccaagacccccagcctaggcatgtctgcaaagtcctcgtgaaccgggaaacgtgacaccgccacaggctccggggttgggatgtggcatctttgggggccatgattctgctcactgcagaccccatgtggaggtctgtaaggccaggggagtcggggaagggccagggcctggcctcggctgagggcttccaggatgtggcagtggtctggggtgaccagacagggtttggccagcaggcaggaggaggctgcgcagagccaggggtgtcctggagaggtgtccccactccccaggtgggaggacaggggtggaaagggctgttgggagggacccagcttcacccttggggggcaccttggggccatgtgcaggccagatcgcaggggtgggctggagatgagcttggggatggcagaaccgaagaagggcaggactgggggagggccgggggggctgggctttagcctcgggtcctggggacggcattctgaatatgggaatatgggccgtgttggggtgtattcagacacccgctcagaggtgctccaagcagcaccaggcccctggctgccaactctgatattgtcactggggctctgagggctgggtgtggacaggctccttggctgggaagccagtgtcctctcggggcatagctggcatggccaggatccacacagcaatgtcttccaagaaacgggcccctggcggcggctctgtctgccctgttggatgggccaggccttcctgccttccgtttggacacctgcactggcccaggcagggtcccactgtccctgggaagtcccagaggagggcctcggacagaggacccgtagcagtcgctgcgtgtgggatgggcccgtggatttgggctcagcagcccctc

SEQ ID NO: 41642 - DNA, 3020 bp, Artificial sequence
  DNA replication origin
ccctcctggctccgggaggcgggcagggcggcgggcaccgcctcggccttggccttcttggtgccgaggatgtaggggtgcacgtccagggagaagtggcgcgcgtgcttcttgtcaggggcgggcggcggggcgggggcaggggcggggccggggcccgggtcgccccctccgcccttgtagtggtgggcggagcggtccagcagcggcgcgatcagcgtgtccgtggccgtcttcctgcgcgcgggcttcggcttctccgccttgctgttctccacgcgcatgatggccagcggctccttgaagggctgcggaagcgggttgctggtggggatccacttcatcttcttgcgcggccgcttgaccacgggcggctcggcggcgccgtcgggctcggcggggttggcgctggggtccacggtctgcacccccgagtcgcgcaccgtgggggtggcgtcgtggttggactgcgccagcgccgccagcagctgccggaccacgttgtcgtacatgaggtcgctctcgttggtgatgaagtccagccggttgagcgacttgatgtggtcgcggttctcgttgcagaacatggccaggatgttgatgtcgcagaactgcgagcggcgccactgccggcgcgtcttgatgcccaccttgtgcagcttgtcgaagatgaagttgctcttgcggaagatgaagaggtggatgaggttgacgaggatgatgaggttcatgacgcacagcagcacgatgtccacgcccgcgatgatgcgctgcagttgcacggacgggagcttgcagctcacgcgcaccgcgggccccgcacctgccgccccgtccggggacgcgcccagcgcgcaggtgaactcgttctgcttctgcgtggcgtagtaggtgcacaggtaggagatgggcacggcgctcagcagcaggatcagcacgtgccgcgccaggtacagcttggccaggaagttgctgcggccgcggcgctccaggtacttctcgaacaggttctgctccgggctcttctccttctccgcgttctcgatgatctcgcgcttctcgcgctccgtgatgcccgggcccttggactggatctgcttctcgatcttgggcgcgcggccctcggccgcccggtggtaacagttgtcgatctcctgcagcaggaagttgagctcggaggtgaggcgcgtggaggccaggaactcccagcccagcgcgggcacgtacatgatggcggcgaaggccagcagcgcgtagggcaggaacttgtgctcaaacagcgacggccacaggctggcgtccacgccgggcagcgcgtcccgcagctccgtccagcagtagccgcgggcgtacagcgcctggtcgcgcgtgaagttgtgcggggtgtaacagtaaatgggttcctctgggggcaaagaggagacacgggctggggcggggaggcgcacgggctgggctgaagaaaccgggctggacctgaccgcgtccctgccgaacccctcccaggagcctctccagcctcctcccacacagcacctgcggttgcccagatgaaccccaccccctccccccaccacggtggtgtgggggtcccgccctgactacccccacgaggtcagctgcggggcacctgcaggtggaagccatgaccgcctgcgaaaccacctgagccatgcgcctctccaaatgtcacaaagccctgtgtgcacaaggggaaaccaaatcccagagagggccaaggcaggccaggactcccagccagggtccttcttctatccacacacagccggacccaaaccaggtcccagccacaggccgtgtacagcccgggctcccctgggaggaaggcggttggctcaggtgctgctagctggcagggtggtttccacagcaccgggaaggcagggtgggctctgcccacccttgagggtgaggggcgcctccctaagacccactgttctggggactggccagcctggggacaccagacaccaggtggggctggttggggatgtcaccagctggactgcggtatctgccgctaaaattgaaaagagggagtcccttgaactgcaggcaaatggtcgttactgaactctgtgttttccctcaagagtctgtctctgcctgcaggtgacaatgacacgaacggcagtgaaagtgttcaggacattcgcgccttggcccagtgtggggtctgagcggctgggatcttgctaacgtttcccaggaaggctcagagcctgggggcctccagccaccgtgcagtctcttcaggctgagcccttcacacagcacaggcgcggaggcccacaccagcctcagccttgtctcccagccccaaagagcagccccagggcagggcccacatcagcacaatcccctccccacagaccagaagcaacagggacaggcctgtccgtctgtgccgaggcctgaattagggacggaaagcgaggcggattagagactctgtccactctgggaagagcagcattcactgttgatgccccacaggggcccaggggctgggcacctccagccctgaacccggctcagcaacgagcccctcagaccccacacggagctcccggctgccatcatcaccactgaggcacatctaccagtccagacagcctgctcagggagggttcccatgagtcatcagatccccctgagggtcctggggactctggagggtttgggagggagcctgggaagaggcaggaaaagctgggacctgaggcccgagtcctcggtggggacatcgagctggagatgagctgggctcagagaagagcaaaccggacaaggcaaaggaatccactctcttggttgagaaaatggcatattttatttacttatgttttgtcctcacagccaatcccaggagccagagaagagcgtccaccctggggaagagaacagggacaggtttgtgtcccgtcctgagctgggcccatccctggcagccacccttgctgggcatgtgtggccaacatgggtggggagaggcccca

SEQ ID NO: 41643 - DNA, 2152 bp, Artificial sequence
  DNA replication origin
gcaagaagatgaagtggatccccaccagcaacccgcttccgcagcccttcaaggagccgctggccatcatgcgcgtggagaacagcaaggcggagaagccgaagcccgcgcgcaggaagacggccacggacacgctgatcgcgccgctgctggaccgctccgcccaccactacaagggcggagggggcgacccgggccccggccccgcccctgcccccgccccgccgcccgcccctgacaagaagcacgcgcgccacttctccctggacgtgcacccctacatcctcggcaccaagaaggccaaggccgaggcggtgcccgccgccctgcccgcctcccggagccaggaggggggcttcctgtcccaggcggaggactgtgggctaggcctggccccggcgcccatcaaaggtaggggcagggccggagagaggggacgggggactgggggtgggagaggcgcccacagccacagcggcccacgggagcctggccagggcgctagggaagggagggggcctggcttgaggccccctcaaagggggaagggaggaggccgaggtttgaaccggctccatcaaacggacttactgtcaaggtgagcctcaggccaggcagggccctggagacccccccgggaggcaggtggggaagatgcaggctggaagcgacgtgctcctggtcagcttcctagagctccgcgtgcgtggtgcagccaagttcctcgggtgaggaaattccaccgacggcactgcggctccgggacagtggggcggggggtgttcccaggccaactgctgtgtgcaggggcgtccaggcccagcgtctccagggcgcttcagagccgtgagccctgctcccccgccagcctgcactgggtgggcgctgggggcggcgcagcggaggatggtgtgagatgtctgtgctcttggctgtttgcagatgctccgctccccgagaaggaaatcccgtaccccacagagccagcccgggcagggcttccctcggggggcccgttccacgtccgctcacctcccgccgcccctgctgtggcccctctgacaccagccagcctgggcaaggcggagcccctcaccatcctgagccgaaacgccacacacccgctgctgcacatcaacacgctgtacgaggcccgggaggaggaggacgggggcccccgcctgccgcaggacgtgggggacctcatcgccatccctgccccacagcagatcctcatcgccaccttcgacgagccgagaacggtcgtgagtactgtggagttttgagggatggcaccgtccaggccgccgagagcccctctgcctgtgtcgtgtggcctggccagcctcccggtggacaccagccctgcgtggacgtggcctgtgcttcgcccgcactgcgcgcatccccaacctctgtccgcatgcctggggccttcgcccccacgtgctcgacaggggaacccgcccggacggcatcgccaggcactggctggggtggggaaaggtggcccagtggagccggtggccaggaaggctgaagcccgcttcccatgctcctgcatcaggtgcccagccgtgggtgggggccctgaggtgaagagtttatttttttagtccgtttcgtcctggccccgggctgtggcgagacagcccaactcccccagcccagctcccccagcccagagccagggaagaggaaggtggggccagtcccaccagtggggtggccacgcccatggggtcacatgctcaggggtcaccccctgcagggacctgatgccctcgggtgggagggaccgaggtccaccctcgggtcaaaggtcaacgtgcactttctccttgtcgcctgacagacattttattttactaagactgctgtaccgaacaagcatatttatcatcaggagacaggatgggtttaaagcaggatggtgtgtgtgtgaacgggcatgagcagaggtgagcgtgagcgagcgggtgtgtatgtacgagtgtgcacgtgtgtgcgtgtgcacagagggtgtggtgccagcttgagtgggagtgtgtgagtgtgagcaggcgggcgagtgcgtgagtgcacgccagcgcgtggcccatgtatgaggagtgaaggggcccaacgcaataaccacgtcccccacccgggc

SEQ ID NO: 41644 - DNA, 1214 bp, Artificial sequence
  DNA replication origin
cgggcccacctgccacctggcctgggcttcctgggagccccatcgccaggcccctcctggagcagtcctgagcgggcaggcctgggctccccaggttcccaggagtcaagaggaagggtctatccagggtgtggcccccacagccagggcctggcgtgagacacacagggacacaagctggagggtgcctcccgccctccacgttaaaacggaggtttttatactcttctgggctggcgaagcctcttgccattaaaagagctgggccaggcgccagggcgtacgcctgtcatcccagtgctttgggaggctgaggtgggaggatcgcttgaggacgggattcgaggctgcagtgagctgtgattgcacgactgcactccagcctgggcgacaccgcgagaccctgtctctaaaaaaaatttaaaatctactcagatccccaaaggaggggcaccccgtgccacccagggccacgcgggagggcactggggtcgtcgcagacacaggcagtggggggaagcatgggcagagccttcactgtggttccaccaaaggatgggcagggtggggccacaggctcgggactccagagtggacaccctggtgggtgctgggcaggggctgtccctggctgtcgggtacatagcccagggtgacaagagcagggggacagggcctaggctgtgagagcccacagaggaggcctggagggggtgtgggccctggactcaggagcttgcacaggaagttgtttgctgacaaatcggtgggccctaggagaggcagtctcaccagggccagcaaggcctcagaggtcaaagcaacaaagcagaaaataaaaggcacagttcggccgggcgcggtggctcacacctgtaatcccagcactttgggaggccaaggtgggcagatcatgaagtcaggagtttgagaccagcctggccaacatggtgacaccgtctctactaaaaatacaaaaattagctgggcgtggtggcgcgcacctgtaatcccagctactcaggaggctgaggcaggagaatcgctggaacccagaaggcggaggttgcagtgagccgagatcacaccactctactccagcagcatgggcgacagcgagactccgtctcaaaaaaaaaaaaaagaaagtagcagttcttcacgctcacctaagtcaggacacctccccagcctgcatgcccatgtgcccagca

SEQ ID NO: 41645 - DNA, 1420 bp, Artificial sequence
  DNA replication origin
acacaagaggccccgccccctcctacagcttcctggtccccaaatggccaggcctggccttagagaggcctctgtcctccttggtgaaggacactcactttgggccctagggcctctggttcacatcctctccattgattctcattgttcgctgcctttgtggtcattctgcctttccgaccatctcggccacatcctcacaggagggcagcgggtggcagtcgccccggctccacctcacccatttctcagtgctgggctggtgtggagggaagatccctggcctgggggctggaggcctgggttctcagtcttggccatctgggatgggtgcaaggtcctcctggagcccctccttctccatgagagggacggttctatccacctgccaggcctgcttatgctcagggagggggaggggcaggagggggcactatttcaaaccaacgctggcccccgggctgcagaacgaccctctgactcacctgggcaaggtggccagttggggaggggagagtgtccgagatcccagcccccggtgggcagcagacagtggagaagcagaactgccctccgatccggctggggtcccctgcagggctgcactaggctgtgaggggcgagaagcagaaaagggggagattgagtcctcagggagcgtgctggggaaactgaggcaggacctcagccgcaggccctgggccaccacccacatctcaggctgggcttgtcttctaaagttctgctcccaagcctgcttttctctgggcaggctctgtcccttctgccgtggggggcaggcggggttgccttgggaagagggtcaggtggaggtggaggacgtgcacctggggtgccagagcttttgaggccctgacgccggggggctggccatgtggatgccctgttcctggagcagccagaggagggtttctggaggtgccctggggggagtgaggaggagtcctagggagggtgggggctctcaggaacagaaacaaactgtgtgaagccatttgtgctgggagggaccgtcttggtccccggctggctttgtcctcaaggggtggaccttgaggaagggccaagtcccattcggagcagagtgacagatcccacagaagcaggcgttggggcaaggggagggagggagccctatgggggaaggcggttggggccggttcagccctgacccagtgccaagggtgagcgccaccctttcaggcctctgcccgcctgcctctaggaacgtggcacagctggcaaggacacagccagaggaacaggtctggggataaggtggtgatgttacctgggagaggtgggagccagcgtctcactgtaggacggacaccagctccccagcacgggccgcgcagagggagggccagctccagcacagggcagggtgctcacttga

SEQ ID NO: 41646 - DNA, 1597 bp, Artificial sequence
  DNA replication origin
caggttttggggccggggtagcaggtcgtgggggtcaggcccggatcaggttcaggttttggggccgggggagcaggtcgtgggggtcaggccagggtcagattcagggtttggggctggtagaccagggtcgttgggggccgggcccgggtcaggtttgggggccggggtggcaggtcgttgggggggccaggcccgggtcaggttttggagccgggggagcaggtcgtgggggtcaggcccgggtcaggtttggggcgggagcaggccccgcgcgtcccctgccaccgctgccgggagcggcgctgccgaggagcggagccccccagggctggggcggggagggtcagcggcggcctcgcgggaaggcgcgggtcggacctcgagtcccagggtcctcgcgggtcgggagggccccagccacccccgcctgccgcctgcggtggagccggccgaggtgagagtggaggaaggcggcccaggcctgcgggtctctgggggtgctgggggaggccgagcgggaggccccggacccccgttgtcccctccggccccgctgaaacctggggcttcgctcttctgtaggtgcctttgcccttcaattggagcagagcggggttcccatatgggcgaagtggacgccagatcgtcccccgctgtgcgcagcccaaacttaaaaggtctttttaactgagctatcatgaagctgccgtgtgtctttgtcaaaactcttacaagaaagatggagtgggagctgtctgggcactagcgtcccagaaacaaccaggaacttgtggaggtgctaagctccctgcggggactcccgcagcctcggtagcctccagatggaagcctcctagctttcaggtccctgaagaggccgtgcaggccgccaggctcactgcgctgtgtgtctctgctccccgcttgctgccgccgcccttgcagtgtgactggtggggatgctggccagcctcgccggaggccctgatgctgtggggtccgaggagggggcctggcagggtgggtgggtggcaggagcctgtggggccccctgcatggtggtcagtgtgggggctctgcattgactgtgaccaggtcctgggaggttgggggctgccaggtgtgctggcaaggaggcctcgggctctggctcaggtgtgtttcccgtctcccagctctgccacacctgcgtgaagcggtcccgccaaagccgggaggggtttcctgtggccaaaggtgccaggcatcagaaacaggaagcaggggaggtcaaagctctgggccacaccctggtccctccaagtttgtcatttctgcaacccccaggtctgaccagtttggaacctgggctttctgagccggtctagtgggttggttgagagatgggggtttttctggtaactgcatttggtgctagccagtttttggtctgcactaggaagctaggctgcagtctgggaggcagtttctagtggggtgaaggggataagatgggtgtcttagctctagctgctgtaacaaagcatcacagaccaggaaactttaaaaaacagcaggctgggctgggtgtggtggttcacgcctgtaatcccag

SEQ ID NO: 41647 - DNA, 1623 bp, Artificial sequence
  DNA replication origin
gctgaggccacagcaaggagggactcccgtgccgctcacactgcttgtgctcacgagccccccatgcccaggggcctgcctgtgctgcttgcagcccctccaagaggctccactgccaggcagggcccaggagcagctgctgttgggtggcaccaggcctagcagcacctacctcaggtctcggccagggcccctgctcaccacaagctccaagcccctggcagtggttggctgcctccccctcctccctgactcaacagcccaacaccggggaacgtgccaggaccctgagggacacgtacacaggttctgggggtctccagaaagcaccctgggcaccggctctgaagcctctgacggcacaacaggttccacgttggcctgcaggtggaaaggagagttcaagtcagggtccatgcaccccagaaagccagggctccgtggcaactccacggaccacgtaccctggaaagggacccgtggccgctgtgtggaccacacaccctgaaaaacgagggcccgtgaccgctccacggaccacgtacccgggaaagggacccgtggccgctctgtgtaccacacaccctgaaaagcagggcctccgtagagcctaggccccacactgtcagtacccctcctgcttggccatcactggcacggctgccatcaagctgggcagacagggccaccaggccacctcagcccagcgcccctctccctcggaggtgcctcctgcctgaccctggagaaccctgtgaagatcacctttgcagaacaacagccagggaccgaccccgagagcccacaaagcggggaagccccccgcccctgtctctgtgcagccagcccagcctccacctcacctcgtgcggtggctgctgctcctccccgtccatggctgggcggcggcttcctgcacctgtggggagcctgaggagaggcatgagaggcggggtttccacctggagccccagacctggctcaggactcactgcgtagtgccctgtcagtctagaaccatctgttgggtgggcctgggggctccttcccccatatccccaaatgcctcctgcccatcaaaggctgctgaggtccagggtcggttcaggtcaggcccgggtggggaaaggccagcaggtccccagacaccccagcataaaccaaacgcagacgggcccagggcgggttgctggtgcacaggcctcactcagaacagggccagagctgcccaaccctcactgcggcacggcgggcacacataggaaggcagccctggggtccacacatgatctcaggacacagcaacgcagctgctgacacatggcaaggaccccagggcctttgtacaaaagccacttcccctttcagtaactacagcctgggcaacaacaccggcacagagtcagtacagacggaggaatccacaaagcacacaaatcaacgtgtttggacctaagaccttctctcccactttaagagacaaacatggtgtggaaggaaccacggtagaaacccggacaggctggggcagccacacgagggggctgccccgaggcatcacagctccccacagactctcagaaaccaggagctcaggccgggggcccaggagcctgagggaag

SEQ ID NO: 41648 - DNA, 1121 bp, Artificial sequence
  DNA replication origin
tggacgccttcaacctgctcctggagatgaagctgaagcggcggcgtcagcggcccaacctgccgcgcactgtgacccagttggtggctgaggacgggagcagggtgtacgtggtggggacagcccacttcagcgacgacagcaagagggacgttgtgaaggtgagcgccgccacccgccacatcccggacacgggttggtgtaagctcctgtgtcctgcactcagggacctcccggcagggcccgtgtgcccgtgtgtgcgcaccgcaggcctcctgcttcaacactgtggtccctgggagtggcaaggtgggcttcctgcctgggagccgtgacggccttgtgcgttttcccacttaacaagtgaacaagcctcacagcttcctctctcgtcgcttagagaattgagctgtcactgcagcagcggggttagctagccctggggtgacgccaaggctggctgctcctgggatggggcccctggtgctggcgtcagctgtgctgaggggcagggagcggctgtgttctcgaggtgtgacctgtggctgttgcagaccatccgggaggtgcagcctgacgtggtggtcgtggagctctgccaatatcgtgtgtccatgctgaagatggacgagagcacgctgctgcgggaggcccaggagctcagcctggagaagctgcagcaggccgtgaggcaggtgcgcagccgcgggcaagggtcagggtcagggtcggggtcaaagccacctgtttgcctgttgcccaggttcctctcacagcccatgcccccagtcagtgtggctgtgcctggcctgccctggggattgccgggttagggacctcccctgggccaggagaaatgaaagaggctccattacccggtttcaggcaagggaggaggaaatgggtggctctccaagctgaggcaggggctggtcacccgaggactgggttgctgagcagttgctggggatgggtcaggtctcagtgcaaggttggcccccccggtaccacacccaggcccaaagtgggtggggctcagggctcctcctgtccccacttctccagccttgcagtgaccggagaggcaggactttctcattgctctttgtgttttcggtttt

SEQ ID NO: 41649 - DNA, 1925 bp, Artificial sequence
  DNA replication origin
gggtgtcttgtccagaagctggggaacggcccctgcagtgtgggaggggaggggctgccgggaggcctgagctcagacagttaaataatcctttatttgggtgggctgggggaggggtgactggcccaggagggcaggcgaggccgggcccagacccccatggggggtggcaggggcctcgggcgggctaggatgcacctggcacccagaagtgccgcgggggcactggctcctcaggggcccgagcgggcggggagcagtctcctacttgtgccgggcctcggtcaccctctgcaggcagtactgcgcggcgggcagcgacaggaccaggctcgcggtgcggcggcccatccagtacaggctgtagcccagcaggccgaagaaggcggccttcacggccaaccgagacactctgccggagacggacggcgggggcacgctgtgggagggagggggcgctgggcctggctgggggtgggctccccataccccagcccccatgcctgggtcactgccgcatgtggttggcctccagggcgctcagcctccacctgggggcttgtggggtggggcttgcagggaggggcgggcactcacgtcatgatctcctggatgttgaggtcggtgctccagttcttctcgatgccaggcacgtggcccatgcccacgacgcccacgaccacggaggggacgcacttcctgggctcggctgtggggaaggacaaggggtcagtacctgctcgggcctcagcctcacagggggtcccacgcctgcgggcggccgtcaccgtcagaggcccgaggcagctcgaggcgccgcgcggcctggcgcagcatgtaggttaggtagacgtcgcgctccgagacgatggtgcggtgcaggtctgggaactcgccaatcatctcggccatcatctgctccagtaggtccttctgcttgcagcgttccacgtcatccttgctgtggagagggatggctgcagccccgcagggatgggcaacgggctgggggggtggggctggcactgtggacaccgggcagggaccacagcacgtttgtttgggatttgtggcggaaggaaagggcagggaaggccttgagtgaggattggctgcgcttggacctgcacaggagggcctggagcctcccacagaccaccctgcaggccggccagggtcccgggggcagccctacctgatggggtctgacaggaagcacaggccccaagccagcctgaccttctgccagaaggagagcgctgcgatggccctcttgaaggtgacggggatgggtcggtcacccaggtggaacttgcagaaaggcaccttgctggcctggagcagaggctgggtgttggggagcagtgggaaccccggaccacccctgtgagccacatccctgtggccaccccctacctcaccctgtgcccacctccttgaaggcctccctgaactcgccacctggggccatgcccagctgctcggtgatgtgtgcagacaccttcagcagcagcatctgcatcagccccgacatgagcccgttctgcagagagagggagcaggcatcagctggaggggcgggtgcgggggtgcgctgggggaatggcagaactgggatggcaggcagcaccagcgcagagccctgccccagcccagtgctgtgtccttggccccctccccgacaggtgcaggaccaccctagcgtgcagagggtcagaccagagcagggagttctgtcccaacaggcacttctcaaaggtagctcccttcagaaaagaccttcacgggccgggtgcagtggcgcacgcctgtcatcccagcactttgggaggctgaggcaggcggatcacgaggtcaggagttctctctcagaccagcctggccaacatggcgaaaccccatctctactaaaaatataaaaatta

SEQ ID NO: 41650 - DNA, 1462 bp, Artificial sequence
  DNA replication origin
gggtggggggaggggtcgcggtgtctggccgggctctaattggctgcctcgtccgtctatccgcatctcccggccggagggtcggaggcgtccggggtggctgtcggcgtcacggggcgcgcgctgatgcgaacggggtgacagatgggaacgcctccgagaccgccagcgacgaccccgctcgggcagccccggatttcctcggctgcaccggcgccggcagcggggaccgaggcccgcgtccgttcgggtcgggccggggcttagccccgcgccccacgggcggccgggaccccacccggaccccgccgcggttctgggccgccggagcctcgcgccgcctctcggggaccttgtcccctggcctccggcctctcgggcccctcgcctgccgtctaggagggaaggggccttggatctgtgccccgcccatggaacagcgcccgggctcggagaggccccgcgaggccgcaggcgcagaccctcccggagggctgggcgggcaccggggtcttcggctggcttgagggacccgacccctgggggaggaatttggggtctgtgtgtccgaatgaacgcgggggttcagatgagtctgtggtgcccccgctttccatctcctccggccccggccccagaggactgtctgagaggccggtggccgcggatcctggacgcgcctccctcctgcctgtggtttccctttattccggcagcggcgcgagcccacccttcacatacaggagctacatccagaagcttctcctggggccacagcgtgggcttccgagactctgcgtgaccccagctctgcccctttggggctgcgggtgaagccctcaggaccctccgcgtgcgttgggcaggtaactggatgagggataatgtggtgaggtccccgtgcccaaccctcctctgcagcccacagcaaccgttccctcttcagcagccccctccccccggccgctctgggcgcccgttcccagcatcctccttggcaggtgttacccctccccattccccaggccctgggccctcctgatctgtctcctcgaccccctggggccccagtctggctcagtctggtccacactctggaatctggtgggactgggtatggagggtcttgagtgtcagcaggccacctgcgtcccacctggtgggtgagaagggtcccacaggtcagcatggagggacccgactctgtctcttctgctggaaaccaggcaggttccttcccccagggccccggcagggccacgagtacccgctgcactggagcacgggggaagaggcagggatccttcattacctgaaccccatgttcacacgtcacaaaacaggagtttccaaaattagaatttatttcagtttctaaggaatgaatccccgagtgtggcaggaaggacacagccggctcctgacgcacacctgatttgattcaacaccgagtcggcacaga

SEQ ID NO: 41651 - DNA, 961 bp, Artificial sequence
  DNA replication origin
caagggatgtttccatttatttatgttttctttattttcttcatgtttttcagttttcactgttcaagtctcttccttctcacagccacttcagacgttagcctcaatcttggagaactggtgaggccagggaccccaggacacgtgtggggatgtcaggcagggcctgagtaaaggtcaaaggactccttaatttttaggagaaaatatattctagcagctctcaggtctgaaagcagtgagttaatactcaagtcttcaaacataaaaagtgtcttccagcgacagattactctcataaaaaaaattgtctttttaactttaaaatatcaccaaaaatgaaaacataaagtttaagatgatcgccaaaaagaaaaacaaaaattaaaaaaaaaaaatgctcacaggacaagcaggccccaggctgagcagcatttccaccacgttccaagggtcagaaacgctccagtgggcggccggtgctgtcaactctaagcaggtcgctgggggtggggagggagagccagagccaggttgccctcagacacagaacagaacggatttggagacgggggagtgaggaagaccctcagtctgaggagcttgcttgggagatggagccccggggaagggatgctgagggaccgaggggcatttcaggtgctggagggggaggtgatgagagcacagggaggggccggatgagatgcgggtttagcatttctctgaacataaaatgtacactttcctagtcattcacaaaagcagtaaagaatatggagtaagtacattgtttagtagaaaagagcagaacagacccaagcgctgtctatacacaggaggcaggtggcgcgtgcacggctccccggtgggcctggcggcatctggacccagatcctgccttattagaccacctgtgtgcccccccacagaaatctaaacgatgcccacctcacttcgg

SEQ ID NO: 41652 - DNA, 1519 bp, Artificial sequence
  DNA replication origin
ggggttggctgggagcaccggccagcaggccctgctgagcataaaccccctccactggagaaggcgtggcccctgcccacctggacccttctggaaatgagggaagtgctaacagcagtgcccatcccacaagcattaaactcgggaggtggagactctccagcagaaagctgggcagcagagtggtcctgcccctcggcccacaaagggccttggccgagcatgggcatgcctggtgtgtgcccactggggtccatccctgccagtggggttccagggacctcggggaccgggctgcttgggcccttggactctaggtgagccgtgagagcgggctggggcaggcggagcagctgcctgcagggcagggacacggtcaggggctacctcccagacaccctggcctctccacaggcagctatccatgatgctgatgctggcgcagtcaaacccgcagctgttcgcgcttatgggcacccgggcaggcatcgccagggagctggagcgtgtggagcagcagtctcggctggagcagctgagtgcggcagagctgcagagcaggaaccagggccactgggctgactggctacaggcgtacaggtgagccctgcgtccatggtcaccgggggacggcgggtcgcgtgctggaaaaagtccagcccggctgtgactccagagcccggatgtcattccagagcccggctggacaaggacctggaaggcgctggggacgctgccgcctggcaggctgagcacgtgcgcgtgatgcacgccaacaacccgaagtacgtgctgaggaactacatcgcgcagaatgccatcgaggctgccgagcgcggggacttctcagaggcaagcacacgcctgtccctgtggtccctgggaggggggtcggccccagacccctctcaccctcctgatcctccaggtgcggcgggtgctgaaactactggagaccccttaccactgcgaggcgggggccgccacagacgccgaggccacggaagccgacggggcggacggcaggcagcgctcctacagcagtaagcccccgctctgggcagcagaactgtgcgtgacatgatcttcgtaacggcctcggcacgctccacacccctggagtctcccgaggcccccatgtgctgctgagtggccaagatgatgccaggctgccctatacactgggggattctgccctggcccatgcacacccgtctttccatgatggcagagacatccagtcaggacctgacccgtctctgtctgaggccggctcagcagtgcagcctggtccctgggggctggacccaggctcctaaataaaccagcaactccctcgagtctgtctctgtggtcattgttcccccaccctgccctgtcctcagcccccacccaggagagagagctgcagacagggtccgagaacacctttattgtgcacgtcccccgcagagcagcctcaggcgtcctggtagtagttgttgaagttgatgcgcagcagaaagtcctccaggtgggg

SEQ ID NO: 41653 - DNA, 1252 bp, Artificial sequence
  DNA replication origin
gctctgcaccccgcgggcccccagggggcccccaggcctgggagatgagctggctgcggaacttgagcacgaggctgaagatgctgtggatgacgttcatgacgggcgccgccttctccgtgagcaggcccctggggggaagcagtgctgctgggtgggctgagccgtgaccacagggacgcagccgctgcccaggcctcacctgaagacggccttgtgcaggtactctgcgtgcgcacgctggatctcctccaggtcgcccacggtggccaacctggccctgaactcgcaccaggtgacgtgcaggatctggttggcgatgtagccctggatgaccttcacgaaatgctgcatctcgtgcttgaacagctgcagctgacggaactgcacagagccggccatgtggctcagcagggctggcggagggcagaaggcagagggcagaggtgagcgcagcctccagccaggggtgcggggcgccgggctccagcggggcctcacctgtgcgcttgaggtggaagcagacgtccttgagcgcccacatcatgagcttcagctgcagcaggaaggagaagacgccgctgtacttgctcacgcagccctcggtgatgacaatgttgagaggccagtccacctgccaggaggcgtggctcagcaggcatcccacaggcaggcaggcccctgtcccatcccccgcggccagggctgctgctgaccttgtacctgagctccaggcagctcagcacatccggggcgttgggggcaaacacctcgggcaggtacttgagagcgagggagaggttggaggcgtgcggggtgtccccatgcaggctgcactgcagggccttgctcagcacagagttcagcaccagcgggttgagcagctctccgggcgtttgcccagctccaagctaggcagaaaagggaccaccgtccccaggagtcccaagcacatgcctggcactcgccggcaccccatggggctgtgccagagcagcagggggctgtgggcgtgcagccagtctctcttttcccacggcctcccctctaccactggccccaccccgtgtccggaggccaccttctcaaagagcaggtcgctgagggactgggcgaactcgccgtcctccatcagcaggaagtgccgcagtgcctcatagtgcgcctccaggtgcagctccacgaagaagtagtcgacagcggccttgttcaccaaggagatgctggcaggagggagctggagtcagggcgg

SEQ ID NO: 41654 - DNA, 825 bp, Artificial sequence
  DNA replication origin
ctccgcccaccctgagcctcctcaccattggttttctcttcaagaaacttggccggcagctcaggtgagcctcagcatggcggctgagcaggggactttgcgggagcggtgtggggcttgctgggtggtggagggtttgccctgctccctggcaaggagggcctgtgagaacagccctcagcaggcgaccggatggcccttggccggccgagttcaccaggtgcccggtgctgagcgggtgtgtctgccgtgggcccaccacagctggccccatccaggccctccaggtccggtggctcctgcctaattggcacacagggtccctggagatgtggcgtccggtacacacaagctggttagtgagcaaccaggctcgggggctattggcaggtgccatcagagaaggaagagtgaggagctgggcattgggagcagtgggagaggcgaccttccaggctgaggagcagagtgtggcagcgctgaggagacccaagggctgagacactgtggggcaggggagctgggctgtgaagggtgcgagttgtggcagatgcttggtaccactgtgtggatgggaggggctctcaggtgcagcccccagaagtgggaggatcagggtgattcgtgtgttggccagatcctgggagggagggcctgctgggtgtgggtacttcagtggggtgtgtgtggacagcgcaggggcacagggctgcacacgagtcctgcagggagcccgtttctgggtggttggggtgcctgtggtttttaaagcctgcatctaaagttagttgccccagggagcataaagatacgtggagactttgc

SEQ ID NO: 41655 - DNA, 973 bp, Artificial sequence
  DNA replication origin
gagtatgggacctgctacacgcgcctgagtcatttctctctgcagcccgtcctggactctttgtacagcaagggcctcgtgttccaggtatggcctttgcctcatggttgtcacacacctttgtgagaacggtgcacacgacctggaagagagaatctcagaggtccttctgcaggaccagagagtctaaaccttttctttccttgctaacatctgaaacccgatagtggctcttgagggatgggtcagtgaggatgttttacctcactagaaacttggggcagatgtgtgtgggccctgggctgtgtgggccctggggtgtgtaggaggcaggtgcagccagcataaggggtgcgcagggcaggaaaggcgtgagtggggctcttgctgcctgctccccagtgggcccggcacattgtggatgactgacagcgcagggccctcctgttgggtgaatttacattgctgggagttctgagccaagtctggctccggaagctgctgtttggtgagtcttgaagctggctcatgtgctgggaagaggcccatgggacaggggctgcaccttgagtgggagagaataggcaggtggatgatggggcatttgggtttgggggattgagaggagggtgttggggaaggtgggcagagagccctggaggagccaggcagcgcagcctcctttgactgttgctgctgcagcaggggctgtcgggtggggtgatgtggtgaggtgtaggttttagatgggctgtggaggtgggcatggtgggagctgcacggggcggggagagcttctaggcagaggctcagccccgggggacttgagagctagagatggtggagaaggggtcagagcaggggacgctgagaagggctggactgtggttcttgttcatctggcaggcatagccaggcggctcctggggtgggtggactgagattggtccagggtgcccctgtcttagtgtga

SEQ ID NO: 41656 - DNA, 1960 bp, Artificial sequence
  DNA replication origin
tgggattacagatgcccgccaccacgcccagctaatttttgtgtttttagtagagtcagggtttcaccatgttggccaggctggtcttgaactcctgacctcgtgatctgcctttcttggcctcccaaagtgttgggattataggcatgagccaccgcacctggcctccactttctgtctctaggattttggccactgtagggacctcatgtaagtggagttgcacagtgttttgtgatggctcattttactccacttggcgtcctcgagcgccgtccctgtggagacagtgttttgtgatggctcattgcactccacacggcgtccttgagtgccgtgccttctggagcacgtgtctgagctgccttcctttttaaggctgaatgatgggcaggggtctgcacggacggtctgtgtttatcctcctctgttgggggctcaggctcctctccccctggctgttgtggatgttgttgccgtggacgggggtgtggatgctgctgtggacaggcatgtggatgttgccgtggacaggcatgtggataggcatgtggatgttgccgtggacagggatgtggatgctgccatggacaggagtgtggatgatgctgccgtggacagggatgtggatgatgctgccgtgaataggggtgtagatgctgccatggactggggtgtggatgctgccatggacacgggtgtggatgatgctgcagtggatagggttgtggatgatgttcccatggacaggggtgtggatactgctgtggacaggggtgtggctgatgctgccgtggacagggggtggatgctgccgtggataggggtgtggatgatgctgcggtggacctgggtgtggatgctgccatggacgggagtgtgggcgatgctgccgtggacctgggtgtggatgctgctgtggacaggggtgtggatgatgctgccatgggtgtgtgtgggtgatgctgccagggacaggggtgtgggtgatgctgtcgtggacagggggtgtggatgatgctgctgtggacctggatgtggatgctgctgtggacgggggtgtgggtgctggtaccatgggtgggtgtgggtgatgctgccgtggacagggggtgtggatgatgctgctgtggacctgggtgtagatgctgctgtggacgggggtgtgggtgatgctgccgtgcacagggggtgtggatgatgctgctgtggataggggtgtggatgatgctgccgtggacgggggtgtgggcgatgctgccgtggacctgggtgtggatgatgctgctgtggaactgggtgtggatgctgctgtggacaggggtgtggatgctgctgctgtggacgggggtgtgggcgatgctgctgtggacctggatgtggatgatgctgccgtggacttgggtgtggatgctgctgtggacaggggtgtggatgatgctgccgtggacctgggtgtggatgctgctgtggacaggggtgtggatgctgctgtggacaggggtgtggatgatgctgccatgggtgggtgtgggtgatgctgccatggacaggggtgtgggtgatgcttccgtggacagagggtgtggatgatgctgctgtggacctgggtgtagatgctgctgtggacgggcgtgtggatgatgctgccgtggatgggtgtgggtgatgctgctgtggataggggtgtggatgatgatgctgtggacagggggtgtggatgctgccatggatggggtatggatgatgctgccatggacagggggtgtggatgatgctgcagtggacctggatgtggatgctgctgtggacaggggtgtggatgatgctgccatgaacagggatgtggatgctgccatggacctgggtgtggatgctgccatggacagggtgtagatgctgttgtgtacatgggtgtacaaatcttgttttgtttctaacagaagaatactttatgagt

SEQ ID NO: 41657 - DNA, 1709 bp, Artificial sequence
  DNA replication origin
aaaaattatagacgtaagcatcttatttacagaaatggagtgattgaccttagtgtaagaagatgtgtggctgacagtagccgcagagacacaccgaatgaagggaactgtggatctgtttacctggcttgggagttggttggtgcctcattctccactgtttattcatcccacaggtgaacagtggtatagcagccactccagcctctgctgcagcagccaccctggatgtggctgttcggagaggcctgtcccacggagcccagaggtaagcctcacttggccatcctgagcctctgacggcaggacctgtgggcacccctatcctggctggccaagcacagagagttctgggaatggactctggacaacatgaacacctgtcctgaggccagctcttcttccaggctgctgtgcgtggccctgggacagctggaccggcctccagacctcgcccatgacgggtaggactctcaggtcttgcatatgtccagccatgcatgtggacgggcatgtgatggacgtgtgcctgggccccagggtgacgggtgggtggggcactgtgtggtactgaatggagccttcctcagctggggtgtgggagaagggctgctggaggcaatgccaggtgggtctccagcacagaggctcagcagtcacagcacccctgcccatggccccgtgaatgctcttccacctctgcctctgcggtttgggctcaggagggtgagcagggccttacacttatgcacctgtgtcctggaaggaggagtctgtggctgaacatcaggggcaaggaggcggctgccctatccatgttccatgtctccacgccactgccagtggtgagtgaccatgccacgcggcaaggcaggtgctggggagcccatggatgtgtacagctgctgtttgctggcattgtcatgatagcaggcctctggtccttcctgtctccctgctcctactccaggggccctgagattgggaggttgggaggccagagccagcaggtgtccgtagatgaggagctgggctctgctgtccccacagatgaccggtggtttcctgagctgcatcttgggcttggtgctgcccctggcctatggcttccagcctgacctggtgctggtggcgctggggcctggccatggcctgcagggcccccacgctgcactcctggctgcaatgcttcgggggctggcagggggccgagtcctggccctcctggaggaggtaagctgggcagggtggaggtgctgcggggtgggacgagggaaaggaccagtgactgcttccgtcttcgcccctggtccagaactccacaccccagctagcagggatcctggcccgggtgctgaatggagaggcacctcctagcctaggcccttcctctgtggcctccccagaggacgtccaggccctgatgtacctgagagggcagctggagcctcagtggaagatgttgcaggtgaggctgactgcggaggcatggccctgccctggggcctggctctgccgcacagatcggtggggagggcagggcaggggagtgccctgaaccagctccagcgccggaggccaactgcgcgcctcttctcggctcctcctgtagtgccatcctcacctggtggcttgaaatcggccaaggtgggagcatttacaccgcagaaatgacaccgcacgccagcgccccgcggccgcgatccgga

SEQ ID NO: 41658 - DNA, 2453 bp, Artificial sequence
  DNA replication origin
accacccttccctgcagccccagtttttgggtgcacagcctggcctgggaaaatccaggggtgagatacagacatgtgctcaggggtcagcgttctacagggagctgtagagctgttgagggtcctgacctttgacctctggccctggctggctgttggcagcgtcctttacttctcctggcaccgctatgagcatgggcgcttctggcctttcctgcgagagtcagatgcagacgcagtggggcggggacagggcctcggcttcactgtcaacctgccctggaaccaggtgcccaccctcaagccccaggtccccacccagccccctccccctgggcccctcccctcccccacagttcaccctcaagccccaggtccccacccaccccctcccccgggcccctcccctgccccacagttcaggatgtagcctgggatgtcctgccaggttgggatgggaaacgctgactacgtggctgccttcctgcacctgctgctcccactggcctttgaggtgactgcacggagggctcccccagggcagccgggtgggagggggaccttgtgcctggagtgcgccagtgaaggcaggaggagggttatgagctgtcccactcctgtgtggctggggaaggtgctcaggaggggatgggatgggcctggctcgccctcacctgggctccagcccctctctgtcgaccctccccactccggcctggcctgtagtttgaccctgagctggtgctggtctcggcaggatttgactcagccatcggggaccctgaggtgagggccttgccttgccagggagggcttctggggtcctggggcccaggtcccccatcacacatggctctggttccaggggcaaatgcaggccacgccagagtgcttcgcccacctcacacagctgctgcaggtgctggccggcggccgggtctgtgccgtgctggaggtgactggggagggcacacagggagggtctctgggccagaggcctgggggtcaggagcatgggagccaggtgcccacggggtatttgggaggggcgtcctgcccgggatagagccaggcaggggctctcccggtgacatcccatcccagtgatatctctgccccaatcatgtctccaccctcctcccagggcggctaccacctggagtcactggcggagtcagtgtgcatgacagtacagacgctgctgggtgacccggccccacccctgtcagggccaatggcgccatgtcagaggtgcgaggggaggtagggcgggcagggccggggtgtgagaccaggtgtcacgactgttgtgtctccctcacagtgccctagagtccatccagagtgcccgtgctgcccaggccccgcactggaagagcctccagcagcaaggtcagtgtggccgggtgctaggctgcaggatcccacctcgggctcctgtgcagtggctatgactccgaactgtccctagatgtgaccgctgtgccgatgagccccagcagccactccccagaggggaggcctccacctctgctgcctgggggtccagtgtgtaaggcagctgcatctgcaccgagctccctcctggaccagccgtgcctctgccccgcaccctctgtccgcaccgctgttgccctgacaacgccggatatcacattggttctgccccctgacgtcatccaacaggaagcgtcagccctgagggaggagacagaagcctgggccaggtgggcagggctggcctggggagaaggatggggccgcatctacacctgtgcctgtgtgtgcctgacctgcggtcactccgtgtctgtgtgtccctctggtctgtccaccacaggccacacgagtccctggcccgggaggaggccctcactgcacttgggaagctcctgtacctcttagatgggatgctggatgggcaggtgggagcacctgggaggggttggggatgctgtggacctaggggcagggaccaggacctgccaacgagatgtggcctgtccagaggagggctgggtggtgcagaaccacatggatgtgaacattgccttgtgccaggaactgttcccagaacagccccaggggtggggatcactagtgtgtctgacctctgacctcagcttcttcagttaaatgctctttggcagagaggtgaagggggtgatttaaagtatacatttaggcagggtgcagtggctcatgcctgtaataacggcagtttggggggccaaggtgggagaaacgcttgagcccaggagttcaagaccagcctagagaacatatggagaccctgtcttcacaaaaaataaaaaagtcagccaagcgtggtggtgtgtgcctgtagttacttaggaggctgaggcaggacgatcgcttaagcccaggagtttgaggctgtggtgagctacaattgcgccactgcacgccagcctggctacagaacgagaccc

SEQ ID NO: 41659 - DNA, 2261 bp, Artificial sequence
  DNA replication origin
ccagaagccctccctggcaaggcaaggccctcacctcagggtccccgatggctgagtcaaatcctgccgagaccagcaccagctcagggtcaaactacaggccaggccggagtggggagggtcgacagagaggggctggagcccaggtgagggcgagccaggcccatcccatcccctcctgagcaccttccccagccacacaggagtgggacagctcataaccctcctcctgccttcactggcgcactccaggcacaaggtccccctcccacccggctgccctgggggagccctccgtgcagtcacctcaaaggccagtgggagcagcaggtgcaggaaggcagccacgtagtcagcgtttcccatcccaacctggcaggacatcccaggctacatcctgaactgtggggcaggggaggggcccgggggagggggtgggtggggacctggggcttgagggtgaactgtgggggaggggaggggcccagggggagggggctgggtggggacctggggcttgagggtgggcacctggttccagggcaggttgacagtgaagccgaggccctgtccccgccccactgcgtctgcatctgactctcgcaggaaaggccagaagcgcccatgctcatagcggtgccaggagaagtaaaggacgctgccaacagccagccagggccagaggtcaaaggtcaggaccctcaacagctctacagctccctgtagaacgctgacccctgagcacatgtctgtatctcacccctggattttcccaggccaggctgtgcacccaaaaactggggctgcagggaagggtggtttccgcacccctgctcacctggggtcatcctcaaagagatactggatcccctggccatggtgcacatcccagtccacgacgaggatcctgggtacagacagcgctggtggcaaaggggcagggcctcccacctccaggagcccggccagggatgggaaggtgctggctgggttctctcgcctcctgcgctgccccttgctgtgtggcctgggcccacccccctgcagccagcctggcacacacctgtgtagcccgtgtttctgcttggcatgtgcagctgctatggccacgttgttgaacacacagaacccgttggcagccgccctctggccatggtgcccgggaggcctacggcgtgagagtaggatttgggtcacgtcagggtcgccctggcccctcacagggccacccacggaggagcagccaggggaaggggcagctctcacctcaccagggcaagcccattttgcacagctccagtgagcacagcgtccaccagctgcagtccagcccctgcggccagccgcgcgcagtgaaaggtactctgtgggcgcaggggcgcagatgagccccctgccttccctgctgccctttgcaggccatacccacacttgtgccaggctgcaagacaccagctgctgagcagaacaggccagccccaggctctggcagtgccagcaggcaggtgtgcagggcaatgtcatgtgtatggaccaggggacactggctggggttggcggccgtggctgtgaacgctcaaaggcacgtgcatgtgtgtctgcacaggtgagtgtgtccggggacacgcaccgggtggaagtagatggcgtcgaactgtccggacagcgcctgcagctcctccttgcctaggacctgggtctccctgaccagggatacatactctgggctgcatgcagatgggcaggcaggagaggcagggtcaccagcaggagcaggggggcgggaggcggggacctgggattcatggtgggagtggccaccctgtcacttcctcaagcctgtgagcccacccgaggtgcatagggagaggctctgtattcgaggctggcaggctcggggtaggcccaggttcttaggtttctagctgggctgcccgccccgccccccatcgtggggcctgcccccgtcctgacctgtgcaccaggcccagctcctcttccgaggcctcgcgggctgacaaccgcagacacctctgttccaggccgcgctgccgcaggcgatccagggctgcggtcaggcgctcaggacgctcgatctcgcactcggggctggggcagatgaggagctcagttcagaggtccctccccgcaccccacctcggccaggtcccacttactcgtcccagagcagccgggtggccgtcatgtcctcatggtacacaagcgcggtccccatggctgcgccgtggtcaccctgggtt

SEQ ID NO: 41660 - DNA, 2212 bp, Artificial sequence
  DNA replication origin
accggcctgggcgggagcgcacagaacctaggcaggctccgggatcccaggcgcgcagaaggcacggagcgaggctgcagtcgaagggggaggctccccgcgcctggcttccggcttcctcgcctcggacctgggtcccgccccgcgccctgctcccggtcgctatcgcgagctccgccccggagcgaggaaccagcgggcgcggaagcctcggcgccccgagccgccagccctcggagctgcgctgcggctccgcctccccattggccccgccccgatcccctccaagaggggcggggtcccccggccttaggcgagtggtcgccgcagccccacccgaacgcccgtggccgagcctgcccatgagagccccgttctgcaccagctgggtcagggtccagcgcagccccaaggcccacccggcccgggcgcaggaagacctggggtgaaaggcgaggggggcgaggggtctgcagggcaaaggccacgaggcgggaggagcccgcggggaggcaggtggcgctgcggccggctcagggcggtggtcgtggctgcatggaggcgcagcaccgcccccgaggtttaaggagggagtgagtccggttctagctccaagaagacccctggcccaagagcagagtcaaggtcggtggaggtggggacactggaccggggttgcggtagcatggtgggggactgaggaagataggaggcacgggcacagccacggaggaagatgcccgagaggaaacctgaggccccctggagcccaggggacaccctgcccccgcgggagttcacatccagctgggtcacagaattttggggcccccagtcctcaggccacctatgggcccacactttgggcccagtgtggacagcagccatgccacaagtcagcgtggctccggaactgatggcgatcacgtcccccaggcccggatgccctggagaggcatgagggtcgctgggcagagaaggcccatctgtcgtggcagctcatcaggtccactttggctgggccagctgtgggcatgtccaccgaggacacctggcctgccctgccctgcccctcactggtctctctgctgtaacccctgccctgggacaggtttggaggtgcccatggcctgtgttccagccgccacccttggaaacaccgagtggcctgcagagggcggcctgggcacgaagataccactggagcagggtagtaggggctagaggtttgatcaagaataaaacccagccctctgcgctcaccaatccaccacaggggccagaggggtctcaacatgtccaatgtgccccgtccccccagggactggctggcgctcaccacttcaccacaggggtctcaacgtgcccagcgtgccccctccccccagggacctgctggcattggaggatgcagagagctagggtagatcctaacactcctccccatcaggccctgcccctgggtctggcttcaggatccacacacagtggcttagagtctaagccattagcaggtcaccccgtaaaaggggaggggccaagccctaacgtgggggttcgaagatcactggcacaggcctgggggaagtgggcaccagctttgtggcctgggagagatgggatgctcaggcccccctcctggctctaagggtctgagctatcaggccagcctcctctacatgcaggccaagggcccggaggtcttaaggtgggacccggcatgaggacgcacagccagaacagggagctacaaaagggtctatttccttccagccacgcgggcaccacacagctgatttacattccaggctgggggtgcaggaaggtccactgacgtcgcccaggagaggggatgtccctgagttggtgccctgcgcccaccctctgtccttcctctgcatggcccagagcaggcagggctcagaggccaaggcctgatctggagccccaccagctctgaggtttctgagagcaccgggcaagtgggccactgctccagggatcagaggccatccccaggtcggccagaggtcttgtccagaaagttcaggtgctcctccatgatgggcgcccaagagcagaggcatggccgtggggaggagggtccatggaacccgggcgtctgctctgatggatgccttgggatgcaagccccagccaaggtcaaggtggcaacgagagtcccctctcaggtggaaggtgaaggtggtcc

SEQ ID NO: 41661 - DNA, 1127 bp, Artificial sequence
  DNA replication origin
ctgtccttcctctgcatggcccagagcaggcagggctcagaggccaaggcctgatctggagccccaccagctctgaggtttctgagagcaccgggcaagtgggccactgctccagggatcagaggccatccccaggtcggccagaggtcttgtccagaaagttcaggtgctcctccatgatgggcgcccaagagcagaggcatggccgtggggaggagggtccatggaacccgggcgtctgctctgatggatgccttgggatgcaagccccagccaaggtcaaggtggcaacgagagtcccctctcaggtggaaggtgaaggtggtcctcactgccaccccggagcccagagatcttcacagaggcgtctccttggagaccctggcccccagctgccggggaggcttgaagctgagcacctctttgtaagtaacacctggcgggggtgggggggcgggcacaacagagaggggggtcagcctttgccttccatcctgggagtcgctcacagacacgcctggcggtgcctcgtggggcccttctctaatcctaatgtggtctgaaccactgagagaaggtttgtgtgaagaggccattgctctagatctggattttccagggaaaggggaggtggccagggcttggccacatgtccaccacggtctgtcctaagagctgaggcctcagccacagttgtgtgggtggggactacagagaggatcctatggcccatggctttcaagttatctttctagcagcagaaacctttaatcaaacaaagccaaactcataagcacacgaatatgcacacagcgaagggtggaggccctgctgcgggcacccagggacccgtggtcgtaaggagcacatgtgaatctcaacccatccagccccacccagccagtgtggaggaccaaggtcccgcacccgaggcagagccaggacagggcctgaaacatggcacggctcccagtgtacacctactttccccgggcacacccaccccaggctggtcatgcagccatgaagaagacacagcctgccatcctggagcagaaatgaagccaggtccagcacagcctcaggccgcagcatagctgcgggagctggggaggcttctctgagtc

SEQ ID NO: 41662 - DNA, 966 bp, Artificial sequence
  DNA replication origin
ctacatgaagggcctccccgaattggagaagaaggattttgcctctatcctgaccaatgcaagccctctgggtacggctggctagtgtgggggccaccgggtgctggagtgtggggcctcccgtggtctggcctgatgcaccttcccccgcagctgtgaacctcctggagaagatgctggtgctggacgcggagcagcgggtgacggcaggcgaggcgctggcccatccctacttcgagtccctgcacgacacggaagatgagccccaggtccagaagtatgatgactcctttgacgacgttgaccgcacactggatgaatggaagcgtgagtggggggctcctggcacggcctgtgtggacccaagtggggggctctgggcagggcctgtgtggacctgtgagttgggggctccgggtagggcctgtgtggacccgtgagttgggggctccgggtagggcctgtgtggaccctgtgggccctgtgcaggtggccaggctcagagtcctagatccccatccctgggatgcaggtcaggtgaggaggatgggaggtcagggcagcatggggccgtgtggcctggtggagatgacctctggctggagctggaagttgaagggaagggtgttcctggcaggctcagcacagaggctggcacagaaggagccgggagtggtgaaaggcagctgtgagtcagggaaccagggcccacttagcccctcctggcccccagacctgctgcccttccgccatgtccaggccagagacctgggccaccctgacaccctcaccacgtccgcttgtccctaaggcctctctgctcacacctcctgaatctgtccttgcctctccttgccccatttttgttttttgagacggagtctcactctgatgcccaggctggagggcagtggcacgatcttgactcactgcaagctccgtctcccgggtacacaccgttctcct

SEQ ID NO: 41663 - DNA, 1684 bp, Artificial sequence
  DNA replication origin
caatccccccgcctccacgtcccacctgtgaggatgtgatggggtctgggtgctgagccacgccctatgcacagcccctggtgggaacctgcctgggtgcccaggtaccttggtctgcccttgaagggctgcagagagcaagggggccaggtccggtggccccatctttaggtgccacccaggctcttggctgtgcccatgcttgggagggtggggcacagtggccacctttcctctgcccccaggacctgaagcccggcaacctggctgtgaacgaagactgtgagctgaaggtgtgtgctgcctggcagggggccctgaggtggggcaggggccccctctggatctgcccatctatccacctgtcaggcctgggcagggggccaaggtcccaggctctgggcagtggctgaggagctggtgggtgggtgagcccaagaggcagtggtacacaacatgccgtacccagggcacctgctccgtcccgagggctgctgggcttggtgcactggccagagggaggagctcggggcagtttggggtccgagggcgtggcctcaagtccttgaaggttgtcaggaggccccagcttgggagcttcaagtccaaccccccggggtctcctggaccgtgggtggcctgtccgctccttgggagtcccctagaacccacctccccaattcttcccacagatcctggacttcggcctggccaggcaggcagacagtgagatgactgggtacgtggtgacccggtggtaccgggctcccgaggtcatcttgaattggatgcgctacacgcagacgggtgagaagctgcccagagatctgggcctctcaggctgcaccatctgcttctccacttcttcacggacagccctgtggtggctgctcccagggaggctgttgagctggggtgggagccgggcaggtgggctgtgttggtgtctcctccctccccgtctcatcctgtccccctgcccacggagctgaccagggcttctatctcagtggacatctggtctgtgggctgcatcatggcggagatgatcacaggcaagacgctgttcaagggcagcgaccgtatcctccagccgcagggcggcaccaggggcgggtggggatggctcctgcccaggtgggggcagtgggggccctgatctctggcccccgagctgtgttcctgacctcggtgcagacctggaccagctgaaggagatcatgaaggtgacggggacgcctccggctgagtttgtgcagcggctgcagagcgatgaggtaaggggtgagtggggagctgggtgggggtgggggcggacctgggccttggtgttggcccctcaccctttcttcccacacaggccaagaactacatgaagggcctccccgaattggagaagaaggattttgcctctatcctgaccaatgcaagccctctgggtacggctggctagtgtgggggccaccgggtgctggagtgtggggcctcccgtggtctggcctgatgcaccttcccccgcagctgtgaacctcctggagaagatgctggtgctggacgcggagcagcgggtgacggcaggcgaggcgctggcccatccctacttcgagtccctgcacgacacggaagatgagccccaggtccagaagtatgatgactcctttgacgacgttgaccgcacactgga

SEQ ID NO: 41664 - DNA, 916 bp, Artificial sequence
  DNA replication origin
cccagccctggcacacatacccactggcagtgtggcccagccctggcacacatacccacagaaaggttatttttggacggtgacaaccgggatcttctgggggaggggcaacccggagtctgggatggctccgaaccatccaaagggctcctgccgcctgaccctttcacccctcttcaccccaaccaaacagatccaggcccagggtggggacagcgctatggaaagaggccaggcctctgctggtgaggcccaggcggacagcaccgtgacccaccagacctggtcccctcagcacccctggttggggagatagacagtagacaggtcatgtgacaactgccgcctcagcattttggggtgacggtcccagggaggcctggagttttgcacagccaagggtggaggggcaggtagacatgtgggctgcgggacacctggcagagggcacacacagagtggccgaggcaggagggagcacacttggatagtttgaagaatacagggagggaggccaggtggcggaggcccaggccagggaggggctgaggagaggccagagggagccggcagggcagcacacaccaggtggaagtttggctttgatcccaagagacggggacgatttaaatggggacgtgaggctaaatgcgtcctcctggccgtggtgtaggaaccggccagagtgaggtaagaatggacacaagctggaaggacagctccgccggagccacgtgggccagagccatgggcaagaatgtggagggaggaggagagggaacagagggggtgtccagggggcagcggggactgtggacatgagagctggagggtgcccgggagagtgctttagcagaagacggagagcagggtcctgtgggctaggggccacaggacttggcctggcctctgtggt

SEQ ID NO: 41665 - DNA, 1539 bp, Artificial sequence
  DNA replication origin
ctcagctgcaggccaggagcccagggggtgggcccacaggcacagcggagatcccagcacagcggggcggtggctaaagaaaagccccggtggagcccggcgcggtggctcacgcctgtaaccccagcactttgggaagccgaggcgagcagatcacttgaggtcaggggttcgagaccagtctgcccaacatagtgaaacctcatctcaactaaaaatacaaaaaattagccaggcgtggtggcgcgcgcctgtaatcccagctactgaggaggctgaagcaggagaatcgcctgaacccaggacgcgaaggttgcagtgagctgagatcgtgccattgcactccagcctgggcaacaagagcgaaactcggtctcaaaagaaaaaaaaagaaaaaaagccccagagcgcttggctggatggggcaaggcacgggtgggtgagtgggtgggtgggagcagggggccgtggggaaggctgcagtcctggggcaaggccttggtgtgatgggcgggtggtgggggggtgcggtgccggcgaagtgggggcagggctgggtgtgacggggtgtcgaggtgcgggcagggctggtgtccactgcaaatggatttcacagggcccagggtagtgagctgggggtcagggtgggcatgggaagcctcagagaaaaagacccatccaaggggctgagggagtagcggtggccaggaaccgggggacggggcactttgctggtggacggggcactttgctggtggacgcagggactcgttctcccaaggcaccggtggctcagatgacccaggagggtccagagcatctcaccctgtaggtagggtccgggtgcccagaccaccagccctcaggctgggcccagaccagggggagggcaggagtgacgtggggggcagtggacaagtgggactgtatccagaaaccagagcacccctggcagagagatcgggttcttagcagccagccaccgccatgggagaggcccagggcagctgtacgtggcatctcactggaaggactggaaaggatgggcccccacaacgcacaggagggtgtctgtgaggcggccaccacgcccagtgctcctcaaacagcagctccctaaacccttcacccccaggggctcctgagggttcaacacactccctgcgttctggcgcccccctcctccccctccaccaccgggtcggaagactcgggagatggacagcagcagagtgggctccacagaggggctggaaaggggatggggaagagggaaggtgccccttccaggaaaatcctcccgccgggagcatgctctcaccgcgggcttcctggctgggggcaaggcttggcgtgagacctggaggatcccctgggcctggccaagtcgtgttccctgaccagggcctggctgaggcgccgagtcaaggggctgagtccttcccggggctggcggaggatggggaacggcccttgggggagtcgtctcccaaggagagacaggccttgctctccttctcccctggggacccacggccc

SEQ ID NO: 41666 - DNA, 1021 bp, Artificial sequence
  DNA replication origin
gaagtccagtgttggcggttgggggtgggaggagaatggtgacacagccccacctcagaagcctggtccgtgcagggcctgctggacccctgagccccaccacggggagtaagggggacagcgtggaagctgggcttcctggaagaggtggatggagtgccacaggcagcccagggcacaaagggtatgggccacaggcagctgtggtttgggtggccctgggctgccccgctcactggtcacgagctggtgaatgccgtggagcacggcccaagcccaggtgtaaagctactaccacccttgagcggctgagctgctgattcatggcaggagggcggggcagaaggccctagggatcctgttacccaccagcccagtgggctcctggggtgccccaacatcccttctgagatccaggttcctgggctggtgaaggggtgtcagggtggggctttgccctcaggagcatctggtccaggatggggccagacctatgggaggacaatgcccacacagaggggtcaggcggagggccccagcaggtccccatccctgctggagagagtgcagccactctcagcctgggttttgcaggacaggacaggcaggggtgggatgggcagagacaccagtacttgcaatgcttggagcaggcaccccacagatggggggagcagggggaggagctgggggtccaaaagggcccacggggacctatgggactgagaggcccggggtcagtggccacaggagtggggttggggatgcagcctgaggagtttgggggacagacccctccgtgtagaaagagggatacaggcaggacaggtgcagatggaccccttgttgggggacggatggatcaggctcagtggtagggcatccttgggggtggcctgcgaagttgaccccgggaacacagggctcagcccgacttgcggctgccatagaagtcagcgctcaggctgtcaaggatgggccctgcgccctggagccgtggggagttaggactggagcgggc

SEQ ID NO: 41667 - DNA, 1052 bp, Artificial sequence
  DNA replication origin
gaaagggggtgacctcttgcctcgaggggcccagggaagcctgggtgtcaagtgcctgcaccaggggtgcacaataaagggggttctctctcacttggcttgtatccaaaggctactccaggcccgggtgcccccaccatccctgctgctgggcgtggggggagtgtctgggtcatcctgcatcactcacctccagctggccagatccctcaggcccccagtcagaccagcggccatcttctggcaccctccctgctccctggagggtctgagagcccagggggaccaggggaagacatggctgatgggcagactttgagggcacagggtgtgacagccacccagatggtgaccccagctgccctgtggggatgtactgggcaggcttggctttgggccaagatccagacaccacccccgcctacccctcagtgttcagggaagctggctggggagaagttgggtgtctcaaggagcaagggtctgcccatccctgggtgggggctgggcagggtagggaaaatagctttcctttccctcctggtgaaggaaaaagaggccactttaacccagggaatgtgcacgctggtcccgttcccactacgcgctgcagcttatgtgtgggggagggtccaggccatttggggtcaggcagtgtctctaaggaccagggacagtctgtgcccttgcttgggtcttgggtaggggtggaaaccgtctgggagttgggggcctcctggggcctggtcagtgtagtggtcaatcccgggggaagtccagtgttggcggttgggggtgggaggagaatggtgacacagccccacctcagaagcctggtccgtgcagggcctgctggacccctgagccccaccacggggagtaagggggacagcgtggaagctgggcttcctggaagaggtggatggagtgccacaggcagcccagggcacaaagggtatgggccacaggcagctgtggtttgggtggccctgggctgccccgctcactggtcacgagctggtgaatgccgtggagcacggcccaagcccagg

SEQ ID NO: 41668 - DNA, 1423 bp, Artificial sequence
  DNA replication origin
gagccaccgaagccacctggcagcctggagattgagcagtgaggtgctgcccagcagcccctgagagcctgtggaggggcttgggcctgcacccttccacagctggcctggtttcctcgagaggcacctcccacactcctatggtcacagacttctggcctaggacccctcgccttcaggagaatctacacgcatgtatgcatgcacaaacatgtgtgtacatgtgcttgccatgtgtaggagtctgggcacaagtgtccctgggcctaccttggtcctcctgtcctcttctggctactgcactctccactgggacctgactgtggggtcctagatgccaaaggggttcccctgcggagttcccctgtctgtcccaggccgacccaagggagtgtcagccttgggctctcttctgtcccagggctttctggaggacgcgctggggccgggaccccgggagactcaaagggagaggtctcagtggttagagctgctcagcctggaggtagggggctgtcttggtcactgctgagacccacaggtctaagaggagaggcagagccagtgtgccaccaggctgggcagggacaaccaccaggtgtcaaatgagaaaagctgcctggagtcttgtgttcacccgtgggtgtgtgtgggcacgtgtggatgagcgtgcactccccgtgttcatatgtcagggcacatgtgatgtggtgcgtgtgaatctgtgggcgcccaaggccagcagccatatctggcaagaagctggagccggggtgggtgtgctgttgccttccctctcctcggttcctgatgccttgaggggtgtttcagactggcggctccagtgggccaaagggcaaccacatgagcatgggcaggggctttctccttggatgtgggacccacagcagcttcctgaggctgggggtgggtgggtgggtggtttggccttgaggacgctagggcaggcagcacacctggatgtggacttggactcggacacttctgccctgcaccctggcccgctctctacctctgcccaccgttgtggccctgcagccggagatctgaggtgctctggtctgtgggtcagtcctctttccttgtcccaggatggagctgatccagtaacctcggagacgggaccctgcccagagctgagttgggggtgtggctctgccctggaaagggggtgacctcttgcctcgaggggcccagggaagcctgggtgtcaagtgcctgcaccaggggtgcacaataaagggggttctctctcacttggcttgtatccaaaggctactccaggcccgggtgcccccaccatccctgctgctgggcgtggggggagtgtctgggtcatcctgcatcactcacctccagctggccagatccctcaggcccccagtcagaccagcggccatct

SEQ ID NO: 41669 - DNA, 1693 bp, Artificial sequence
  DNA replication origin
gggcagcgccccaaagttttgggtctgggggcccaggaggggtctgtggctggcccgtgggtgtttcctgagtgacacagacattgaccagctgaagcgcatcatggaagtggtgggcacacccagccctgaggttctggcaaaaatctcctcagaacacgtgagttggtgcccgccagccagcagctccctctcctggctgagcccccaggctctctgggggagagggtggtgtggaaatgcggggaccatatggggaacatgggatgtggtgggatagagcctagggcaggtgcccaatccctgcaggggaaacaggagaagggggaagacattcctgacaccagggacagtgagtgcaaagccatgaccccagcaagcagtgcctggccagggcagtgggggtgggctgggggcccagcaagcagtgcctggccagggcagtgggggtgggctgggggaccccagcaagcagtgcctggccagggcagtgggggtgggctgggtggagggagtgtacttggacccagctcctgcaggcattaggggccaactgaggagctagaaccaccagatcctatatggagggggtcactggtctgcctgtgcccttgtcctggcctgttggagtgaatgagtctgggggcttgccaagagaagccccagtttggggccagggaggcagagagtgagcagcctccccaggtgttcttgtgtgcccccaggcccggacatatatccagtccctgccccccatgccccagaaggacctgagcagcatcttccgtggagccaaccccctgggtgaggactgccctgggctagactgggctccatatctggccctggatgtacagctgacccccctccccaccactggcttccctgcagccatagacctccttggaaggatgctggtgctggacagtgaccagagggtcagtgcagctgaggcactggcccacgcctacttcagccagtaccacgaccccgaggatgagccagaggccgagccatatgatgagagcgttgaggccaaggagcgcacgctggaggagtggaagggtgagcatggcagtggctgggggtgggtccaggggcctgcgggctccatttccccagaggcaggaaatgccccagttcctctccagactggtcaggtgtggaagggcgttcaggtgtccagcacaggctgggagcggggcggaggagtgacacagggcaggttctggctcccagactgtgctgaggctgctgtcacagggtggtgggcctgggctgggtggcaggtgccagacaagcaggtgaggggccgggctgtgggaggcacaagctcaccctttcccttcacctcctagagctcacttaccaggaagtcctcagcttcaagcccccagagccaccgaagccacctggcagcctggagattgagcagtgaggtgctgcccagcagcccctgagagcctgtggaggggcttgggcctgcacccttccacagctggcctggtttcctcgagaggcacctcccacactcctatggtcacagacttctggcctaggacccctcgccttcaggagaatctacacgcatgtatgcatgcacaaacatgtgtgtacatgtgcttgccatgtgtaggagtctgggcacaagtgtccctgggcctaccttggtcctcctgtcctcttctggcta

SEQ ID NO: 41670 - DNA, 1510 bp, Artificial sequence
  DNA replication origin
gggccctgtcctgaccccctgaccccgccccaggtacttggtgaccaccctgatgggcgccgacctgaacaacatcgtcaagtgccaggcgctgagcgacgagcacgttcaattcctggtttaccagctgctgcgcgggctgaaggtggggcgccctgggcttcgcgggtcctctcgcaggggggcgggcgggccgggcccggcgctcaccacaatccccctcccgcagtacatccactcggccgggatcatccaccgggtaggtgcgaccgcagggtgagggtcgggtccagcagggctccgtcccagcctcctgtgctcacgctccgcgtgacctgcaggacctgaagcccagcaacgtggctgtgaacgaggactgtgagctcagggtgaggcccgtgggcaggggtgggcagggcggcggcggagcccgtgcggagcttgagaacaccacgtggtcgccccagatcctggattttgggctggcgcgccaggcggacgaggagatgaccggctatgtggccacgcgctggtaccgggcacctgagatcatgctcaactggatgcattacaaccaaacaggtgcagggggaaggccttggggggacgaaggccaagggcctcgtctggccctcgactggctctgcatgccaggtcttagggggcaggcaaggtccccaagaatgtgggacccacattcaaaagtagcccttcagaggccgctagagcatgatgggtgctggcctcctctggctgtgcagctatggacctccccctgcctaggggggttgggtatggcagaggagggggtctgcccatcttggggtctggatgtgactgtgggtctcctggaggagggacgtggggtgggcacactgatggaggtcccctcgccctcgcacagtggatatctggtccgtgggctgcatcatggctgagctgctccagggcaaggccctcttcccgggaagcgactgtatccttggcccaggttggggagcagggtcaaacagggcccctcctgtagggtagggaccagcgctggccccttctggcgggtcttgcctcctctgccccccatgctatgctactttgggctggccatcctcacctataggagagcgggctctgggcagcgccccaaagttttgggtctgggggcccaggaggggtctgtggctggcccgtgggtgtttcctgagtgacacagacattgaccagctgaagcgcatcatggaagtggtgggcacacccagccctgaggttctggcaaaaatctcctcagaacacgtgagttggtgcccgccagccagcagctccctctcctggctgagcccccaggctctctgggggagagggtggtgtggaaatgcggggaccatatggggaacatgggatgtggtgggatagagcctagggcaggtgcccaatccctgcaggggaaacaggagaagggggaagacattcctgacaccagggacagtgagtgcaaagccatgaccccagcaag

SEQ ID NO: 41671 - DNA, 1180 bp, Artificial sequence
  DNA replication origin
ctgtcttctggtgtggtccctagccttccatcagaagctgtaggtgggtcattctagccatcatgccagcacagatctgtcttcctctttgagacctgaagggcaggaagagggtctgggacggtgtgggagtggccataggggactagggtgggtcatggctggactcgccgtctgggagttgctgagaggtgtccggttctctgagtgaggcctggtctccccccttgcacccctggcccattttcttagttccactgccaaggctgcgggccaggtgccaattccctgtcacctgaccgcacagatgcaattggccaaaagaacttgctgccccacgtgcagggccactcccctcaccacctcaggagcacctttccctggtcataggctgggagcatggctgccccaggcacctcgacctgcgcccatgagcatcccagacccagcaggagccgctcctgctccccttgtgtgggcatggggggtggcctcagcctccacttgctctgagacaggatcccaagagacagaagtgggagggagagaagaagcaagtatcagccagagggaacaggctgtgcaaaggcctttcctttagcagggctgagggcagtgggacatgggagggtgggatgagggtcacctgcaaagggagggtgggctcaggaagctggtgcagggtagagggtctggacctctgggaagtggggctgggcgaagggctgttctgtgggtccagctgacgccctcagctgtacatcaccttctgtcccggttttgttccaaataatgatgcaataaacacctctgaccaactttccctccgtattttgaacattcggaggcaccaggggtccaggggctttgaggtggctctagaatccccctctgtgagcctcctgggcccatggggtctatggggcagagggaggcccgtctgctgcaggtgaatgccagtgactgttttcctgctgtgtttttccacgctggatggggcacctctcccccagccttgctttgaatgggggcccctggttgagcgtgggaatcagtggggccaggggacagagaaggtccaggaccttgtggggtgaacacacgcatggtggtccagccccaggggctccttcccagcaagcgcggagtgggtaggcccgagggtgggaggccgagctgg

SEQ ID NO: 41672 - DNA, 1660 bp, Artificial sequence
  DNA replication origin
tctgccaccgcctccgaggcgcaggaagcagcgcatttgtctccgggaacccccccacgccccggccacccagcccgggaaatccgcccgggcctcccggccccgccccggagccccgccccgcccgccgccgccgccgcctccgccgccctccgctccgctcggctcgggctcggctcgggcgcgggcgcggggcgcggggctgggcccgggcggagcggcggctgctccggacatgtcgggccctcgcgccggcttctaccggcaggagctgaacaagaccgtgtgggaggtgccgcagcggctgcaggggctgcgcccggtgggctccggcgcctacggctccgtctggtaggggcggggcagaaggggtgctgggtgggggccgggccgggccggagagcgcgtcccctcctcgcccgcgcgaggttctcggcgtggggaggggcctcgccctgcctccgcccccgggcgccaagcggatctgaggaatgaatgggggggcgggggtggcggcgtaaagaaactttccaagcagacgccgttaccgggagggaggggggtcctccggcctctcccgattcggactgctccccaccaggcctgaggcctgggaggtcacagctggcgtgagggtgggtctcacgcgaccgagccccgagccaccctgatgtccgggcccctaaacgtctgagcacccacctgagattcactgagtcgggtcaggcagccccccggggtctagcggatgaccctcccccgcccgggctgggggctattgtctgaaaagggaagccccgctcccggaagccaagatctctccccctgggatggcctcagactccccctcagaccacaaaccccacttaggccctggggccagaggacctggcctggggcccaggaagacgacagagtctgggtgggggaggggggtcaactgggccaaggtctctgttagacccgggtagccagggctggaggggcttagggtgaggtagttaccgggagtcctaagtttcagcctccatgttgactgggaggctgatcatgggtacaggctttgagaggtgcagctgagtcctcaccatggccaatgccgcttagctgctgcccactggggggtcctggtggggcgcaaaggcagaggcagccagggcagagctctgccccaggcacttgcaggttggaagtgggacctctaggcccaccagatttggagctcaggagccggcatcaggggccgggggtcccagggcaggctgtcttctggtgtggtccctagccttccatcagaagctgtaggtgggtcattctagccatcatgccagcacagatctgtcttcctctttgagacctgaagggcaggaagagggtctgggacggtgtgggagtggccataggggactagggtgggtcatggctggactcgccgtctgggagttgctgagaggtgtccggttctctgagtgaggcctggtctccccccttgcacccctggcccattttcttagttccactgccaaggctgcgggccaggtgccaattccctgtcacctgaccgcacagatgcaattggccaaaagaacttgctgccccacgtgcagggccactcccctcaccacctcaggagcacctttccctggtcataggctgggag

SEQ ID NO: 41673 - DNA, 1535 bp, Artificial sequence
  DNA replication origin
gaccacggcccgcctggtaacgggcgtcttcccagacgctggcgtcaccgctagaccaaggaaccctctggtggccctgtccgggcataacagaaggctcccactcttgtcttctggtcacacctcactatgtcccctcagctcctatctctgtatggcctggtttttcctaggctatgattattgagcaaggattattataatattggaataaaaagtaattgctacaaactaatgattaatgatattcatatataatcatatctaagatctatatctggtataactattcttgttttatattttattatactgcaacagctcgtgtcctctctcttgcctcggtgcctgggtggcttgccgcccacacagctccattcaagccacgatgaaaaacgggtggccatctctcccccacaagagaaaggggtacaaggccaactgacatcccctgctccaaggatccctgaaatgacattgggttccccccttacccagagacatggctggtcaggagatcagagcaagggggtggaccgaaggcttaagtgctgagcgggaggtctcaagtagggagctgggaacctggaggcctggcttccgtactagacccctgcagtccacctcttccctgtcccactgggcagtcaggaaagaagggaagggtcagtgagaccccacacacatgaaacttggggctggggagaggctgcaggcccagcagtccagcatctgggtgggggcaggcaccgggtagaagctgggcatagctgctggggtgcatgcggtgggctggagtggtcagctggcgacagacgaggggtggcctgtccttcctggtgctttccaagtcccattttcctcccagagtggtgggaggagaggtggcgggtagcttaacagcccaaggctacatcctgcttgcttcttacaggcaggacaagtcccctgctaaatcagctccgcgaccaccatcgcctggtctcccggtgagcaaggccagatttgccttttaggaagttcactgactgcaggaagaggccagctgggagggaccagcaggaccagagaggagctgtcacagtgacagctccagtgaggaggggtggccaggaccagcgggggtggggtgggggcatgagcacggagaaggggtggcctgctgtattcaggggccacagcgaatcagctgggtaggagaggcgcctctggcccagggcttctcactcctgccctgccaccggcccttcctggctcccctgccgcttcccctctgggcctgggactgtcctccaccggcggctccctccaggggggcttcccttgcccccgccgagctctgaaggtgcctctcctggaagatggcctccaggccctgacgccacccgaaactcctcagtgatcactcccttgcagtgccacgaccccacactgtccccagtaggcacatgggcgggacctctaatgcctgggcaggcagggggttcccggggcaggtcagctcagtgatgagaggggcccgtttccaccgcccc

SEQ ID NO: 41674 - DNA, 1016 bp, Artificial sequence
  DNA replication origin
tggtctgtcagacaggctgccctagagccccacccagtccggggggactgggagcagttccaagaccaccccacccctttttgtaaatcttgttcattgtaaatcaaatacagcgtctttttcactctgcgggttggctgagtgttcctcctggggctgcagtgcccctgtccaccaccccttccctgggctctgtgggtcctgctgggaggggagctgtggggaggtggagggggctgggaggggtgctgggggaggtggaaggggctgggaggggtactgggggaggtggagggggctgggaggggtgctggggggaggtggagggggctgggaggggtgctggggggaagtggagggggctgggaggggtgctgggggaggtggaaggggctgggaggggtactgggggaggtggagggggctgggaggggtgctggggggaggtggagggggctgggagaggtgctgaggggaggtggggggggtgggaggtgggactgcttctggtgccatctggtggcttctttcgtgcaacacattcttaccaaatgcccgctgcacaccacgcatgcactgtcctgagcgctaggaacagcagcaaccaggacgggcagggctcagagcctcccctgtgtgccaagaatacagacagcccaggcagagggcattcggtgctccagacacaaagtgaaggcccagcttcaaatgtggctggatccaggcacacatcctgaggttctgctggtctggactgctaacccactcacgaggatccattctcaggcagccccagcctgtctccccacctgggcacgtcatggctggggtctcttgatgggcaaggcctccattgatcgagtcccctttggactggggcagctctgtagggaccagccccacagggtcagtgggtctctccgtgtgcggcgacgagagagtgtagaaataaagacagaagacaaagagataagagaaaaggcagctgggcccaggagaccactactaccaatgca

SEQ ID NO: 41675 - DNA, 2545 bp, Artificial sequence
  DNA replication origin
ccagcacccctcccagccccctccacctcccccagtacccctcccagccccttccacctcccccagcacccctcccagccccctccacttccccccagcacccctcccagccccctccacctccccccagcacccctcccagccccctccacctcccccagtacccctcccagccccttccacctcccccagcacccctcccagccccctccacctccccacagctcccctcccagcaggacccacagagcccagggaaggggtggtggacaggggcactgcagccccaggaggaacactcagccaacccgcagagtgaaaaagacgctgtatttgatttacaatgaacaagatttacaaaaaggggtggggtggtcttggaactgctcccagtccccccggactgggtggggctctagggcagcctgtctgacagaccaggaccccaggatgtctgggccccgacgtaggacttgacctacgtctcacttgacctttgacgtggggcccagcagccgtgagtccacccagagtgccggcacccttggggaggccggtgaggtcaggaaggcatcgtaccgctttttctcctcctcccatctcgtggtggacagacagacataggatctgggaacttgccctgggggccacaggccctcagatcccccaggggcccaacctagggcatggaggcggctgctggtgcgtgggcggaggcggaggccagctgcccccagcgtggcagcgtaaggcacattttcaaatcactggagactcgacagtgaacacccgatgctggttctgcggccggagggagctggggctggggctggtgctggtgcggtgcccggcggtattgctcagaggaagatgctacagtctagacgctgggcgggttccggctgcacccactccggcttggggcgcgttccaggggagggtgggggcctcagccacagccactcggcctcctcccctgaggggctctcaggtacctcaggtacctatgtcccaaggcagcactggagattgtaggtcagaggtcagtgaccttgttctccagtgcagcggcaatctgctgcaggcggaaggccagctgcatcttctgggcggcaggatcctcctccaaggcattgatgatctgagggagggtcgcatcagagcacaccgggggaccgcccagcaccccacctgcccccgcccccgggggcctgaccctacctcgtcatagtacttctgcgtgtattggtagagctggtggagtgccacgagggtgttcaaggagtccgtgtgcgcctggggggtgacgggacagtcagggtggaaaaggggctgtgggagccccagggctggcaggagtagtacgggacgcccaggacgaggcctccccggggaagcagctggggccttgggcacagctggcacttggggccccccatgtggcacagcctcagacagacacccacgcaggcagagttgtgcacatccaaccatctcagtgtctccctgtgtgacgcacggctgtggatggacccacagggacgggtgctgtgagcagggctgtgggtggagccgcagggagggggcgctgtgggcacggccgtgggtgcagccgcagggagggggcgctgtggacacggccgtggatggagccgcagggagggggcgctgtgggcacggccgagggtgcagccgcagggagggggcgctgtgggcacggccgtgggtgcagccgcagggagggggcgctgtgggcagggcctggctccaagcaggagcagctcatactccccacacgcagctgtggctcacttcacatggccgagcccacctcgaggtcccgccccaccctctctccccctcagcaccacattacccctgccctgcagctcagggccaggctcagcatggggtagtgggagcggggagggctgtgggtgcgtccctggtggtctccttacccgggaaatctctgccaggtgtgtgttcatgtcctggtcgctgacctgcaccatctgccggatccccttgtagtaactgcaggggtgggagcatcatacagtgtgggcggcagggaccacaaagggggtggtgggggaaaccaaggcctgaacctccccgcagggggtcgagggtgggcatgggggcctggcctggagggcaggcagacttactcctccaccatcttcttgtaggtggagatctccttggcgtacagcagcttgttgctgggagaatcctgttggggacaaaacccagtgatgcctggccaagggggccaggctggggctgctcagagtacccctgggtagcttcccctgccccgaactcctgacactttcatcaagaaaactatgggccgggcgcagtggctcaggcctgtaatcctagcactttgggaggctgaggcaggcagatcacctgaggtcaggggttcgagaccagcctgcccaacatggtgaaaccccgtctctactaaaaatactagccgtgcgttgtggcacatgcctgtagtcccagctactcaggaggcagcggcgggaaa

SEQ ID NO: 41676 - DNA, 1453 bp, Artificial sequence
  DNA replication origin
tctgtagtaaaactcagtttctctgctcgtgtgctgtggtgagaggtctcaggaggagagagggcaagggctctcgggatctcccaggctctgccgggcccctgtgcccccagcctccgccacccgtcacctcctacatcaagggctccagcccaagatattcaaatccacaccccagacaaggtcccaactcacaagatgcctcctggggacagacccaggcctccctgccccagacctgcccccaccccactcacgcggctcagcttatgctccgtgcgcgtgcaggcatccatgaaggtctgcgcgatgactgacagcgaggcgtccaccacctcgtggacatgcacgtcaaagatgaagtgggggttcttgaggatgttcacccagaaccggagcggtaagctgaggcagagcagcagggaatgagagccggggctgggccgcggggtgggtgtggagcctcccaagtgagaggcggagccggggctgggccgcggggtgggtgtggagcctcacctgttcgtcttccagatgtggatggtgtcttcatcctggatgttgtgcttctctgcctgctcgtccaggaagtcgaagaagtacttgactgcaggtggcaccgcgtgcccaggcgccagcacgctctggaagaagttgtccacaaactgctgcagtgtgccctgtgggggggagggtctcagcgtgacgccgtgggcgcggctcctgggggggagggtctcagcgtggcggcctggtgccgcccacacacccatgggggcccaccttgactgagagcagccgcgtcaggtagatctcggtgatggccttcgtccgctccttctctttcacgctgcctctcttggacttgccctcgtccacctcgtcggtcggccgcaccaggtgccacacccggttctcctcctccaggagggcatggcctgtggggagcgggcactgagggacccctacccaggtctgggggcctgggtcccacagggagcagtggtggcagggtgggcaggggtgcatgtgtccagggcagacatggtccacgctgaccaccaggggctggaaggaaacgggcaacagggagggactcacgctccccaggcaggtcctgctggctgtcctccggctgctgggagacccccaccttggacaggatgagggtggctccatcccggacctggggaacacggcggtgagggtgggctgtgcccccagggtgcccagttctcgcccgccccggcctacacgctcacattgtagtgcataagggtgttgacgcgcttccaccggccctcccgctgtgacgtcaggtccaggtccgacaggatctgcgctgtggagcccggacgccactctgtgggaagagacagcccagcttgggccccagccacccaggttcctcccactgcccaccactcccatatgagaaagctggccaggcagg

SEQ ID NO: 41677 - DNA, 1102 bp, Artificial sequence
  DNA replication origin
tcctgcgttcccctatctgtacggcaccttgaggtgggccctgcctggacaggtttgcttcctgcccctgacatggtcagccccgtccatgcctctggccagggctccgggggccccttccaggccccaagtcccctgacctcccagcctcccctccgtgttactccaggacagtgccggggagcccctgtacaagctcttcaaggccatcaaacatcaggtggaaaagggcccggtggatgcggtacagaagaaggccaagtacactctcaacgacacggggctgctgggggatgatgtggagtacgcacccctggtgagcttctggggtgggggccgccatgggcgcctcggatctgggctaaggagcttgggcatcccctggccacagatgggacccacaggccagaggccgtccacctcctctgtggattcgagttacagcctgctctaactcggcctcagggaggggcctgggtgctggtggctgtgggctctggaggctctaagtgtgcgggccccgcatcagctcttcccgggcgcccccacctcctggaggccatacaagggcctggcacaccaggtgtgtccagggttctgtgcatacatgaccagtgggtgtggcaggagcctgtgcatgtgtgagacgtgtgtattctgtgtctgtacatgtgcttccatgagcttgcgtgacagcctgagtgagcggttctgagccgtccccgtctttctgtcctgctgagccggagcaggcaggggaagggcagagtgtggtcatctgggaagcctcgggggctcggagccgggctggcgggggcctgctgcccaagggtgccgctgtggtgggcaaagctggcggggcagggagtggctcctgcatggtgcaggtaagagcagggcctcccactgggcttcatcccggatgtctcggcagacggtgagcgtgatcgtgcaggacgagggagtggacgccatcccggtgaaggtcctcaactgtgacaccatctcccaggtcaaggagaagatcattgaccaggtgtaccgtgggcagccctgctcctgctggcccaggccagacagcgtggtcctgggtgagtgccgg

SEQ ID NO: 41678 - DNA, 958 bp, Artificial sequence
  DNA replication origin
ggcaagctggacatccctgagccgcggcggccggtggtggagcaggccctctaccagttctccaacctgctgaacagcaagtctttcctcatcaatgtgagccaggcgtcgggcgggcgggagggcacacaggtggcgccgggcaggctttgaccgccggcccctacagttcatccacaccctggagaaccagcgggagttctcggcccgcgccaaggtctacttcgcgtccctgctgacggtggcgctgcacgggaaactggagtactacacggacatcatgcacacgctcttcctggagctcctggagcagtacgtggtggccaagaaccccaagctgatgctgcgcaggtgcacatgggcggggccacgagcggggccacgggcggggcggccgcaggggctctggggctggtggcgggtggcacagcggcctgttgggcccccaggagccggcaggtgccagccagcgctggtggtggggggcggtctaggggtggtgtccccggccacaaactcaaagccggactctagcccttcctgtccagcggtttcagctggtcacagtgtcagccctctgcagaacagaaggaaggtggcacacttcccacaagggctggagctgccaccaggtagtcctcgctgcaggccacacccaggctggacaggggcgaggctggcgcaagggtggccgggtgcttggaggagtcagttgggcctcaggaatactacggggtcactcggtacaaggcctccctgcacccccaggtctgagactgtggtggagaggatgctgtccaactggatgtccatctgcctgtaccagtacctcaaggtgggttccaccccagcctggctggggcttgagggatgaggcagactgctgccatcccctcctgcgttcccctatctgtacggcaccttgaggtgggccctgcctggacaggtttgcttcctg

SEQ ID NO: 41679 - DNA, 930 bp, Artificial sequence
  DNA replication origin
cgaggccttcgtgggtgccgagcgctgcaccatgaagacgctgacggagaccgacctgtactgtgagcccccggaggtgcagcccccgcccaagcggcggcagaaacgagacaccacacacaacctgcccgagttcattgtgcgtgagcggggactggcggggggtgcccccacgggaccgcgctgaacccggccccccacacaggtgaagttcggctctcgcgagtgggtgctgggccgcgtggagtacgacacacgggtgagcgacgtgccgctcagcctcatcttgccgctggtcatcgtgcccatggtggtcgtcatcgcggtgtctgtctactgctactggtgagcccgccccccggctgtgccaacaccctgagccctcggccctcccgcctcggcccctctggcctcatccgccgccctgcacaggcaggcgtgtagatccacctcctcatccgggcagctgagcggccagccccggcagaacctaggaggcccgctgtgccttgcaggaggaagagccagcaggccgaacgagagtatgagaagatcaagtcccagctggagggcctggaggagagcgtgcgggaccgctgcaagaaggaattcacaggtagggaccgcttgggggctggtgctggggcgcctcctggggcggggatgctgtgtgtagcgtgggggtcagggccccacgtggccagggacgtctcacgccagcctccccccagacctgatgatcgagatggaggaccagaccaacgacgtgcacgaggccggcatccccgtgctggactacaagacctacaccgaccgcgtcttcttcctgccctccaaggacggcgacaaggacgtgatgatcaccggcaagctggacatccctgagccgcggcggccggtggtggagcaggccctctaccagttctccaa

SEQ ID NO: 41680 - DNA, 1376 bp, Artificial sequence
  DNA replication origin
ggttggagaactggtagagggcctgctccaccaccggccgccgcggctcagggatgtccagcttgccggtgatcatcacgtccttgtcgccgtccttggagggcaggaagaagacgcggtcggtgtaggtcttgtagtccagcacggggatgccggcctcgtgcacgtcgttggtctggtcctccatctcgatcatcaggtctggggggaggctggcgtgagacgtccctggccacgtggggccctgacccccacgctacacacagcatccccgccccaggaggcgccccagcaccagcccccaagcggtccctacctgtgaattccttcttgcagcggtcccgcacgctctcctccaggccctccagctgggacttgatcttctcatactctcgttcggcctgctggctcttcctcctgcaaggcacagcgggcctcctaggttctgccggggctggccgctcagctgcccggatgaggaggtggatctacacgcctgcctgtgcagggcggcggatgaggccagaggggccgaggcgggagggccgagggctcagggtgttggcacagccggggggcgggctcaccagtagcagtagacagacaccgcgatgacgaccaccatgggcacgatgaccagcggcaagatgaggctgagcggcacgtcgctcacccgtgtgtcgtactccacgcggcccagcacccactcgcgagagccgaacttcacctgtgtggggggccgggttcagcgcggtcccgtgggggcaccccccgccagtccccgctcacgcacaatgaactcgggcaggttgtgtgtggtgtctcgtttctgccgccgcttgggcgggggctgcacctccgggggctcacagtacaggtcggtctccgtcagcgtcttcatggtgcagcgctcggcacccacgaaggcctcggcctcctgcagcgtcatcgccttgttcagattggtgccctggggaggcggcagtggtcggggtgaggaggagggaaccagggacaggtggaccagctctcagcccagacccgagcaggacccagacacccggggctgcaccgtcctcacccgggcgtggatgagcttgttgacctgcttcttgacgccacctgtgaagttctcaaaggtggggtcaggcacgtactcgaaggccccggcctctgttctgagcagggcacggtgcccgtccatctcgatcagcaccgtgaggttgtaggcctctggctcctcaggcacagccggggacaggaagacgaccttggtgtcattgtggaacacgtagtctgtacccaccacctgcaggcaagtcccagctgtcagcccccgggcgcagaccccgcccttcctgggcacgatcccatgg

SEQ ID NO: 41681 - DNA, 2123 bp, Artificial sequence
  DNA replication origin
ggccccggcctctgttctgagcagggcacggtgcccgtccatctcgatcagcaccgtgaggttgtaggcctctggctcctcaggcacagccggggacaggaagacgaccttggtgtcattgtggaacacgtagtctgtacccaccacctgcaggcaagtcccagctgtcagcccccgggcgcagaccccgcccttcctgggcacgatcccatgggccggtgccagagctgagcccacgccaggactgaccgtcatgggctgcagggattcagcctcccgcggcggctgccaggactgcaggggctccgcgatgaccaccatggcaaacctctggatcaggctgaagccctgacccgtgacgttgatgctgcggccaccactgcggagggcagtgccttcgtgggctcggctggcaggggtggtccctgcagcctccgccctcccgtccccgcccaccctggccctgaccacacggggcttccaggtgcatgtgtgggtctcggtgggcaaaggggcaacgcggtgggacgtgctgagcacgagactgtgccgcaagtgggcggggggcacacggggcctggtgagcgtggagcctctggtgtgcccatctgggtttctaggaggaagtggatctggagtgcagtggggttttccggaggccgcctcccgctgcacagaccagccccaccacattcctttcagcacagtcagccaagggcactgaggaggcagctgggtgtggggagcagaggggggcggggggacaccagcctcacctggcaaagcttcgtagcggctcgaaggctcgcagtacggggttttcgcggtaggtgaagaagatgccggggttgggcacgggggaccccccgtaggagacctccagaagcatctggccccgtgtcgcctgggggccagtgacacactggagctgcgccccaaacttcgtcctgggggagggagggtgctggtctgcatcaacccctcccccgggaccagccccagcccgaccaggctggccccgccatcccctcagggccactcaggtctcagtaagtgcccccctccatacccagggccagggccaaccagactcagcagctggcggtgacacccacactttacacgggacgccgttgagggtcacccgcacgtcctcctgggagcccgtgtccaggtgggtgccgtggatggtcagtgtggtgccgcccgcctgcggtccctgctgcggctccacactgagaggcttgggctgctgaaagagccgcaggggcactcgggtgaggacggggcacaggacgccctcggtcctgggctggatggtaactgtcgtggggaggcggcgggcagagcccctcctcccggtcctcccgggttcggcaggtccccgaggccgggtgcttacttggaaggtgaactggacattgggaggcgaacggcccagtttcccgaagacgtccacctcgacaccccccgtgaaaggcgtctccgcagcctcgatcacacacacgatcctggcgggcgacaggcagtgtggcccaggcactccccgacccaccccacaccctgacaccctcaccccctcagcctccccacccacccagtcacccggaaccccagcgtgggtactgacccagctgacagggcccagaccagggccgtccactcaccgggtggacacggagtaacgttccggctgaaaggagcagttccggccggccacagagatcctctggatgtcccctgcttggacgcccaaattggaccccaggatggtgatgcggatgcccccacccagggggcccgtctcaggctggatctgaaaccacagagccgggtgagcagggaggggctcatgccagggacgagggaaggtgtaggccaggcttcgaggggctcaccctggtgatgacgggcggcgggcactcggaggtggtgttgcacagggcctcatacacgcacctgctctggcccccgcaccacgcacacctgtagtcggggttagcggcccggcacaggctgcagtcgctgcggccaaaggagcagttgtagagggtcactgcggggagagctgccgtcagtggtcaccccgtgcctgcccgcccccgacctgctccccactgcgc

SEQ ID NO: 41682 - DNA, 1923 bp, Artificial sequence
  DNA replication origin
acgagtgccgggaggcttcgcccaaccctgaggacggcatcgtccgtgcccacatggtgaggggcctcggggcctcaggggactgttcagggcatggctgctccgctgtgcccaggcagcacctgaccagccttactctcccaggaggacagctgtccccagttcctgggacccagccccctggtgatccccatgaaccacgagacagatgtgaacttccagggcaagaacctggacaccgtgaaggtgcggagggaggggtgccggctggtgacaggcaggctcaggtgcggagggaggggtgccggccggtgacaggcaggctcaggtacggagggaggggtgccggccggtgacaggcaggctcaggtgcggagggaggggtgccggctgtgacaggcaggctcaggtgcggagggaggggtgccggccggtgacaggcaggctcaggtgcggagggaggggtgccggctgtgacaggcaggctcaggtgcggagggaggggtgccggccggtgacaggcaggctcaggtgcggagggaggggtgccggccggtgacaggcaggctcaggtacggagggagggggtgccggttggtgacaggcaggctcaggtgcggagggagggggtgccggccggtgacaggcaggctcaggtgcggagggaggggtgccggccggtgacaggcaggctcaggtgcggagggaggggtgccggccggtgacaggcaggctcaggtgcggagggagggggtgccggttggtgacaggcaggctcaggtgcggagggaggggtgccggccggtgacaggcaggctcaggtgcggagggagggggtgccggttggtgacaggcaggctaaggtacggagggaggggtgccggccagtgctgatgggtgtgtgggaagcctgagctccacccgtgccccccgactcggggcccccacatgaggtagagggcacaggatttatcggggacagaggccaggaggcagcactcgggggcctttggatgggcctgaagagaggcagtggaggaggcaggcgtgtggagattgaggggccagtgccacctcctgaggagggagctgtgggggccacgatgtcaggtgggccgggcgatgttctcaggtgtggatgagtggtggaggtggccgtgggaaacccacagaggacgttcagaggcttctgcagacacaggtgtttgggctcaggagtggccgaggggtcagctggcatggtaatctgaggggcgggcatgtgtggggtgaggagagggctcccacactgtaggcacagaggaggggctgcaggggttctgggaggagggccagggtgccacagccgcctgtccagggtcctgacggcatggtctgcagggttcctccctgcacgtgggcagtgacttgctcaagttcatggagccggtgaccatgcaggaatctgggaccttcgcctttcggaccccaaaggtacggctccagggcaggccggctcggctgctggaccccagggccccgggtggggtggggggtcaccttcaggactgtgaggggaggggcagcagggagaccccagggaccagagcccagccaggggctcgccatgccctgtgctgctggggaagccccctctgccctctgcctccctggggacagagtggcacagagcagcgtccatggggttcccgaacttccgacacctgaaggcctcccctgctgcccttggctgggaagggacccggtggccacagggaggctgcccttgtgacccccgccccacgcccctctgtgggggcaggaagtgcagtgtgcccctgcgtgtcccccagctgtcccacgatgccaacgagacgctgcccctgcacctctacgtcaagtcttacggcaagaatatcgacagcaagctccatggtgggggcc

SEQ ID NO: 41683 - DNA, 1164 bp, Artificial sequence
  DNA replication origin
ggacccctactgcggctggtgcgtcgtcgagggacggtgagtgcctggggtggctcggggacacggcctgcctctgggatcccggaaggtcgtggcctgggtcggggggcacatcgcactgtcctgtcccgggagaacaagactccaccctgggctgaggccgccccctgcgcctgcagatgcacccggaaggccgagtgtccgcgggccgaggaggccagccactggctgtggagccgaagcaagtcctgcgtggccgtcaccagcgcccagccacagaacatgagccggcgggcccagggggaggtgcgtggtgggtctggggtgggggtcctgggccccaggccgggccaggtgggggctcccccatgctgggagctgttgggacaggcaggggagggctccacatctcccccgcctgggctctgggcaccgagccttagggatggagcccgccctccattggtcccctggacccctatgacctgggcgggcaggggtggggcttgtccatatccagggtggactcaggccctgtcccaggagttgctggggtgaccacagagaggcctgtattggaagacgtggagtcgggttctggaggctccactgggacgtgcgcccacacacgcagggaggtcgggtcaccggcaggtgggctgacaggactcggggttcccagtgtgagcggcacggcccctccctcaggtgcagctgaccgtcagccccctccctgccctgagcgaggaggacgagttgctgtgcctttttggggagtcgccgccacaccccgcccgcgtggagggcgaggccgtcatctgcaactccccaagcagcatccccgtcacaccgccaggccagggtgaggccccttcccgagcccccgggtggcccttctcggtcgcacggggccctgtgcacacgggctctcgcctctgctggcccctgggtgcaggctctgcacaggcacactccgcggctgctccgggggcccagcctgaatgaagcctgtggtggggttgctgtgcctgttggggaggttctggcttcttgggctgtccgcagccacgccccccaggcctgtagcaaaggtgacttgtcttcagcctgctccctcatcacgtccggagcggcatgtgggtgccaggcgccaggccccgtcgt

SEQ ID NO: 41684 - DNA, 1721 bp, Artificial sequence
  DNA replication origin
caggcgtccgttcgtgggtttgcgtgtcccagcctgctggggagggtgcacgtgagcagtgtggccgtggctctcgccagcctgggcgcttgcgtgggtgggtgccgcatctctcaatgccattcacgctggcgccagtcccaggcctgtgtcgggcactggggaacacaacagtgagcacggtggggctccctgccatgtgggttctgttctcggggacgtgtgtaggacgtgtgccggagggaagggaagggcctgtcccgagtcttggagcgcgagtggagagggcccttcaggacagggggtctgcctgccattgacacgctgtggtccgcagggctccagcaagagcttcccatgtggctcggagcacctgccctacccgctgggcagccgcgacgggctcagaggcacagccgtgctgcagcgtggaggcctgaacctcacggccgtgacggtcgccgccgagaacaaccacactgttgcttttctgggcacctctgatggccggatcctcaaggtttggcccaggctggggcggggaggctctggagggcccgtctgtgcacaaggcccgtaccctcaccggcctgccctcgcgcacacaggtgtacctcaccccagatggcacctcctcagagtacgactctatccttgtggagataaacaagagagtcaagcgcgacctggtactgtctggagacctgggcagcctgtacgccatgacccaggacaaggtgagccagacgcagccccggagagcactctaggccaagtgtgcccggtcattgcatcccaggcccttaggacaggcctgggggccagaggaggatggggtgctgcagagctgggcccttctccttggtctggatgaggggtggctgggtgggtcccgggcagtgcctccatcctgtgtctctctagcactgccccgtctctgccgctccttctgtttgtcctttgtggtctcaaccatgtctctccctctggccccgcctctgccctgtcctgatggaagggacctgggttggtgtctgaggcgtgttgctgagggtggatgggaagacggggtccctgcacagcccatgtgagctcagtcagtggagaacatgggcctgggccccaagcttgtggggggttagtgccagagaccctcaggccagccctaggagcacccctcggagggagccagtgtagaggacaggagctgccccgggagacaccatagccaagacctccaggcttccctgggctcccatcgggatcctgggccaggcatggccacccagagccagaactgtttaatatcaagcctgaggtgtctgaggctcccgaggccccgggacagagctgggtcaagctggcggtctggggacatctggggtctgcggaaggcccgtgcggcctctgctgtggtcccactcacggccccgctgccctaggtgttccggctgccggtgcaggagtgcctgagctacccgacctgcacccagtgccgcgactcccaggacccctactgcggctggtgcgtcgtcgagggacggtgagtgcctggggtggctcggggacacggcctgcctctgggatcccggaaggtcgtggcctgggtcggggggcacatcgcactgtcctgtcccgggagaacaagactccaccctgggctgaggccgccccctgcgcctgcagatgcacccggaaggccgagtgtccgcgggccgagg

SEQ ID NO: 41685 - DNA, 1105 bp, Artificial sequence
  DNA replication origin
ggagccccaccgtgctcactgttgtgttccccagtgcccgacacaggcctgggactggcgccagcgtgaatggcattgagagatgcggcacccacccacgcaagcgcccaggctggcgagagccacggccacactgctcacgtgcaccctccccagcaggctgggacacgcaaacccacgaacggacgcctgcagtccgggccctgcgagaacacactgaggcccataccggcgcgtggccgccgcactggatatcgccgtggaagggcttgtagaagatgtcacgggcctcccgggtgcctgtgtaacaggcgttgcggttggcctccatcttggcgtgcaccttgtccagcgggaacaggcagaggcccgcaccgggccccccactgctccggctgtctctgctgaagacagcatatagcaccctgccagagccaggcgcagccacggaggcggccaggcaggtgccaaaggcagcggcgtggatgtcggggtcccggcactgcaggtccatctccaggtaggagtagtagttggggtcttctctgcacatgcgtgccagcagcgtgcggttccgggccgggtgcttgtcctgctggttgaagacaaagaagacgtaggggccgtcctcgaaggccgccacgaactgctgtgtgttggtggacaggtagccggccttgtaggtggcgtggtccgtgtaggcttcaaaggcctccctgctgtcagtccggtccaacagccgagtgctcacgatgatgccgttgtcgtgtggcccattgcctttgcccacaaacagcacgcggtcaccaccaggacccgtggagctcaccagccccactgtggccacgccctcatcattgctggccacgaaagacttctccccgctgccgtcctcgtagaacaggcggagggagatgttgctcagggcgcgcagagcgcagatgcccttgaagaggctgccgcactccaccaggcgcttcctgggagggtcgagcagcagcagctggttgacattgtcagtcatctcagcctcatggcactggctggcctcgatgggcggcgtgcacttcttgttgtccagggccgggcccgtggccacctgctg

SEQ ID NO: 41686 - DNA, 1099 bp, Artificial sequence
  DNA replication origin
gtgagagggacggaccaccctgaggaagagctcagaggcagaagggccctgtctctgccacttgtgtctgagcccccaagatgcagttgagtctggtagggagggaaagagagaggaccacgcatgtcctgggtccacctgtggggccttggatcttcctcctattgggagaccctcagctcagcctggtcctcagcagctcacccatcacaccacacatccccctcatccacccggacccaggcacagaccccacaccgagacgtgctcagttacacacacgcatgtggacacagcctgtccaggctgcagatgtgggggcctctgcctctgagacctggtggatttggagttgctcatggctccccaggtccccttgttgcctccgctgtgcgcacatcagaggctgtgccctgggcgtgacatgggccgagcgaggagctgtgggtgattgctggcttccactgtttcaccagggcagggggcctggaggtggtcagggaggctcaggccgcctgggggctctggcgggcagttgtaaacagcatgtgcacttgctgggctatgcacagggcacccctcgctctcacctgagcctctggtttcccgtgtccttcacctctgccccatgggtgagccacctgttccaacgtccaggggtctgtctgtcagcctgagcctgtgcgctggggccggtgcgtcccgaccacctggagctccttggggtcacaggtcagggggcatgaatgtgagcacttgagagcctttctgggggcgtcaactccttgcctcggggataggcctgccggtgttttcagcacctccgggagggatcctgtagcaggcgatggcagtgccttggccccagtggtcagtcagggtggacttgaggagggctgagaagtggtctccggcgagacctcgaggatggcgggggtgtgaagcaggaaggggcggagctccaggttcctcagttcgtggagtggcgtgaccctctctcccatgttctgacgtttggggcagggactggagagggatttgatcgggggtcctctgggtcggggctcccctgacccttctctcttcccacagggtgcgg

SEQ ID NO: 41687 - DNA, 1217 bp, Artificial sequence
  DNA replication origin
actgcatgtcagaatcccagccccacccatgcccgcggtgtggccttgggtaaattctgctccgtgcctcagtttcttcacctgagaaatgggtcacaggctgtcgtggtcagcctggccgtcagagacacagggatgtggaaacatttgcattttgtggcttgttctttgtacacttaaaactttttttttttttttttttttttgagacagagtctcgctctgtcacccaggctggagtgcagtggtgcaatcttggctcgctgcaacctccgcctcccaggttcacgcgattctcctgcctcagcctctggagtagctgagactacaggcgggtgccagcacgcttggctaatttttttgtgtttttagtagagacggggtttcaccatgttggccaggctggtctcaaactcctgacctcgtgatccgcccgcctcggcctcccaaggtgctgggattacaggcgtgagccaccgggcctggcaaaactttcaaatatgtggtgagaaagcggattgcgtttcgaggggatgagacatatgcagggaggtgacacttgtggtggcctgagaggatgtggcagtccctctggaggcacggggtgggcctgcacagggaggtgggggaggccagggcctccatccctcgtaaccctctgccatcgagtctggacccccttggcacctgccatggcagggctgccctggacacctgggagccccccgtactggtgcactcagggaagatgatggtgggcccaggagtgggggtggttgtgagcatgaggagggggcactggcaggggaggctgatgtagggatcactggccaggatggagcagggtccctagcgtgagagggacggaccaccctgaggaagagctcagaggcagaagggccctgtctctgccacttgtgtctgagcccccaagatgcagttgagtctggtagggagggaaagagagaggaccacgcatgtcctgggtccacctgtggggccttggatcttcctcctattgggagaccctcagctcagcctggtcctcagcagctcacccatcacaccacacatccccctcatccacccggacccaggcacagaccccacaccgagacgtgctcagttacacacacgcatgtggacacagcctgtccaggctgcagatgtgggggcctctgcctctgagacctggtggatttggagttgctcatggc

SEQ ID NO: 41688 - DNA, 997 bp, Artificial sequence
  DNA replication origin
gttgcctgcccccgctggcgccactgggtgcacttagaaggcgggggcctgcgggacctgcccccgggtggctgtgggtaggggaggggcgcggcgggggttggggagccttcgggcaggcgctgctcctccctggtagggccatgggctgtggctgtagcctacgggcctctcctggaggcctgggactcctgtgccctcctctcctctcccctggacaggccactgagccacagcgggggaccctggctgagctgggcatagaaccccctccaccaggatcatgcccagaggttcccgtgggcttgtagaatcttcctgtctctcactaaagccagcatcttttcctggctgatcacccctatcctggtgaagcctggggtcccatggccctacccagcctctctgccaccagtcggccaggaactccctagcctgtgggtggtcacctctcccagcggctgctgtgctcgtgggcacctggggggctccaggggttgggcagcagctgagcactgaacccccagtgcagggagggagttctgtgccgggcaggagctgcctgtctaatgggtgcactcccagggagcaggaaggccagtgcagcgctgtctcactcatgcgggccctggggtggctcagatgttgtcggtcggttgcgtcttggttacacctcaagagatttcaggaagcgtgcgggcaatcagaacggggggttgccacgggcaggtggagggcggctgtgccagtaaatgcagcttcacccaaagccgaggctcgggagaaacacttcccctggctacggagcagcagagcgggctcccctgccctcctgggaggacagaggccagggggtttggggggttgtcaaaagggtggagaaacacagtggtcagaggccaagctgctcccactgcatgtcagaatcccagccccacccatgcccgcggtgtggccttgggtaaattctgctccgtgcctcagtttcttcacctga

SEQ ID NO: 41689 - DNA, 841 bp, Artificial sequence
  DNA replication origin
tagggtgtgccagcccccggcagggacaggagagccttcttcctgtaccggggcccctacagccctggcgggtgggtgagtgtcttccctgggtggaagctgggggacggctgaggggtggcttgtgggggcccagagccattgcttttcctggggctaggggcgccgcagggttccccaggctgccccaccacggtccgggccagatccgaggggaccgtgggccccgcccccgcgctgcccccgcattcccctcccagctgcgggcgcattccattcattcccgggagctgcgcctggctgaggctgcctctgccactgccaccgagctgggccgggtgagcgagctgggccgggtgagcggggctgggaggggagggcagcaggcctgggcgcagggccgaggggcctggacgttgcctgcccccgctggcgccactgggtgcacttagaaggcgggggcctgcgggacctgcccccgggtggctgtgggtaggggaggggcgcggcgggggttggggagccttcgggcaggcgctgctcctccctggtagggccatgggctgtggctgtagcctacgggcctctcctggaggcctgggactcctgtgccctcctctcctctcccctggacaggccactgagccacagcgggggaccctggctgagctgggcatagaaccccctccaccaggatcatgcccagaggttcccgtgggcttgtagaatcttcctgtctctcactaaagccagcatcttttcctggctgatcacccctatcctggtgaagcctggggtcccatggccctacccagcctctctgccaccagtcggccaggaa

SEQ ID NO: 41690 - DNA, 1230 bp, Artificial sequence
  DNA replication origin
tccacagatggagaatgaggcacagagaagttaagtaacttgcccaacgtcacacagctagtaagtgaaatttcagggtcatgggtgtgcgtatttttcagaaagcaactttttttttttttttttttttgagacgaagtcaggctggagtgtagtggtgcgatctccgctcactgcaagttccatcggccgggttcatgccattctcctgcctcagcctcccgagtagctgggactacagctgcccgccaccaggcccatctaatttttttgtatttttagtagagacggggtttcactgtgttcaccaggatggtcttgatctcctgacctcgtgatcctcccgcctcggcctcccaaagtgctgggattacaggcgggagccaccgcacccggcctcagaaagcaacttttattttaagcaaagtaatagccatacctagtttaaacaggcagaaagcccctgacagaggggagtgccaggagccctggaggtgtctgaggaaggggctgtgcaggggccagagggaagccaaaggccagatggggtcctgtgggatgtttcttcccccaagccccaccagcatgggacagaggtggggggctccacagcagaccgggctcctcttgtgaccggcgtctctcctttgcctcctagagaatctcgatgctggcctggagcagaaactgagctggaccactggagcctcggtgaggggtctgtaccccacctgggaaaggcagtgggtggctggggctatgtggacagggaggccggaggtatctagaactgccatgtggtgtctgcaaggctctgtccagccaggtttcaaccgtacctgtcactctgccacccttcccatggcctggcctggatggaagtggggagcttccctgcccatggagccgctgtgaggctcccatggttctctgaggccaagctgttgctcaggccaagcttttgctcaggtggagtggtctgcagtgagactgtggcaccgggttctgggacatcagggctgggaattggagcgttgggggtgtggtgggggggtgcctgtgcagacgctttgtgggcagcagcagctggagttgctgtggcctggtctggatggaagtggggagcttccctgcccagcagcagccggagttgctgtggcctcttgaaagtgcccctccgagcttcagccaggaggaaggcaccagagggcccgaggaaatccccgccag

SEQ ID NO: 41691 - DNA, 813 bp, Artificial sequence
  DNA replication origin
ggctcactgagtttggaccggcaggtgcccagtgaccagatccagtgtttggacttgttggggcagggcggcggggcagccggggcctgtcggggaagaccatagaccacagagcaaggccagtccctcaggggctgggttagggagggtgtctcggggtctaaaggatgggcaggggctttccagggagcacagtgaacatggacgtgggaatgtcgtgaggcagcgttctctgagtgggcacagctgtaaagatttccacacccactcaacctcaaggcagccctctgaggtgggcgccataatgacccccaggttacatatggggaaactgaggcacagagcagctttctgaatggcccacatgagccagctagaacgtgacagagctggggtgtgaactcactggtctggctctggacttcaggcctcgaggtccctgggtgcagcagcgtcaggtgtgaccacagccacctaaggaagaaactcctttttctggggtagctaagcgggaatcttgtgagcaggagatggagcctggctcagtgttgagggcaagatggatggaggtgggagaagccagaggccgggcagaggaggtagacttgggccaggaagggccccagactgagggtggagggatcatggtgttattctctgggaggggaaatccatggccgttctccacggtgagggccagggaagaggacggcagaaagcctcctccaggagagtggagtatgggtcttgcctctggcttcctgagtggatcgatcactcaggggaggttgttcgagggcgtgcgggatgggc

SEQ ID NO: 41692 - DNA, 2251 bp, Artificial sequence
  DNA replication origin
tcgcggggggcagtgggcggcgccgaggaggcgcgggcctagtccctgcgcttcctggccccgggcgcgctttgcccctggctcccgggcaaccgttctgcgccctccggggagtctggcggtgccggcgccgggggaggggctgtgccacctgggtcggcctgcgaggaatagtccagggcgctccacacaggccgggtgcccgcctttggctctggccgggtaccgggctcgcagacccacccaggagacaccgccccccgcctcccgggctgaactctgacccgggtcaccggtgggtggggctgggtggcggggccgccggtctcgccctcgccgggtctcccgcgcgctctccacccagtccctccccgcgcctacccacgggcgcggcgctgcgggaaggggcggccggggtccttgccgaccccccagccccacgccccgcggcacccccctcgcgcttgttttgaaaacagcggaggctgggattcgccggcgcgtctgttttgtttcctctgatgtgtttagcgctctgggataattgcagatttgcgtgtgtcgctagctttggcccggccccctggctgctggctgcggggcctccggggcctccgtggcttttctgtgacgcctgtcgccccgttccgggacagccactctcagacgcgccttggcctgtgcttggggcagcctatcgctcacttggtccgaggctgcttcccccgcccccgcaccgggccccccccccaccccacgcagggcctgtgtccaccccaatcctttgagccctggagggccgcacagccctaggacctctgccttctccaccgcccatgtcctaggtgctcatgccaccccctcctgccctcccaggcctaggcccgagctctcctcgttcttcatggcggctgctgcctggatccccatcttggcccctgccgggccgctgcccatgcacctcctctggcccctgccctctctggttcccgtgccagagcccacagcctggcctggccaagagcagcccccaagctgggcctgccctcccactgggcctgactgctttgtgctggtttgattttagcattaagaatggtcagtctggctgggtgtggtggctcacgcctgtaattccagcactttgggaggccaaggcgggtggattgcctgagctcaggagttcgaaaccggtctgggcaacacggtgaagccccatctctactgaaatacagaaaattagctgggcatagtggcgtgcacctgtagtcccagctactggagaggctgaggcaggataattgcttcaacctgggaggcaggggttgcagtgagccaagatcatgcccctacactccagcctgggtgacagagtgagacctgtctcagaaaaaagaaaagaatggcccagtctgtttgcttgaaaatactgaaaggcagagaactcccaattttagtccccactggaaccaccccgcagtgcagccaagacttggggcggtctcagaaccaaggctggcaggagtttgggggcctggcagcccccactcttggcctcatctggagtagggctctgtccttcccccttacatgcctcttgtttacctttacccagtgggaggggcgggggccagactcagcccgtgcaaggggcctgggggctgctggtcagaaaaaaaaaacaaaagggacctcaggagagggccacaggtgcccagccagcaagcagctcctgctgcctcccaggctgtctaggttgtagaggggaggcccagcatccctgtgctgcccttggcctacatcggagttctggttgggggaggagacccttctgctctgttggcctgggggtgacctgcggggacaggtcttctgggctcgcgcccctgcatgtcaccaccccttcccggctcactgagtttggaccggcaggtgcccagtgaccagatccagtgtttggacttgttggggcagggcggcggggcagccggggcctgtcggggaagaccatagaccacagagcaaggccagtccctcaggggctgggttagggagggtgtctcggggtctaaaggatgggcaggggctttccagggagcacagtgaacatggacgtgggaatgtcgtgaggcagcgttctctgagtgggcacagctgtaaagatttccacacccactcaacctcaaggcagccctctgaggtgggcgccataatgacccccaggttacatatggggaaactgaggcacaga

SEQ ID NO: 41693 - DNA, 1901 bp, Artificial sequence
  DNA replication origin
atgagcagagcaagcctccgcgtggagcaaggggctggacctggcctccaggggcacccacctccccacacagctccagccacgggcatcacctcccactcactgtcctgcccccactctgagatgggcatttcctcactgggaaatccctgtccctctggcctcccaaagccctgagtgtttgcccctgtggggcccagcccacaccctgggctgcctcacccttggcctggacccaggtcctgcccaacaccctgtgcctcaccagcccccagctcatcctgggcagacgcagcccctctcccctgctgagacggccctgcccccaccccacttccccatgccacacatggcccctccctcggggctccaggcagcgctgggttctgagagccccactgcccctcttagcccaagtgccccggcctgaggcttctctcccaggctctttgtactggggacgagttctgggtgttggggtgagaccctgttggcagggcttttccggcagcacccagccatgtgtgtctgcacatgtgtggtcatgtgtgcaagtggtgtctggcacacaggcttggcgcggtgccccaagctaattgtggggttcagcggtgatgggcgaggcggggctggggtgaccgctgaggcgctgacaggctgacggggagattacaggccttgcttactgctcactggctggggcctcacccgtccaccccccaacgcccaccccgggggtgagaagggggctgtgggcgggggctggtcttgagccagctgcatccaggcaggacctggtctctgagcagccggctgctgcggggttgagctggaaagggggagatgcgtgggggccactcagaggagagcctgcaggtggggctgggcaccggcgggccgggaggcctcctttcaggagagactccaagtgactgagccccagaatcccacgagagtccctccgtggccgcctgctgtctgaccgcatgtcctgtcctgatgagttggtggttcctgctgtagccatcggcctcgtgtgccccgagcgcctggcggtgcccacccctcccacaggaggtcctcaggaagcacggagacatcggtaggttcattgcgctgcccagctttctgacccgaaggaccacggtgtagcaagagggggctgcagctgtgcccaggttggacaggatggggtctgggaccccgaaaggggtggttgaggagagaggtggttctgcaggcctggtgcgtgtggggacagggcgccgtagccaactggatcccaccttctgtctgagggctggggaggaccatcctccagatgcgccagtgggccgtggccagagaggaggctgaggagggcctcacaactgtgtgtaggatgggagggcagcctggggccccagtctagggacgcaccatatacaggggctgcacttggtgcagaggcggagagggggctggggcaggccccttgggcatggccaggtgagctcagggggtgcctgagggccagggctagatacagaggccctgggtaccaggtggcctgggtgtgtcaggaggtgtggaccagtgggggctgtgactaactcggctggagcaagtgacaggaggagctggggcttcatggggcacccccaggatcctgggctggtgaccccatcactgccaccagccagggtgacttttcctgctgggacccagagcccagactgcaggggaggctggccctaagtaggaaccccaccctgaaaccaggctggcggggaaggggtgcgacggcctccacctgggaggggtcctcagccgagagtccagcggggaccgctgtagacgctgaagcgaggctcaggcctccacatcagtctgtccctggagccccgccccgccccgccccg

SEQ ID NO: 41694 - DNA, 1725 bp, Artificial sequence
  DNA replication origin
tgaaagccaatagttcctcattccagtgccagctgagtcccggcccaggcctggggcaggagagggaggtgctgccccagttcagccaccagctctgccagcagggtcccagcagcagcagcatcagaggcagggactgggctcctgggggtagggccccggcccctctggcacagctggtcagcagcttccatggggggccctgtgtggagacacagtgtccagcaccgatttctgggcctgatgctgccccagctgagtcccgcagcaagcgcaagagagagaagtgcttggtgtccacctctgagaaggcctcctgtgtgaacacggccccctgaggggccaggcaagggcgtctgctcctgtggctgggacggttcctgcccacgagccttgtgtagggctgcggctctcttcccaggtgaccttctgttgtggtctggggcccccgagccagcatgccacctgctcagagacagattgggccccctgtcagattggcgtctgggggcactgtctgctccttccaggcagctttgaggacttctcagaggaggaacccccctgccctgctggtccaaagtggggtgctgaaggccgaggcagtttccagggggctatgcctcaggctgcgtgggtggctgtggtaggagcgtgctctgtgattgtcactgcatttgcctggggtccatgctctgtcctcagctggggtctggctttgaacctaggtgagttctggggctctgaggacaggccagaagcaggagtgtgggggggtctctcctgggggaagcaagggaggcctgggcctgtgtgactcagacgtggtagggtggcatgggagccacagcttggggggatggcggggggcttgagggtaatccaagtatttcagggacccagccatggagagtggggtttgaggaccagcaggaggtgaggactctgtggatcccagccctgtcaggtgtgttttcagagctggggcctgctttggaggagatggagggcacagaacactgctgagcccaggccctgtgcccagccttgctccagccttaccggcttgacaccagggcctccctcccaccagcgagggggagaagctattttaagtggagccagcagttgacaggggcaaggggcaggtggtgggagggaggtgctccagcatggccccccccactccctctcagcctcagagattggccaggggagctgaggggcttggcctccccactcctatgttggcaccgagcctgatctggtgaccaccctgagggacttcaggagaaaaggatgttagggaggagggcgtgaaggtggggcgccccaggcaggccgcccaggcccagcaaagctcgctggagggtcccccagttccacatctagacctggggcccagtggctctcgaccaggccctgtggggtttgaagtcctcagctccaccatgagcagagcaagcctccgcgtggagcaaggggctggacctggcctccaggggcacccacctccccacacagctccagccacgggcatcacctcccactcactgtcctgcccccactctgagatgggcatttcctcactgggaaatccctgtccctctggcctcccaaagccctgagtgtttgcccctgtggggcccagcccacaccctgggctgcctcacccttggcctggacccaggtcctgcccaacaccctgtgcctcaccagccccca

SEQ ID NO: 41695 - DNA, 1027 bp, Artificial sequence
  DNA replication origin
tgccccagtagaggagggaagttactgagaaaaacaagggtttggaatgtgagtccccctcccccaccggctgcctgccaagaaagaattattttggatcatccagccgtgtccagtcacccgaagcgggaggctgcagcgtgggagaaggatccacttccgggacgtgggttgagggccccaggaggaggacgggcaagtccgggcagctctgccactttctactgcagctgcccagactgggcggggagaagatgcgtcacctttgggttggagaaagccccaaggttggccccagcaggccctgctgagcctgcagtgggcccaagcccctctgggggagaccatggaacaggaggagctctgggcccacccagggaccccctcgccccacccagggaccccctcgccccgagaagtctcaatggtggtctgaagagcctctgaggtaccctccaggcccaagttcagggacacaccctgtgccagtgacctgtgcgtgccagggaggagcaggcaggagcgaggctaggctgctagggagggcactggggtttccctcagggggccctcctgccccaacggactccctattcagctcctgactaacggaccagcctccctccaagcccctccgacagccagtccttgcctacgaccccctctggatatggcgcctgtgagcccatcctgcaggtggggagactgaggccagagataggtctatgtgaggagtcatctgcgatgctgtgtggccagggctgtggctacctggcgctctgggtccatgctgtgtgtgcgcccggggtgtgtgcccggcggcctgcatggggaccacatcggggaggaggagccggcagctggccccaagtgcagaaagcccagagccttggacccggcccagggaagtggagcagaagagattggattggaaggtggtggggagggcccatatggcacagtcctcctcccatcccaggacgtcgtccgtgctcaccgtgtcctgccccctgcctcaccctgtgcc

SEQ ID NO: 41696 - DNA, 1109 bp, Artificial sequence
  DNA replication origin
ggcgagaccccactgcctgggcctcctcgcggttcccagagtggcgtctgggtggacaccccgagacacagaaagtctcagaagcgggggcgcgagccctgcctgtcccctgctgaccctgcccctccgcaccctgctcctgcaggaagcccctgccctgccagcgcccctggtcgggctattcggcagatctggggagcccgcctccccctgtcatctgggggtctcagagcccggacgccctggggcttcctgccaggcccttgatttctcttcccgaagctccctgggaaaggaagaaaggggtccgtctgcccactgtgggctgtggcagagtcaggacagggggtgagggtgagggtgagggtgagggtgagggtgagggtgagggtgagggtgggccccaaacccggcagatcccggcggcctggagggctccctgtgccccaccttccctggacccccccgccctccccacttaatgtctgacttcggcccttgcttggaggttcggcgcagcctgtgaggctttaaagttgagcttcctcaggagccctttgcgggtgggagagcgaggctgccgggaagtgggggctctcagcctgccccatgcccagatgaccctggcacggaacagctgaacagctggtgggaggagccctccctttcctgtccagaggtgagggtctcccggagggcagggccagcaggcataggtttgtggcgagtcagctttttgcatgttgcatagaaatccccagagccgactgagaagcaagcaggtgggcctggcacatctgagtcctcccacggtacctatggggggcccacctctgtcccggggggtctgggaggcctgaggtctggccaggggttccttgccccagtagaggagggaagttactgagaaaaacaagggtttggaatgtgagtccccctcccccaccggctgcctgccaagaaagaattattttggatcatccagccgtgtccagtcacccgaagcgggaggctgcagcgtgggagaaggatccacttccgggacgtgggttgagggccccaggaggaggacgggcaagtccgggcagctctgccactttctactgcag

SEQ ID NO: 41697 - DNA, 1658 bp, Artificial sequence
  DNA replication origin
cagacccacatggctgcaggggaggggcttcaggctggtctctgaggagcccccagggaccctggccactgtgtatccagaaatgcacaagcagatttccctggagggctctggtgaggccacatagtggcgtgtgaagggggaacttgaggggggaaccgggctgggtggccagcattgccctgggcagaagctaaggctaaggtggggggtagtgtcccagcccctcttcctcagggcctgtccccacctgtgcagaagaggcctggggtggaatgtggcctggggtggatgggtgggggctgggcgtggagacctgccagctccatctgtccggatgcctcttgtggcccccccagtgtcagggccgctctgagttggctgagcctctgtccagggctaggccatggccctccccgccccacgcactccaggccaggggcagtcagtgaagaggcaggaaggtccagacagctctacccctggccagagtgccagcccccgcaggcaagagggcttgctgggcagaacttagttggcgagggtgaggactgctgtggtcacaggcctcccgaaggacagggaccacagaacctagagggtgggaagggctgggagcaggtctggagtggggctcggggctgagggtgcacacagggggcctgctcagggacaggaaggacagctgctcaccctcaagcttcctgctggctatttaaagactcccttttagtctagaacagtggccttcccacagttttggtattaaaatgtccttttgtgactggaccttgtcttttccttttttgataaaaagttggcaaccttgtcagaacctggtaattttggggtcctctgcagtgaagggtagggttgccgtgatgtggattgtggttcaaggcccaagggaagattttggacaggaacaaggcctggctgcttgagggtgggagaaggcagagactgaaagaactaagtcaggctgggggagtttgtcaggatgtggcggggcggatcccgggtgggggaagcagaggaggaggggatgcctggctggggacaggaggaagctgaccagctgcaaggacggggcaggtctgggtggaaggcgggccccagggaggggtgacccagggtgggggcaagagcttggggaatgcttctgtctcctgctcagcacatccagttccgggagggcagtggaggcgtgctccaaggtctggccctgcagacggttcaccacctcttctcaagcccaggggacactaggagcactgaggccaggacttgggacctgggatgccagaagtggggccagctctgtcccagaaaccagaacccccagaaagaggtctcggcccgcccacctcctggccctgaaggaccaggtggggtcccgggtgcagcatcccaaggtgctgctggaggccagggatgtgctgggaggccatctccaggtcccagtttaccctgggaggttgagggcctgagacccctgggaaagggccaaagcccagcagcccccacccctgaaggccgcaggggagcgactggtatgcttccagtctgggagtgagagtctggtgcccacacatctcaagactggcagggaccctcacgttcctctggccaggcgagagtgcactcataatgccctc

SEQ ID NO: 41698 - DNA, 1240 bp, Artificial sequence
  DNA replication origin
catggtcagggcaggcgcagctccgtgccaggctggtggcgctgggacaaggctgggaggcatcttaccagcttctcacgaagtttcaggaccaggtccacgacctccacctcggacttgtctttcatccaggtctcgatgttctgcagggcaagacggggtctactgtcagcaaggcccctcactgccctgggcctgtgcccacccccaccatgttctggccctccccaacccccagcctctctcaccgcctcacagatagcctccaggtgcagggcctccagcttcagggccatctccttgtgccgctgccggtaccagccatcaaaatggggggacttgaaaaaccgcctgtggggattaacaggcggggggccatggggctgaccctggggattgacaggcgggggccatggggctgaccctggggattgacaggcggggggccatggggctgaccctggggattgacaggcggggggccatggggctgaccctggggattgacaggcggggggccatggggctgaccctggggattgacaggcggggggccatggggctgaccctggggattgacaggcggggggccatggggctgaccctggggattgacaggcggggggccatggggatgaccctggggattgacaggcggggggccatggggctgaccctgtggaccaaggagggctcaagctgcctgcacctgcagtccacgcacctgtagagacccagccagtcgcccttgaggatgcaggtgagctggggcccagcatgctccaggctacgcaggaagtcatcctggctgaagggctggatctgggggggagtctgagaggggatgggtgagccagcacgtgggaactcggcctcacaggcctgcacccggtacgcttcccagacacactcctcaccacttctgaagacccccagcccccaccctgcctggcacagatcccaggacagcctttcccagggagcaggccctgagcccctccaagggtcctgccagccacctgccctgtggcccccagtttcacaaacatgatggccttgaggcctgtggctcctgcccagccacagcctcctgctccagaccttccctcctccgggtgaggaagggaacccgccctccatggaccccacaaaacccccacaggacccccaccttccagggcgtgatgctcttctgcaggggcatgaggctggccatgtagtgctcctgggtggggaaggg

SEQ ID NO: 41699 - DNA, 1525 bp, Artificial sequence
  DNA replication origin
gcagacttgtccagaggcagagaaggcggcctcaggcagtgaatctctcctgacagcctctccttgacacctgtctttcagaacctcctgcccactgtgcctatttccactggctgcagacatgtgggcacctgcttcctcttctagacaattctccctccttccttccagaactgtcccaaggggtactcaggatgagcgctgcctcccttgggcagtccccacatggcgctggccatacacacacacacgtgcacacgtgcactcacgcagacacacacgcacacacatactcacacacagatgcacacatgcacgtacatgcacgtgcacacacagtgagctcctcaaaagcagtgtgcagaaccctagggggctcacctgaacaggtccagctcgtggacgctagcaagaaccactggggctggcagcaggttctgagaggaggagagtgaaggtcagggccaaggggaggctggcaccccttgggccccaagcagcccctgcctcacagcacaggggaaggtggagagcacccagccctacaccaacacacagcctgtggctttgcctgggtttgacaaccccgcagggtgaaccaaggaagcaggtgtgggaccacccggcccaggagcaggactcaatcgggtgaagcccagctgtttcagctccacctccgcctcagctcccacctcttggtcaaactgcttcggaggactggactcggacttgtccaccctggatgggatgcgcacctgggagaaggagggagcagctgccagagggagtagggcatccccacacacctgcagagcctactccccagccagctggctctcacctggacaacaacgcccatgacaggtaggttcagggtctgcccaggtgcaggcgccggccactggtcgatctcactgcacactgcggatgcagtagcccgcatcaggaccctccccaaggagaagctgctgccgagcccaccaggggccacagctgggatgatgagaccacgatggccacgactgatggccactcacctgcttccaggcagggcgccagcttgtcaaagtactcgggggcgatgaggcttagcagcgcttggaacagccggacaaagggcaagcgggacaccagcaccaaagactgcagggccacggggccagttagaggcccagtgccaggcctcaccctcgccactcaggagcccacggggaccaccgaagccacgctcacctggagctggcccagggtagcacgtcccaccaacttcacaggacagctgccccaggaacgcctgacttggaccccagaattattagacaggagaaaacccaacactgaactccctgggtggcggccggtggggctggaccctagggccttcggagggaaacgcacggtggccagaatttctagaacgacctccccaggggctgagcagcttttactctctgcctatggcttccaggctgggttgccctgacactgacagtgtgatgaccctccagccatcagtgaggggcag

SEQ ID NO: 41700 - DNA, 1517 bp, Artificial sequence
  DNA replication origin
gacagggcggggggccccgaggacagggtgggggggggcggcgaggacggggggggggcggcgaggacagggcggggggccgcgaggacagggtgggggggggcggcgaggacagggtgggggggtggcgaggacagggtggggggcggcgaggacagggtgggggggcggcaaggagagctggacacagcccaggtggggctgcaggaggggtgggcactgctggaggctcaggccccttgcccgcccacagcccctcctgctgcctgccagctcctgccgctcttgaggtgccagcccagagtggccaagcagcgcaccttctggaagtagcccctcttcacagagctgtccttcacctgcctgaagtacacgtagccgaagtagtgtgccggctccctctgcaaggagcatggtgttagccagccacgccccacccggaccacctggccagccccagggctgggagtggcaaggagcatgcagggactgctgcagatggaaggctggagaaccaggaggctcctggagctgctgtccgtgcactctggccaccaaggtggaggccaggaggtcctgggctcagaaggtgggcaacacccctgctgatacagcagggagtccgctggtgtagtggagaggggctcggggggctgggggccctgggagggcccctgttcaactatgcaggtgcccagccacagatgtgtggtgccaaggaaaagtcccagggaccctggggagaccctggaagagctggcccatcctcagttggggctggtgcctgggactgcagggccagtggggcctggccagctcctctcctgccacacagggcccaggcactctgaaggggcttctcctaccagcctgaccctggcaggacccttggggagcaggggagaagcaggccagagacgcagcccagtgctcacctgcagtgccacaggggccctgctgttgtagtgcctgtcgtcggcatgccaggggctcctctgccctccacactggcgcatgcggaagctgaactgagtgtctccaaggcagcctaagaaggggcagccccaccacacgggtcaaggccgggagcctcttctgcaggccctggagctggtgaccggggagcaagggccctgcgagcctggcctctgctggtaaatataccccagaaaccagcctggctaacacagtgaaaccccgtttctactaaaaatacaaaaattagccaggcatggtggcacacacctgcaatcccaactactcaggaggctgaggcaggagaatcacttgaacttagggggcggaggttgcagtgagctgagatggtgccattgcactccagcctgggtgacggagtgagactccgtttaaataaaaaaagccccagaaagaatgcccagcccaaggggtctgtgtttcccaatgggctcctattctgacttctgtacaccctgcacctacaagtcttagaatatattcgcatagaaaagcaccttcaacttctctgggagattggc

SEQ ID NO: 41701 - DNA, 1354 bp, Artificial sequence
  DNA replication origin
gccattgcgctccagcctgggtgagggaacgagaccctgtctctcagaaacaaaatggcagatgctttcatccagggcccggctcctcactgtctgggggctcagggcacaccttggaagaagccttgttatagcctaaacccaactcagtggagaagctgggcagatgggatgaggaggggacagtgtgcagaggccctcctggcaggcttcaggcagcccaggagacattgcagggcccactgggaatgggggctctgggagctccctagagggaaagtggtccatgtgtgcgtggacctactgggctgggctcccaggctcacctgccccacctgccgcctctgtcagcgcacacctgtcttccaagtcattcagcgcctgcttagcatcatgctctcctccactgtccactcctgggggtgcaggccttgtccggctgggcgctacaggtggggcacaggccctggcagggggagggtgggtgaagactgctgagcaggacggggagagggcctgacagcaagctgccatcatggggcaggggtgcttctgggcctgcatctgagcaaaggctgggggagcagcacgaccggggccctctggcttggcgggtggtgagggagctggaggaccagccaggcggggccccgtgaccatcccaggtgaggggccctctggcttggcgggtggtgagggagatggagggccggccaggtggagccccgtgaccatcccgggtgagggggcctctgggtccctgaagcactacccttctgatgctgtgaacagatgtccgggtgggtaggggcaggggggcccaactgcagtctgggcaagaggtggttgggtggctgtgaggaccaggggtgtgagaaaggggtcaggaagctcacccaattgtgctggcctcttactgagaggggcctggggaggtgggagtagagaagcctctggccggcaggggagttgcccggggcctggtgcctggaggtcagagataggagcgggtcagcaaggagccagacatcacagccagagaaggtggtgtggggaggatgcagcatgctgttggaacacagagaatatggtgtggggaggatgcagcgtgctgttggaacagggagcagggggcgagccagcaccttgggcactgacctgcgccccacagacagatgctgcagctgctgggacggtcacagtccagcagatgctgtcgaggggtgtcgcctcctcggacagatggtgtcaccaagcactctgtcttcctctgcagctggtgtatccgaacgacttccggctcacagacaaggaggtgagtcccggccctcttgggaatggacaggacccagga

SEQ ID NO: 41702 - DNA, 1768 bp, Artificial sequence
  DNA replication origin
cccgcgcgcgtccggctcgctggtgccctgggcggcgcccggccgctggcgcttctcgggcgctagggggcgcgcggccgcgcgggagccgcactgggccgcggcggccgctcgactgttctgaggagcggcccggacgcgcgccgcccccgcccgcgtttccccggcaacccgcggccgccgccatggacgcgctgttgggcacagggcctcgccgggctcgcggctgcctgggcgcggctggacccacgtcttcaggtcgcgcggcgcggaccccggcggcgccctgggcgcgcttctccgcctggctggagtgtgtgtgcgtggtcaccttcgacctggagctgggccaggcgctggaggtgagcgggcgcgagcgcgggcgcgggcgggtgggcagggctgcgcctctcggggccagtcccgcctcgcttggggccctcggccgccccgcactctccctggccttcggccgccgcctcctggaggggcctcttctccgggctccagaagcgctccccaggccgaggagggaaggcgagctgctcggagtcggatcttgtcttcacattgggatggagcattttgcataacctaagtggtactctttcgatttttcccagtaaatgtctcacatctcccccctccattccccaccggagcagtgacaccttcatcccctcagtggctcccgccagagtcccgggcttaccctccgctccgcatcccatctctgggcataggcgaggctgacggctccttctgcaacaaaggtctcggatccgttcctttgctgccatcactgatgtcatccccaccccagctgcaccccagagttcaacctttgtggctctcctgcttaaaaccctgcagcgcctccttgttcacctagcatcagatccagaccccatgggccccgtccctccacctgcgtcttgtggtgttcttgctcgtgggggtctgttcatcggctgtgcccatgggctttcgatgtggtctttctgctgcctgcaggcctccactcacctacccacacaggcagcctcctttcctccagggaggccccgcaggatgatcttctctgtgtcctgtgtaacacacaccagggagctgaccagcacaggggaggcccacctgcagatggagggaggcttccccgcgctggcgcaaggaacctcgtgaggggtagtgagctctctattaccgcaggtgtccaagatcaggccaaatcatcatcatcaggaaagccaggcagcgcgtctctgtggttgggagatgctttctaaggccctgctgaactccaagaggccatgagaagcatatagtcttctaaacagaaaagcattaactctagcactctctggagcccctcccaccacacacggtccccagcaggtgcacagcctcaaacagcatcactgggtgggggctgagtaccaagaagtgtggtgacctgcccagggttgaaaacctttcttagttcaatactgttgcccagattgttccccacaaaatcacaaaagaagttaagaggttcctggccggacgcggtgactcatgcctgtaatcccagcactttgagaggccgaggcaggcagatcacaaggtcagcagtttgagaccatcctggccaacatggtgaaaccacatctccactaaaaatacagaaattagccgggcgaggtggcacactcctgtagtcctagctactcgggagactgaggaggagaatggcttgaacccgggagggggaggttgcagtgagcag

SEQ ID NO: 41703 - DNA, 1291 bp, Artificial sequence
  DNA replication origin
cgggccgctcctcagaacagtcgagcggccgccgcggcccagtgcggctcccgcgcggccgcgcgccccctagcgcccgagaagcgccagcggccgggcgccgcccagggcaccagcgagccggacgcgcgcgggccagagcggccggagcccactgggggacttccggggaagcggccgaactggggccttccagggtccacgccgtctgaggcccgagagagtcggttcggccccggtgttcgcggatcccggctcgcgggagcctcggggccaggccagggaggcagagcaagctgcagccagccggcgccgggctcgtcgggcttcgcaggtccggccagcctacctcgccccaccgcgcaggggccagcggcgtcgcgggcgttttcgtggcggaatggcgtcctcactgagcgcccagccaccaccgcggactcgcgctcgcttcctctggggcccgcgcggcctggggtcgtgtctgaccgcgggtgtccacgcaacacctctgcagtttcactttccgggggaatcgcggggacctggagcgaactcttccctccctcgcgagggccccgggccccgctgtggtccacagagcaccttgaggcccggcgtggaagggcgagtttggggctgtcggtaacttaatgaggcacgcctttgagtcgtgggcctcatgacgtttccgtggaaggcgggccgcatatactgtggtggtcccttcagattaccacgtgttggccagacgcggtggctcacgcctgtaatctcaccgctttgggaggccgaggtggggtggcggatcacgaatccaggaaatcgagaccaacctggtgaaaccctgtctctactgaaaatacaaaaattagccgggcgtggtggctggcgagcgccgtaaccccagctattggggaggctgaggcaggagaatcgtttgaaccccggaggcgaagcttgcagtgagctgagatgtcgccattgcactccagcctgggcgacagagtgagactccatctcaaaaataaaaaaataaaagattaccacgtgttgttcggatcatctggcctaggtgtggggtaggctgtcccatctaggtttgtcacataacaaaatcgcctaatgacacatttctcaggacatagcttcaccgttgagtagcacatggccgtattgttttttgtttgtttgtttctgttgttttttttgagacagaatgttgctcttgttgcccaggcaggagtgcaatggcatggtcttggctcactgcaacctctgcctactgggttcg

SEQ ID NO: 41704 - DNA, 2775 bp, Artificial sequence
  DNA replication origin
gtgtgggtatagtgtgtgtcgggggtgtgtgtggtgtgttggtgtgtgtgtgtggtgtgtttgtgtctatgtgtggtgcgtgtgaagtgtgtggtgtgtttgtggtgtgtagtgtgtggtgtgtgtgtggtgtgtggtgtgtgtgtggtatatgtagtgtgtgtggtatatggtgtgtggtgtgtgtatggtatatagtgtctgtggtatgtggtgtgtgtggtatgtgtgtgtagggtgtgtggtgtgtgtagagtgtgtggtgtgtggtatgtagtgtgtgttatgtgtgtgttatgtagtgtatgtggtatgtggtgtgtgtagtgtgtgtgtgcggtgtgtgtgtagggtgtgtggtgtgtgtggtatgtagtgtgtgtgtttggtgtggtgtgtgtttgtggtgtgtggtgtgtgtggtatgtagtatgtgtggtatatggtgtgtggtgtctgtggtatgtagtgtgtgtggtatgtggtgtgtgtgtagtatgtggtgtgtgtggtgtgtgtagggtgtgtggtgtgtgtgtggtgtgtagtgtgtgtgttatgtggtatgtgtggtaggtagtgtgtgtggtatgtggtgtgtgtggtgtgtatgtacggtgtctggtgtgtgtgtgtgtagggtgtgtggtgtgtgtgtggtgtgtggtgtgtgatgtgtgtggtatgtagtgtgtgtgttatgtggggtatgtgtggtgtgtgtggtagtgtgtgtggtatgtggtgtgtgtgggtgtgtagggtgtggtgggtgtgtagggtgtgtggtgtgtgtgtggtatgtagtatgtgtggtatgtggtgtgtggtgtgtgtgtgtggtgtgtgtgtgtggtatgtagtgtgttatgtggtgtggtgtatgtggtatgtggtgtgtggtgtgtgtggtatgtagtgtggtatgtagtgtgtgttatgtagtgtgtgtggtttgtggtgtgtgtgtggtatgtggtgtgtgtggtgtgcgtgtggtatgtagtgtgtgttgtatgtggtgtgtgtgtagggtgtgtggtgtgtttacggtgtgtgttgtgtgtgttgtgtgattgtgtggtgtgtgtagggtgtgtgttgtgtgtggtatgtggtgtgtgttgtgggtgtagtgtgtgtggtgtgtgtggtatgtagtgtgtggtatgtggtgtgtgtggcttgcgtgtggtatgtagtgtgtgtgtggtatgtggtgtgtgtgtagggtgtgtggtgtgtgtttacggtgtgtgttgtgtgtggtgtgtgattggtgtgtgtgtagtgtgtggtgtgtatagggtgtgtgttgtgtgtgtggtgtgtgtggtatgtggtgtgtggtgtgtgtgtggtgtgtgtgtggtgtgtgtggtatgtagtgtgtgtgtggtgtgtgtggtatggtgtgtgcggtgtgtgtggtatgtagtgtgtgttatgtggtgtgtgtgtagggtgtgtggtgtatgtttcgagtgtgtgttgtgtgtggtgtgattggtgtgtagtgtgtggtgtgtgtagggtgtgtgttgtgtgtgtggtatatagtatgtggtggtgtgtggtgtgtgtggtatgtggtgtgtgtgtggtgtgtgtggggtatgtgtgtgtggtgtgtggggtatgtagtgtgtgtggtgtgtggtgtgtgtgtggtatgtagtgtgtgtgtggtgtggtgtgtgtgtggggtgtgtggtgtgtgtggtatgtggtgtgtgtgtggggtgtgtggtgtgtgtgttatgtagtgtgtgtgtgttgtgtggtgtgtgtggtatgtagtgtgtgttatgtggcgtgtgtgtggtatgtagtgtgtgtgtagggtgtgtggtgtgtgtttagggtgtggtgtgtggtgtgtgatgtgtgtgtggtgtgtgtggtatgtagtatgtgtggtatgtggtgtgtgtacagtgtgtggtgtgtacagtgtgtggtgtgtgtagggcgtgtggtgtgtgtgtagggtgtgtatgtggtgtgtgtgtggtatggagtgtgtggtatgtggtgtgtatggtatgtggtgtgtgtggtgtgtgtggagggtgtgtgtggtgtgtgtggtatgtggtatgtgtgtggtatgtggtgtgtgtctcgggtgtgtgtggtgtgtgtagggtgtgtatgtggtgtgtgtgtggtatggagtgtgtggtatgtggtgtgtatggtatgtggtgtgtgtggtgtgtgtgtagggtgtgtgtggtgtgtgtggtgtgtgtggtatgtggtgtgtgtgtggtatgtggtgtgtgtctcgggtgtgtgtggtgtgtgtagggtgtggtgtgtgtgtggtgtgtgtggggggtatgtggtgtgtgtgtcgcgtgtgtgtggtatgtagtgtgtgtggtatgtggtgtgtggtgtgtgtgtgtggtgtgtggtgtgtgcgtatgattgtgagttgaaacagtgaccagggaaacccccacagggaagggcacagtgcagtcaaggtcccagaggccactcctaagcacagcaatgaccaaggaaggccctgcggggatgcagggacagcagcagccaacggcgggaggtcatcgggatgggagccatgagcaaggggagtaggagaggtgagctcaggtcatgtagggccctgtgggcaacagcagggactttgtcgttcagcctgtgaggcaagagctcctaggggtagggaagatgtgatgtgacctatttcatttcatttcattaaatgaaataaatgactcgctctgtcgcccaggctgg

SEQ ID NO: 41705 - DNA, 1011 bp, Artificial sequence
  DNA replication origin
ccctcagctttgtggtgtagccggcaggagaaaaccgatctaagaactgtcttctgtcctctgtttacccaggacttgttctttaagtacacctggaataactttttgcacttccaagtggaactatgcatagccgctattctctcccacgctgcccgtgaggagaggacagaagccagcggatccgagagcagggtggagcctccgcatgagaacgggaaccggagcctggagactccccagccggccgccagcctccctgacaacacaatggtgacccacgtgagtccaagaagcatccatcttatcagcgccaactgcgccccactcagaccgtgtccatgtcagcgctgacgtgtgccggacctcactgtgcagctgacacgggggcagggctttgaaaagggtccccaggtgtctggtcagacgctcgtagacagtggggcttgagtgggtcttgcagatctcattcctacctgccttcagcaggggtactggtgccttccacgtgcaggcctggcaagggttagcactggatgagatgagttcagtctggcctccagctggaggcccagggaataaatgcccagggagccagcagtgtcagtgatgggagccacacggtggggaggggatgctgagggacatgcaggccaaccagggactgtcacccggatagcaaggccacaggtatatcgtagtgtgaggtggagcccaggaaaaacatctcaggtacaagaagtgatctgtgtcagggcctggaggtgagagaaagtgctgagggcagacagccctagtcgttcttccggacacagagaaagagggcaggagagtggccaaagtggagggcaatggagagacggggagaaggcccaggggaagacaggggtcagggggcaattccaggagttggaggagaagggagagggtccttttctcgggcttcatctttagggcgctcagcagtatgagccccgaaccgcaccctcctctggtgtttggtgaggaccg

SEQ ID NO: 41706 - DNA, 1963 bp, Artificial sequence
  DNA replication origin
ccggatagcaaggccacaggtatatcgtagtgtgaggtggagcccaggaaaaacatctcaggtacaagaagtgatctgtgtcagggcctggaggtgagagaaagtgctgagggcagacagccctagtcgttcttccggacacagagaaagagggcaggagagtggccaaagtggagggcaatggagagacggggagaaggcccaggggaagacaggggtcagggggcaattccaggagttggaggagaagggagagggtccttttctcgggcttcatctttagggcgctcagcagtatgagccccgaaccgcaccctcctctggtgtttggtgaggaccgcggaggctggggctgtgcgtgcgcagcagtcagggcctgcaaagtccacacagacgtggccgccagccagccctgcccagtccagggatgggtggaggggtgcgtgccgccttcagaccctgactcacgctgtccccctgccccgccccccagctgttccagaagtgctgcctggtgcagaggatcctggaggcctgggaagccaacgaccacacgcagtaagagccgctcggacgtggagggacccagcctggccagtcagggatgcagagacgcacctcacccaagccctggtgacgctgcgtgcaggactgcaggatcgggtggagtgtagggtgtgcgacgtggctccacgttctggggctgctgtgcaaggggcccttctactgggcggacagctgcaaatgctacttggggaggggacacagggagccgacaggaagcggtcccgtccccaccaggcacctgctctggcccccgcccagcctggctttgccctcttgtgggtccgctgtccgttcctgatcttccccaggaactcgggccctccgtcagcactcgcacacagggacgcgttattttggtctttccatcttctgcttaatgggtgctccctctggtcaggacacatgtcccgcttattgtcgtgggcccagagccatccccacccgtttgctgtcctgctgggaactgtctggctctgggcgatatgaggagggactccagggagctgggaggggtctgagtgcagctgtggggaagcagaggccgagctgggctgtacagcatggaggtcccgcccaaccctccccttggggtgctgagcctgagcttggtagctggcagcatgggctcacctcctgcgccactgctgccaccagcgggacttaggccacgccacggcctttctgcctccatttccctgtctgtaaaatggagtgagagcagtgtctgtttcctcatctgtctcagtggcacttttggtagtgaggttggggtgagcctgctgcacgtggcaggtgctactcaaacagaagtgtcctggaggagggcagggggcgcggacactgggcaggggccgggcatttgctctggaggtgaacctggaggagggcagggggcgcggacgctgggcaggggccgggcatttgctctggaggtgaacctggaggagggccgggggcatggatgctgggcaggggccgggcacttgccctggaggtgaacctggaggagggctgggggcgcggacgctgggcaggggccgggcatttgctctggaggtgaacctggaggagggctgggggcatggatgctgggcaggggccgggcacttgccctggaggtgaacctggaggagggctgggggtgcggacgctgggcaggggccgggcatttgctctggaggtgaacctggaggagggctgggggcgcggacgctgggcaggggccgggcatttgctctggaggtgaacctggaggagggccgggggcatggatgctgggcaggggccgggcatttgctctggaggtgaacctggaggagggccgggggcatggatgctgggcaggggccgggcatttgctctggaggtgaacctggaggagggccgggggcgcgga

SEQ ID NO: 41707 - DNA, 1129 bp, Artificial sequence
  DNA replication origin
tgaacctggaggagggctgggggcgcggacgctgggcaggggccgggcatttgctctggaggtgaacctggaggagggctgggggcatggatgctgggcaggggccgggcacttgccctggaggtgaacctggaggagggctgggggtgcggacgctgggcaggggccgggcatttgctctggaggtgaacctggaggagggctgggggcgcggacgctgggcaggggccgggcatttgctctggaggtgaacctggaggagggccgggggcatggatgctgggcaggggccgggcatttgctctggaggtgaacctggaggagggccgggggcatggatgctgggcaggggccgggcatttgctctggaggtgaacctggaggagggccgggggcgcggacgctgggcaggggccaggcatttgccctggaggtgaacctggaggagggccgggggcatggatgctgggcaggggccgggcatttgccctggaggtgaacctggaggagggccgggggcatggatgctgggcaggggccgggcatttgctctggaggtgaacctggaggagggccgggggcgcagacgctgggcaggggccgggcatttgctctggaggtgaacctggaggagggccgggggcatggatgctgggcaggggccgggcatttgctctggaggtgaacctggaggagggccgggggcgcggacgctgggcaggggccgggcatttgccctggaggtgaacctggaggagggccgggggcatggatgctgggcaggggccgggcatttgctctggaggtgaacctggaggagggccgggggcgcagacgctgggcaggggctgggcatttgctctggaggtgaacctggaggagggctgggggcatggatgctgggcaggggccgggcacttgccctggaggtgaacctggaggagggccgggggcatggatgctgggcaggggccgggcatttgctctggaggtgaacctggaggagggccgggggcatggatgctgggcaggggccgggcatttgccctggaggtgaacctggaggagggccgggggcgcggacgctgggcaggggccgggcatttgctctggaggtgaacctggagga

SEQ ID NO: 41708 - DNA, 1262 bp, Artificial sequence
  DNA replication origin
tggagcagccccatcttcctgtcaacctctgaggggctcccggggcaggggcgctgcctcccctttgcctgcagcaccccaggcctgcccacgcctgaccactgtgtctctcccccagcaggcgccatgtggacggcagtgtttgatgagccagcgaactcaacgcccacagccccaggagtggtgagggacgtgggttccagtgtgtgggcagctggcacctcagctccagaggagaaaggctgggccaagttcactgacttccaacctttctgctggtaacaaatgcgctggcaggagggggctgtgccaggaagtgcctgtcagggccaggaggcacctgtcccccaggactgatcctgtcctcgtccttgtatgcagctccgagtcagggcccaggtgcagctctccggtggacacagaatgcagccatgctgagggcagccggagccaaggccctgagaaagcctgtgagtaggagcagtgcaggcggcacccagccttgcccagtttaaggcctgaggccagctggcccccctccttgggggcagtgggaggaggtggccggggcctcgcatgctgctacgtctctggtgacattggggtttgatacagcaatgggactggagcagccacgtgtagatggggaggcccccagaggggaggcagcaaggccattgggctggctctgagcctggtctgagtaggtggcacagctcaggtctgcaccctggattccggacagcagcactgggaccccagcattgagatgtgtgtgggtgggttgttggcaggaagctgttctgtggcctgatcagagcccctggcccccagccccctagtcaggctcagaagctcccccagataaggctgagagctccaggtgagtgacagctggctcccaacactggtgtccccggttttggggtcctttgggcttaaaggagctgtggcaggaccacacgaggcggagtgggcccctccctgagcctctgcgtcctcctgtgagaccagggcatgtgtccctgtatcatgggggaggcaacagggttgtttgtgtggagaccccatggcaggtgcgtgagcctgtctgcctcatcatgcggctcccacacaggcacatgtgtgcaggcaacaggctgcatgtgagagggccacatgtatggggaccctatggctggagtggccgcaccctgtgacccctcctgcctcactggacagcacaggcctcctactttgcagtcagcccggcttctccatgt

SEQ ID NO: 41709 - DNA, 877 bp, Artificial sequence
  DNA replication origin
acgaggcggagtgggcccctccctgagcctctgcgtcctcctgtgagaccagggcatgtgtccctgtatcatgggggaggcaacagggttgtttgtgtggagaccccatggcaggtgcgtgagcctgtctgcctcatcatgcggctcccacacaggcacatgtgtgcaggcaacaggctgcatgtgagagggccacatgtatggggaccctatggctggagtggccgcaccctgtgacccctcctgcctcactggacagcacaggcctcctactttgcagtcagcccggcttctccatgtgcctggaacgtgtgtgtcaccaggaaggcccccctgctggcctctgacagtagctcctctgggggctcccacagcgaggatggcgaccagaaggcagcgagtgccatggatgcggtgagcaggggtcccggccgggaggcccccccgctgcccacagtggccaggacagaggaggctgtcggcaggtgtgtggggcgtggcgggggcgggcctgccgggtgcatagggcgtggcttccaggctctgtccccaggtctcagctcccctgagaggaggtgaggccaggccagggtcttctccacactgcctcccccatggccccgtgacccttcagaggctggctgaggcggcggtggtgcccacgcgtttacgtggaggccagatgggagaagtgtggggccttctttcgtggacagaacatcgtgttctctgttgtgagtggttaagacaagaagacagggcctggatgtcccagacagtcccccagggacttgggggagcagcccctaccccagatcccagttggagagaacagcccagctcttggggctctgggcctggctgagccgcctgggat

SEQ ID NO: 41710 - DNA, 1128 bp, Artificial sequence
  DNA replication origin
tgcatagggcgtggcttccaggctctgtccccaggtctcagctcccctgagaggaggtgaggccaggccagggtcttctccacactgcctcccccatggccccgtgacccttcagaggctggctgaggcggcggtggtgcccacgcgtttacgtggaggccagatgggagaagtgtggggccttctttcgtggacagaacatcgtgttctctgttgtgagtggttaagacaagaagacagggcctggatgtcccagacagtcccccagggacttgggggagcagcccctaccccagatcccagttggagagaacagcccagctcttggggctctgggcctggctgagccgcctgggatctgggtaccctggtggtcggggaggggcacagacttttaagtctggcaggcgagcgggcatctgtggggctcacgcagacctcgcctgctgctccccttccacgggaggcctatgattccgagacgcctcagaagcaggatagtaggatggggggcggcggcctcaggactgcactgggggcatccaaatcctgactgagagttggaggcagcttgcaggctggcagaggcccaggctcccttgagcccccaagagccatccctggggagagagtggagagggaggctctccctgtgaggaggttggaggctggccggcccctccagcaagctgaaccccatccgtccccagggccacaggaaggtccctgggatccttcagtaaacagatacctctctggcctctggggtcagggcgtgggttagcaggagggcaggaccgctggggtagatgccagggccaggtaaacctgagggggagggtaggactgggcttgacgtggggaggagggcgcacccagcaacggcacagctgtgcaaagaccctgaggcctgagctcccagtaggtccaggcaacagtggggaagtcctcgggctggattcctctaggaggggacaaggtgcctttcacatctggtggtgcatcccagtcactcctggctccatggttgtgaagggcctgcctggagcggggtgagggtgtcccccagcctcaccgcccaatgcagctcagcctgcatgcgtcccacctgtactacccttcccccac

SEQ ID NO: 41711 - DNA, 1015 bp, Artificial sequence
  DNA replication origin
actaacgccacgctcctgtgcctgccttccccactccccggctgcctgctctcggcctacccagagggtcccatctgcccctatccaggcccacctggcgggaggttggcatctttctcgtgagcctctcctggtgcctgggtccacccagctcggcctgcatgtccctgggagtgactttgctctgggggcggatcgagcaggaggcttcactggggacttgcttgattccctccacgcctcagggctggtctaggggccggcacggctggagaggaagcccccatccctacccaggggatgcagaagctgacctcacagaggcttgggggtgaaagggtgggtggtcatttgaccccagaaggctgttgcaggtccagaggacacttgaggtggacgtcagtttctggctagacccgagctgaagggatggaggccggaggcgggggggggggggggacagtgggctcccaggggaatgcaggttgaccacatctggctcctgccaggcaacgagcagcatctggcagagtaaggggccaacgcccatgggggatggaccctctcagttcttgggaattctgccccaaaagtcctttccctggggtctcagagggcccccgtccttcccttcttggtgtcactgtggcccctcactgctcttttcctattcaaacctgagtcccaccaggcccagggcttcacctgctgagctgttgtgtccttgcctgtgacgaggcctggccaggggtgcaggagcagaaggtggggagggttatagacgctgcaaaggccaagagaacatctgagagtggcagctggtgacctggccagaggggctggtgaggggcagagaacctggctagaggctgggtccctcaggtggtcctctcaggtgggaggcgagcagcaggtgtgggtgaggggaaggttctgatgacagctgcagaggcagggcccagtgctggcaggtggggggccaagaccctcccctggtgggacgttgaagccaagg

SEQ ID NO: 41712 - DNA, 899 bp, Artificial sequence
  DNA replication origin
agaaagactccgactcaaaaaaaaaaaaaaaaaaaggtcagggctgggactagaagccacgactacagctgagtgaagcttgagcccctgagcattgctgggcactgagggggacacggggaggcagcagccactggcactggggatggtcggagacgcaaaagggactctgtgggaagcacaggcatggggggtgcaggggcggccccacctgcaaatgccactcagggtttctggcaggggtgggaaggcagcaagacagggcgattgtaaaatgtaagtatataatgtggtatctggaaaaacaaaaccacttctgaactagagaacaggtggtccggacacaggagtgagtgtggggcctatctgccaccccgtcctggggccagtctagctcagtgtgtgcagggcgcctgtgaagtgtgcgtggcggtggggacagagacagcaaggccagctcgggcaaggcccaaggaaccaggacacacgaggacagaggccaagctgcaggcagagccaggccagaggctccaaagacagtctggattgggggatgcagggagggtggagtgtgggggatgaggaaaaacagtgacactgggagggaacaggacagaggagcatctgggatgtttccaggctgtgggaaatggtaagacagagccgcgtagaggcagcacccggaggaccctacaggaagctgcagcagacgcagaggtggagagcgggcaggacgtcagggcgggcaggaggtcagggcacacacctggtctgggcacacacttggtctggacaggcttcccgcccctgccccacggcacccggagggcatgctcctcatcccacacccaaacatccatgaccagcgccgtttctgctcctccctggcctgcctgcca

SEQ ID NO: 41713 - DNA, 750 bp, Artificial sequence
  DNA replication origin
cggccctcacctgcggcagatggcatacatgcggttgaccggagaaatgcggaagggctcagacttggcccggctcaggctgctgctcagggtgcccagaccgaggcgctggtagtcgcgacagcaagccctttccaccaggctgctcatggtcatgcggtcggagggcttcagggctgaggacggggtcagcgtgctgggctccagctcctccgacactgcacaggccgggcacacgtggtcatcacggggccactccgcctgccctgatcctccctggccaatgtcagcatccagagaccacccaggactccacccccacccctccacctgagatctcgtcctcctggtcctcagggggcggctggccccggtgctcccagctgggggggttgtacttcttgcgagtgacatgctgccgcccgatggtcttcttggcgttcttgaccaggttccgggacagggttctgaggcccacgagagtcagcaaaggtgagaggaggagggacaaagatgagcacaggggcctaggagggttggagcgggaacacggctgaggcccagctgccctgcctgggacccagatccatacctgagggaaggacccttgtccttggtgactcgcggtggccggccaggtgtgtgggcagagcccaaggtgaacgcaaaggtggccctgatgtccggcgggtaccgcagcttatgcagctgcttacggaagagctcggcgctgtcagaccccacctcctc

SEQ ID NO: 41714 - DNA, 1542 bp, Artificial sequence
  DNA replication origin
tccccgagccgcggagcccgcccgcgcccctcgggccgccccgcgtccctcgccatggcgcggctcgcggactacttcgtgctggtggcgttcgggccgcacccgcgcggtgagtgccgaggccaagcgctgagggccgggggccgagggtcgagtgctgagggccaggggctgggtctgagggtcgagggccgggggctgggggccgagggctgggggctgggtcgggaggccgaggactgagggccgggcgctgagggccgaggaccgggggctgggcgctgagggccggggtcgggggagccgaggactgagggccggggccgggggccgggcggggactgaaggccagggccgaccggacagcccgtggggagaatgggcgtccgctgggggcggcgtggccgcgcgggcctggtggcggcagggagagaaggctgggcccggcctgcccggcctccttggggtgggacgggctctctccttggccagctgcgggcggctgtggctctagtggctccaggggcgcggacccgcggctcgccagcccgcctctgaccttggtgctccgtctgaagcccccggcggtcttggcggggtgcaaagagggggtggagttcgggtttggtgcatggagaagcggtgtttgatttgaaactgggaggatttgaggaggaagcgtcgagagtagagagaagagcattcctggcgactcgcctgacggtccaggccctgcacgccaagccctgggtggggtatcagcgtggcggtcggtgcccatgcccaggaggtctgtgtgtggggtcagcgcccgtgtctgagagctcttcagcccaggaggtaggagaaaacggagcctgacgatgacatcagcaacagcctggagacagcagcgttggcgagcgtgcttggtgtgccaggccccgcacagccctttgtgtacatgatctcacctcttcctcccagcagcccaccggggttgccctggtgttgcccccatctgtagagaagttaggcgcggataagctgactgcctggcctgagccggctcagagaggctgggactggcactcaggctgtcagatcccagctgcagactggcagtgtgtggggatggctgtgtggtcaggcaggggctggatcttgagcctggaggtgggattgagcttgccttcccagttaccctgttttttgtcagtccagttgtcactgtccccaccaaggacctggagttctctcttttttgtgtttcttctgctggacacccccctacacttcctgaagcctctttagcatcttcttcgtctccagcccctcctcagtgccctcttactcagcacacactcctctctgctcatgtctatccaagtgtgtgtcttatggcaccgtcagtcatgagcatctgtctttttctttagagagggagttctcgcttgctaggaccacatagtcctcatccccactgtgcaggttggctgtcaatgttgtcttgacccacagagggagctgtctgcaccgaggcacctatgaggggcatggagg

SEQ ID NO: 41715 - DNA, 1824 bp, Artificial sequence
  DNA replication origin
gtctctactaaaaatacaaaaattagccaggtgtggtggcaggcgcctgtaaccccagctacttgggaggctgaggcaggagaattacttgaacctgggaggcggaggtcgcagtgagccaagattgtgccactgcactccagcctgggcgacagagtgagactccatctcaaaaaagcaaacaaacaacaacaacaacaaaacactgggtgcagtggctcacacctgtaatcacagcactttgggaggccaaggtgggtggatcacctaaggtcaggaattcgagaccatcctggccaacatggtgaaaccctctctcaaatacaaaaattatctgggcgtggtggtgggcacttataattccagctactcaggaggctgaggcaggagaatcgcttaaacctgggaggcggagtttgcagtgagctgagatttcgccacggcactccagcctgggtgacacagtgggactccatctcaaaaaaaaaaaaaacatataaatgtgacactccctgccccctcaactggtcaaaataagtaaataatacctgcaaggcatccctgccctcccagatcggcctgtggggtgtgtgctcggcactcctcgacttattcacccagcaaatgttgactgtgctcccatggtgtgtcagcaggagggttacggggtgagcgcaggggttggggagacagaaggggaagcacgaacggacgcagagatcctcagctcacccaacagagaggccagtctcagcagcttggaacccgtgacaccaagtccaggactcgtggacagtgggtaggcgaaagctctgtggagaacagtgaaccatctatcaacataaacacatgctcaccttcaaccagaatttctacttccaggaaggtgtcctatagacacatctgtgagctcaaggcagcaactcatgaaaagactggcagtcacctaatttcatattaatagcagatgagatgaatcatacaacacctatatgttggagtagatccaaccataggaaagagtggggtctctgatgtgaggacggtcgggctgtgacgcctgtcaccccactggtcaccagtgttgattcggctgatgtggctggctcagaggcaggtgtccccctccttccccactgttccctgtgcgtccctccgaagctgcacgctccatcgaagaggatggaggaccgggcttcgagtagctgcgctcctctgccaggacctccaaacaagctctcaggaaagaacggggtctcagtcctactgcaaatctgcacacatggatgtgtgtgcctcacatagccacacctaggtgtgcccagggcaagtcaggagagggctcccccccagaccagggtaggggtcccaagtgggtggcaatggtgaggggagtctcacgtttcactcgttttaaatttttctttttcttttttttttttctttttttgagacggagtctcgctctgtcgcccaagctggagtgcaatgccgcgatgtcggctcactgcaacctccgccgcctggattcaagcctcagcctttcctgcctcagcctcccgagtagctgagattacaggcacccgccaccacgcccggctaattttttgtatttttagtagagacggcctttcaccttgttagccaggatggtctcgatctcctgacctcgtgatccgcccgcctcggcttcccaaactgctgggattacaggcgtgagccaccgcgcccggacactttaaatctgttacaaaaaccgtgcaatactttggtccggggttggagcggccgagggtcggtacagccttttaggagcgcagcccc

SEQ ID NO: 41716 - DNA, 1153 bp, Artificial sequence
  DNA replication origin
actgaggggcaagctctgtgggggaatgtcctgagctctgctgcggcctctagagttggggtgatcatggcgaccctcgtgggatggccgagagggtgaccctagcaaacatttgtaaattaaatgctcagtgttcgctaaatagcagaaggagccctttctgaaccccgtgttctgctggacggttgagaggctccagtggcaggcacatgtgagtcccccgtccccccagggaaggacacacaccaagtctgtgcacgccggcagtggttcttgttcttgctgtcacttgggcctgggctgccctccctggctcttggtaagtcaccctctgcccccgcacctggtcccactgggtccccaaactgggtggtggtggggcgcctgtgctgcctgtggagccccacccttgtctggctgccaacaagggtctcacccccttcaggtgaggtgggtctagtcgggctgggggatcttgccccacccagccctgccctgccctggggtagaaaggggtgtccctgtcccagaatggtttggggtggctcctgaactgctgagttcccctccctggcctcctacaggggatccaggtggagtctccatggccacctcggtctgggctccagggttggcagctggagccacagaggtcccttcatgacctctggagggccaccatccttcccttgcccaaccccgggggctacagcatcccacgctccccctcctgtcccacaggcaggcacgtggaagggctggttgtgcatgagagcaggaacagcccaggcacaaggccgggcttcagtctgactggaccagcagcggaggggccacttctggccagttcagcctctctcccctgctcgtccagacatggccccgtgtgttcagggcccagcttctgctccacatctctgggcagacacctcctctctgaagcgcttagcatctggtgctgccgccagctgtgtctggcagctgtcccccagggggtcacaatttcagggtgtttaggctccttgacgtaccagcactgcgtgtagaccagcctaggtttacgtgtgcaaagccgtgcaggtattgttgctgcaggacctgctgtctgcagctccgagggactgggcttcagatggggctcagctgcagctct

SEQ ID NO: 41717 - DNA, 1853 bp, Artificial sequence
  DNA replication origin
ggaggtgtctgcccagagatgtggagcagaagctgggccctgaacacacggggccatgtctggacgagcaggggagagaggctgaactggccagaagtggcccctccgctgctggtccagtcagactgaagcccggccttgtgcctgggctgttcctgctctcatgcacaaccagcccttccacgtgcctgcctgtgggacaggagggggagcgtgggatgctgtagcccccggggttgggcaagggaaggatggtggccctccagaggtcatgaagggacctctgtggctccagctgccaaccctggagcccagaccgaggtggccatggagactccacctggatcccctgtaggaggccagggaggggaactcagcagttcaggagccaccccaaaccattctgggacagggacacccctttctaccccagggcagggcagggctgggtggggcaagatcccccagcccgactagacccacctcacctgaagggggtgagacccttgttggcagccagacaagggtggggctccacaggcagcacaggcgccccaccaccacccagtttggggacccagtgggaccaggtgcgggggcagagggtgacttaccaagagccagggagggcagcccaggcccaagtgacagcaagaacaagaaccactgccggcgtgcacagacttggtgtgtgtccttccctggggggacgggggactcacatgtgcctgccactggagcctctcaaccgtccagcagaacacggggttcagaaagggctccttctgctatttagcgaacactgagcatttaatttacaaatgtttgctagggtcaccctctcggccatcccacgagggtcgccatgatcaccccaactctagaggccgcagcagagctcaggacattcccccacagagcttgcccctcagttcctacctccaagggggagggtcctggaagcgcccacccaggcgccgcccctgtgcttgctccccgagctcagggattgccgagtccacgtaactgacctgtactccacgaggccctgtgggaacggtccaggctggtcctgccctgtggaggcctccgtgcactgagagatgtactaggattgcagcaaaggtggtcagggtgatgggccgcacagcgaggcagtcaaggccagctccctgggagaagcactgggtcaggtgaggtctgaggacagcaggccttccctaggggaaggagctgggagtgccaaggccccaggtgcacaggaggcgtggctgctgagaggctgcagggtggaggggcctcggcctcagagtcatgtgccctgtgaccactgaagggtgtcagcagagcacacggcatgaggacagagggaggggcacggggagtgaaggagggggccctggggcaaggctcgggggtcaggagctcagcgtccgctactcagcccagccaaaaccctcccagacgtctcctctcctgcctgggcaaagtccagcttggcaccccgtctggggcctgcctgtggtcagggccaagtgttccctcctccaggaaagcctttaccctcctcatgccctgtagtcaggaggccgcctgctgtaaccctccgtgtcgcctcgggtgcgaaatcagacccacctgacaccatcacgcggaggcccagcagcacctgcacccacttccagctgctctggccaaaatctccgctcggccaggccccgtggctcacacctgtaatcctagcacattgggaggccaaggcaggcacatcacctgagttcaggagttcaagaccagcctggccaacatggtgaaatcccgtctctactaaaaacagaaaattatccgggcgt

SEQ ID NO: 41718 - DNA, 776 bp, Artificial sequence
  DNA replication origin
cgccaacacccaggccgccaacgcaacttcccatgcatgggccctgcaggcatggaggacaccgtgagaacaaagtgcccgcggcagagctggcgtcttggagcgtggccagggaagtctgggaacagcagtcggctggggcaggagagagggcagtggggtgctggggccatacctagggctgtgaagatcagagttctgggcttcaggggtcaggcaagagggctgtgggcagctgacctgactcaacaagatcctggcacagctgagctgagaagcaactgtgaggagaccccagcgccccccatttaaacggcacctgccccacactctccttccttgtctgacttcctgtggcactcagcactccctgccactccaccacccacttattctaccttctacgtttgtctccttctatctccccctagaatgtcagcccctgggggtcaaggctgtatcctcacgtgtcccaacacgggtaggtcacgtgctcagcatgcactggccagagggatgcagacaggtgcctgggaggaggctacggccatcgccccgaaagcaggtggtgcctgggtcaggagaaggtgtctggataggttcaggaggtgggaccgggtgggattcagaggaaggtgtgaaggaagagaggaggttttttttttttgaaacggagtcttgctctgtcatccaagcttgagtgcagcagcgccatctgggctcactgcaacctccacctcccgggcttagacgattctcctgcctcagcctcccga

SEQ ID NO: 41719 - DNA, 858 bp, Artificial sequence
  DNA replication origin
ctgcagaaggacaggagggacgggcggccatggggggagtgggggaaggtgtcaccgatgactgcccactgcagagggacaggagggacgggcggccatggggggagtgggggaagatgttgccgatgactgcccactgcagagggacaggagggatgggagggacgggagggacaggagggacgggagggatgggagggacaggagggacaggagggacaggcagccatggggggccgtgggggaagtgggggaaggtgtcgccgacgaccgcccactgcagagtgacaggagggacaggcggccatggggggccgtggggggagtggtgcggggaggccgtggggggtgcactggcctgtcccccaggtagtatcccaggccaagcaccgaggccaccagagggacaggcagccgtggggggggccgtggggggtgcactggcctgtcccccaggtagtatcccaggccaagcaccgaggccaccagagggacaggcagccgtcggggggccgtggggggtgcactggcctgtcccccaggtagtatcccaggccaagcaccaaggccactccacccccaccttgcctcaacatgcagcctcctcaccctccacttccaactcttacctggggctccccgaacagggccaggaccttccccaggtcgtgcaggagcccgacgaggtggaaccagtctgggagggggatggacagggcaggttggggactgcaggggccaaggcagaggatgagcaggtttgcggggctgagagccaggaagggtccagggcctgctccccaacccaggcagggctgctggaggaggcctgggcccactactgtcccctcccaccct

SEQ ID NO: 41720 - DNA, 913 bp, Artificial sequence
  DNA replication origin
ccccaggccccccacccaaccccctctttcactcccacaacacccctcggcgggtagcggggcgtacttgaactcccgcacccagggcagcatggccaggtcctgctggctgcacagctgctggtagtcgcggcccgtgtgccaggggtagaaggagtggaaccggatcatgtagaaagcctgcgggcaaggccacccagcggctcacttggggctgcaggaccgggcctggtggacgggctgcgttgcccctccccccacctacctcagggggcagtgagaacttgttaaacttcatcacctggtacatgtactctgtggggagagggtgtcaccagcaggcactgcctctgccccaccgccccccaccgtcccccaccgccccccaccgccccactgcccgcctctggcctcaccatcatggccccaggacatgaggaccctgtcgagcccacagtggggctgatacatcccgagctctgtgctgcagtgagataccagggtgaggagggctcagcagccgcccagggaagggggcccagccctcagcagcagggagcacctgtatcgaggatcctggaggtcagggttgtcctggaaggtggagtcgcagaaaaccacggaggcctgcggacggcatccgacggggaaggtgtcgccgacgacagcccactgcagagggacaggagggacgggaggccatggggggagtgggggaaggtgtcgccgatgaccacccactgcagaaggacaggagggacgggcggccatggggggagtgggggaaggtgtcaccgatgactgcccactgcagagggacaggagggacgggcggccatggggggagtgggggaagatgttgccgatgactgcccactgcagagggacaggagggatgggagggacgggaggg

SEQ ID NO: 41721 - DNA, 1123 bp, Artificial sequence
  DNA replication origin
tggggtggagcggggtggggaggggaggggcagggcgggtactgtgggggccacgctgatgcctctcgctgcagtgatccgccttgtccagagccaagtggccaggtatcccttccacaagcagccgcccacctacgtccgagcccagcgctacaagtactggttctcccagcctggggagcaggggtaaggctgggcaccgggtggggtgtggagcccggggtgcaggggtaaggccgggcaccggggggtgtggagcccggggtgcaggggtaaggccgggcaccgggggggggtgtggagcccggggtgcaggggtaaggccgggcactggggggggtgtggagcccggggtgcaggggtaaggccgggcaccggggtggggtgtggagcctggggtgcaggggtaaggccgggcactggggggggtgtggagcccggggtgcaggggtaaggccgggcaccgggtggggtgtggagcccggggtgcaggggtaaggccgggcaccagggggggatgtggagcgtgaggagctgaggagcaggggtaaggctgggcactggcgatggggtatggagcccggggtgcctccagcttctgaacatcgggtcctgctgcagccagtggtggcggcgccagtgggtggaggagttcttcccatccgtgtccctgggggaccccacgctggagacgctgctcaggcagtttggactacaggtaagggggtgtcagccaggctgggggaggtggcaggggtgaccccagcctcccggggtaaacccagtaagcacttccccaacctccctccctccctccctcccacaggagaaaagcccacctcgcacccgcagcgccaacagcaccctggcccaggccctccactggactcgctctcagctgtctcccctggaggcccccgccctgctctgggggctcctcatggccgtgggggctgtcagatttgtgcaagccctgctagcaccctgttctctccggtcctccccgctggcaccagtcagcggggagaagcgcaggccagcctcccagaaagactccggagctgcctccgaacaggccaccgcagcccccaacccctgctccagtagttcgaggaccacccgg

SEQ ID NO: 41722 - DNA, 1625 bp, Artificial sequence
  DNA replication origin
ggctctggacaaggcggatcactgcagcgagaggcatcagcgtggcccccacagtacccgccctgcccctcccctccccaccccgctccaccccagcccactccacaccccccaagcccgctccgcacctggctccttgccctgcagcaggcgcaagaccaggcttgtgaaccacgggctgtgcgtgtgtgggcccagggctgcaaaccacatctgccagtccaggcgtggctggtggggcaccacaaccgggggcggccggctcaggttcccaggcttgtacatgaactcgatctcctgccaggcaggccgaggtcagctgggcccgctgacctgggccccaccaccctgcccgccctgggagggctcaccgtccagtggtggccgtcgtaactgccctccagcaccacctcaggccgtccaccaagcccagtcatgcggcggaagaggccgtaggagttggccagctgtaggtgctccacggcaccaaacaggcggtgggccccggtccagaggcgcccgtgggtcccgggctccacgtaggagtacggcacctggagacaggtgggaggttctcagggctgccctgcccccagcccatcccccagccctgcagcgctacccaccaggctaatcaggaacaaggccacggtcgcagtgcccacaagggacagttggactacagcactgagcttccgtagccagccccgcacctgggtccacctgtgggcaaggacccaaggtcgtcaggccggccctgcacacctgtgccccctccctgcttcctgggccatgtacctccacagggcactcagcagctcccagaccagggaggccacacccagccacacagtgggcagcgtcagtgtcttcagccactgagaaaactggtggaaggtgaaagctggtggaggaggggggtgtgaggactggtccgcccctgccctctggcccccccaggtcggcactcactggttctggagtggatggtgcgctgctgccagtcaacctccaggccaaagtagtgcacagtgccataggccagaagcccgtagacggctagttccagcagcagcgacagggtggccagcagggccttgggccaggctgtggggcaggacagtcatgggtcagcagagggtccccagccagggggctggggtgcagctagagtgggagtcctgtgggggtgttggaggggagaacccctgggagggcagggggctggacaagtgacacgcacaggtggccgtcttcttgcggctgccgtggccaggctcagcagccaggtgctggtcgtccagcagcgcagtggtaagcaccagcgtcatcaggttgaagaagttgtagttgccggtgatgataatcaggacctgcagcagcacctgggggcggcccgctctcagtgctcccggagactgacgcctggccccgtggcaggcacccacctccaccctgcagggtgcatccctctgctacaaggccttcccaacagcggttgccagctgtccccgggagccacgctgtccccaacagggcacgctgagcagcgctgaaggccgagccctgtctgcctctctctgacagctgcggccctcacccacctgcgagtagaaagcagccaa

SEQ ID NO: 41723 - DNA, 1305 bp, Artificial sequence
  DNA replication origin
cagctagagtgggagtcctgtgggggtgttggaggggagaacccctgggagggcagggggctggacaagtgacacgcacaggtggccgtcttcttgcggctgccgtggccaggctcagcagccaggtgctggtcgtccagcagcgcagtggtaagcaccagcgtcatcaggttgaagaagttgtagttgccggtgatgataatcaggacctgcagcagcacctgggggcggcccgctctcagtgctcccggagactgacgcctggccccgtggcaggcacccacctccaccctgcagggtgcatccctctgctacaaggccttcccaacagcggttgccagctgtccccgggagccacgctgtccccaacagggcacgctgagcagcgctgaaggccgagccctgtctgcctctctctgacagctgcggccctcacccacctgcgagtagaaagcagccaagcgcaggcgtcgaatgggggcgaagaacaggggcggcacagcgatctcaattaggaaggtggccaccacgctgagcttgtgcagccagaccggcaggtggtgtgcgaaccaggcggcgggcgtgggcaggcactgggtctcgtagtggtaggtgagggctgcaggcgagggcaggagtcagggctggccgagcccccagactaccccaggtccagaccgggcccctcaccagtgagcccccaccacgcagggcagcggctggtcagcttgaccacgcctgaggcgaacatgaggcggaacagcagccatcgcaccagccagaaggggaggtcttcgtggggcagggcccctgcctgcctgccctggggggcctccttgcggtgggaggctggcctcagcggggccaccagcacggccaggaagccagtctctagcagcagggagtccctatggggagagcaaatagcaccaagagcccctccccacacagctgcttccctcggaaagtcctcccaggaagggcagagccctcccccaccccctacccagcctcccacagccccaggcccagccgtcactcaccactggaaataaaggaacacctggcccacctgcggagagaggggctgtcagggagcgggtgtgtctgtggactcaggtaaggtagaggcaggggtgggtggtgggggttggagatagagtgagctggtcacaggtcccacttgcctggcaggctgacaggtaggcggcccaaagcagcaagtagatgacagggtggcgcagtgggctcagcagcagggctcccagggccactagtgcacccagcaggctcagcagctccagg

SEQ ID NO: 41724 - DNA, 1102 bp, Artificial sequence
  DNA replication origin
gccagagaggcgaaccccggcgccgcgcagcgggagctcaccggaagagtcgcggggcggggtcgaagcctccgggaggggggggtgggcggagctttgggctgccaccagtttggacgggagggcttttggggccgccgtgggtcgggcggggcggggtggggcggggcctggagctgccgcgggcgagcgggccgaggaggcggggcttgggggctgccacgggttgggggggcggggcggtgaggaggcggggcctggggcagccgcgggcgggcggacgggccgaggaggcggggcttggggctgccacgggttgggcgggcggggcggtgaggaggcggggcctgggactgccgcgggcgggcgggcgggccgaggaggcggggcttggggctgccacggattgggcgggcggggcggtgaggaggcggggcctggggctgccgcgggcgggcggacgcggagggcgggccctgctctagcgggccgcgtagcggacatggcgggctcccggctcccgcggcagctcttcctccagggcgtggcggccgtcttcatgtttgctttcgcttccctctacacgcaaatcccaggtgaaggcacccagggtgggacacccccagcctcggcgcgggaccctatgtcctcttttctctgtgcccggcactcacgcagtccggggttgggagtgagggccaggccttggcgtggggtagggggcggcggttcgtgtcctgcaggccgctgtgggggtaggaaggtgtgcggtgatccatttcccgtaaggctctggactctgacctggggtgggggacagaactctgagagaggtgggagagaggcttcctcccagacctggtgggacaggtaggagatcgggctgagacctggaagagggcagtgggctctgctgggtgggaggccctgactcaggtagttgagcaggcctctagccctgggacggggttttgacaggtcccgacctgggggacgggctctggagggactgcagactctgacctagggatggaggtatccgcatgctctgacctaggctgggggatctgcaggccctgactcagaggtagtctagtctgca

SEQ ID NO: 41725 - DNA, 1239 bp, Artificial sequence
  DNA replication origin
gggctccgccttccgcgcacgcgctgagagcctgtcagcggctgcgcccgtgtgcgcatgcgcagctccggggacgcctgcgccctgcctgtgagcgtgtggcgcccgctttccctgagccggcggggcagagcgcagggagctggaggtcggcgcttcctctcgtgcttggtccactgacgcgcggccccgccgcgaggtgcggacgccggggctgggaggggaggaggtagccctgaggactcgctggactccggggtagtttcccagctccggctactgcgcggggctggcggggcacaccccagggcgcgctggaggccggagcgaggctggggcgcccgtgggaggctcccagcaggcaccggtgttctcgcggccaagcacagttataacgcgctcgcgcggcgcttcgagtggtcctggaacctttctggccacgagggcgctggccttgctggggagggcacaaacccagaaccgcccgggcgggggtgcagtgagtcctcgggagggtgccctcagcaggagggggcagtgaccgggagtcctgagacctccacctagcaaaccttctgcgggggcccgtgggaaaggctcaaaggtcaccaacgcaaaggcagggcgtcggctgtgagcccggaggagctgctgggaagcctggatgtgaggagggtggggttttgtggcgggtggaagtgtcgtgcgtctctgccaggagaggttaaacacagccggcgggcagagtctgagctccgggggtaggtcgtgcaggttttctgctgggagtgtggaggaaggccgcggttggttgaagtggctggaggtaacaggaaagtgttggaggaatcggttgctctcggggattgcaagccagagagttacccacctccttttaagaaatgggtttattgcaaatagataacgtggttagttcaggcaaggcatgcacttggaatgctttccgtcagcaagaggttcaccttgctgaggtgcaggtgcagggcagggtgcggtgacaggctggtgatcccaggtagaggacaggagtgacaggtgtggttgcccaggtgtggatgtttggtggaggtggagttctgagctcaggtgagcagctgcaaatgcctgttaagcctgaacgtgggctgggtccttcagatgggtggctggtctcaagtcgcaggggcagcccaggcactgtcctgggccttcccttctggctcctgacgcctgtgcttg

SEQ ID NO: 41726 - DNA, 1557 bp, Artificial sequence
  DNA replication origin
cctcgggaagggaaggggatggcggaggcggaaggacggggactcccccgacgctcaccatctgcgggcgccagcagctcctcctgctcccgggcgcgaggcagcagctgccggcgttctgcgggacttcccgagcacagggctcgggccagaccgggatccacgccctgcgccgccagcatccgctcgaagcggccaagggccgagccgtcgtccagcgccgcggccacccgggcagcgccctgggcctgagtccccgcgtgtccgctgagccagagcagggcgccccctgcgggcggggacgggtcttaggcgcggccgggtcggggcggccccagcgggaagcaccccccgccgcctccgctcccctacaccccgtccccctcaccgagcgtggtgaccaggtcccttaagtctggcgggcctgcgccgtccatgcagagcagcgcctcctccacctccagggcgtggcccacgcagcgacccaggggcttgtccatggcggtcagcgctgccgcgacccgaagccctaggctggctcccacgccaacctgcggagaggaggctcagcgtggaccccccatggcggggccttctgcagccggttcttggtcgaactccagcccctgctgcaccctgggttgccagccccccagcatgaagtcagggaaggattggggtggggaagagacacgagtgaagtgcgacacctcgccatggggccaggaggaacttgtacttggtctggggcaggaacgccacagagggcttccccaggtccaggccgggccagccttgacctctaaagtcacagcaggttaggaagccgtgaaggagggagggacttcgggcagaagagggtgggactggggttaggcaggactgctgagtggagggaggcagtggggacgggaggggtgaagggtaggctgggcccgcatcaagacgcttgcccagggaaaggccacaccgctcaccagcgtctttgccagctcccgggcctgctcctggttggggaagacggcggcccctccgaacttaacgtccaccaccagagcggacagcccctccacgagtttcttactgagaatggaggctttgggggaggcagaggaggttggagacaatggagaacctggagcttcttgggagagttcggggatgccgactttggggtcaggggccctgagcattgagggtcaagtcccttattatgggggtggcagcacctggtgggttgagtatcaggccaccccacatggtggtggtcaggcatcttgtgatgggggtaggggggcacacggtcaggtgacgggtaactcctaacgagaggcccttgacttgagtttggaggtcaggagcctgtgaacatgcagaagcaggccatggagtcaggtcacctgtgatgagtggcaggctgtccacggtggctgtcacatctctggctgcatataggattccgtccgcaggaaccagctgctcactctgacccacgatacagcagcccgcctggtccagcagcacttgcatctggtcagacatcccctgttctcagtg

SEQ ID NO: 41727 - DNA, 2223 bp, Artificial sequence
  DNA replication origin
cgatacagcagcccgcctggtccagcagcacttgcatctggtcagacatcccctgttctcagtgacttatggtaaatgacttagcagctttttttttttttttttttttttctgtgaagagtcttcctctgttgcccaggctggagtgcagttggcacaatttcggctcattgtgacctctgcctcctgggcttaagtgatcctcccacctcagcttcccagtagctgggactacaggtgcgcaccaccacacgcggcttttttttttcttcttttttttgtagagatcaagtttcactatattacccaggctgatctccaactgggctcctctgcctcccagagtgctgggacagggtctcactctgttgcccaggctggagtgcagtggcatcgtcccggctcactgcagcctagacctcccaggctcaagtgatcctcctgcctcagcctcctgagtagctggaaccacatgcgtgcaccaccacacgcagcgaactattttgtagagatggggttttgccgtgttatccaggctggttttgaactcctgggttcaagggatctgccctcttcggcctccccaagtgctaggactacaggtgtgagccaccgtgccccgccagccatctgtgattttgaccaacttcccattttatgatcctaatcaaagttccactgatgatttcggcccaggcccagtgactcatgagtaaccttgaccagtgttctcattagtgaccctaatgatccaccagtgatcttttagtgattctggccagggtctccatcatcaacctggattaatgactgatccgtggcgccccgtacctgctctgggctctggatgacattgaatccaggaatagactccagcttatccaaggtgcctcctgtgtgccccagaccacgtccgctgatcattggcacctggtggtcagggatgctgagtaccctgcacagtacccctcccccacctctgtgcatcccttcaccttccctggctaggagtgcagctggatttggaaagtatttaagcagctataggggtgcccagctggtgagggaatggaaaggaagttttcttggttgagaagtgtcagtaggggaggaggttggtacctgtccttggggaaacaaggcttggggcagagggaggaaagtcctcagctcctcccttgggggagctgtctggggacccaaggggaaaggggtctgaattccatcagtggatctttttcctgctccaaggggcctggtctggagccagaggggccccaagcgctgtgctggggaacggggtggggagaactgtgctggggagcagggtggggagaagccttggtagggtcttggaggctttgggccaggcttgaggttgggagctgcctgtggatggactggttgctgcatgtgcggtataggctcccgtctggaaaggaggtggtttctaaccttgcagccacatgccgccagggcaggtgcgaggaccaggctgaccttgtcacccacaccccctgtggaatgcttgtccacaagctgctggcgccaggcctctggccactccagctgctgtcccgactgagccagggcctgggtcagcaccgaggtctcctccagatccatgccccgaagtcggatggccatcagcatggcccctggtatgtgggggtacgcgtgagggtggcagcccacagcggtggggcaccctggggccggtgctggtagtggggcaccgtcgcacccccagggacccaaagtctctcgggctgacctcccagtcggggtcaggaacgcccaaccctccccacgcaccgatctgtgcgccctgcgcgctcccattcaccacagcggccacgaagcccctgatgtccgcttcgctcaggcggcctccgtctcgcttcatgcggatcagctccgggagctgcttgggctctggcgaagggtcgggaagtccctggctcccttccccggagaagtcaccaggcgcgggtggggccccggttcccggggtcatcaaggctgccatcgctccgggcctgcggggatgcctgacacgtccggggtctgcggcctcccggcgtcggtgtctgagccacgtgctcctgtcccgacccctttcccgtgtctctccggtgtccgcccctcggtcccgtgtctgtgtcgccctcgtccgtgtctgcctcccgcttccccgcctcgcgacttgagccccgcccgtac

SEQ ID NO: 41728 - DNA, 1160 bp, Artificial sequence
  DNA replication origin
tcgcagactttaagcaaacacgtgtggggccgctcccgcctggcgggtcagttgtccgcgtcggtcaccagcggggccaggtagtccgagtgccggatcccgaaactccagccgcggggcttccggtgctgcgggcccggagacaccgctgacctcgcggggccggcatcctctccgcgccgggacccctggacccccggggactctgatcccatcactccgacctcaggccctccccactctcctgactctgacccttgaccctgggctccaggccacctgatccacgttgtaggccgcgggccctggcttccgagtgttgtcttgggggagcgaagtccgcgccagaatcgtgaactggggggcccgggacttgtagacccctggactcacgacctgataggcgcaggggcccggggtctgcgagagggcagagggtgctggctgccgcctccactgccgcggaccagggaccccctgcgtccgccccggcccctcccccaccttgctgaggtcctcgaagaaactgccagccgctctgcggccgtagatggagcaagttggggcggagactttgccgatgacgcgcggacccaagagcgagggcaccgtataggccgcgggacctggggaggaggcagggctcgggggtagtgggtctccgcggacaggcgcagggtggtcccagctcccggagggcggtccccggtctcgagtgggaaggcccacagttctgggatgggccgttctgacctcacctgggctctgctgttccgcctggacaccccagtttcggggagcaatggtgtgccgaggcgcactggggtacgtcgcgttccccgctcgctccgggaagtacctgcctgcggggcggatcaagggtgtggggggctagaactgcgtgggagcctggtgggtacccgagatggggtcctgggactagtggggagtctgagccacgatttatcaaagccccgtggggttcggggtttgggatttgagatccggatatgggggtaccgaatatgcggtgttagggtatccgagggggactcggggttcaggtcgggggttcccaggtgggcctccctggaggcagttcggcgttggggtggccaggggcccgggggtcctgaccaggtcccggagtgaggaagggc

SEQ ID NO: 41729 - DNA, 1180 bp, Artificial sequence
  DNA replication origin
ggaagcgcgcgccgaaggtgaaggcgggggcgcgcggccgcgacgggtcatgcagggcgtagcctgggagcatccgagttagcgtctggccgggcccagccccaagccccatctgcaacacggaccctcccccggcacagaccccctctcccctctagcaggcacggttcagccccgagcgcaggcctccctggtctcttccccttccctcccccaggcgccgtcccacccctcaatcccggggcctgccccttctaccggtgttgggcggcagcttgtatttgggcccggggcctccgtagtgcgccgcgatggggccgcggggccggtgtggccgccaaaggcccacccaggcgtccgagcccatagcgcgggtggggggcgcttacggctcgcagcacctgcggacagaaggcggtggccgcggcccctgcaccgcaaattcttggggagcgcactttcccactaccctgggatcagcgcggggcggggcggggcctggaccgtatccctggcgccagcaaaacaaacgcgagcttccttcccggctgtgtggagcttggggccgggagcggatccagggccatcacccggactccaggcgcattaggcagggacgtgaactcgcgggggccaagtctagacccagacttggtgaagggaatcacctgggggtggggtgggggcaggagattttcgtgctgttgggaaagggtgccccgggaagggcctgcgtgggggacccggtgccccgaggtgcactgacctgttgtggtagctcctagcgtgggaaaacaaagcgacgtggctggacatccccgctccgccccgcccacctcccagaccccattgtggccctttcccgcttcctggcaaccgcactgactgcctgcccccccaacctgggtccgcctcccccttccccaccacccagtgccgccgctgggcctctgtgtggattctgtggcacgggtgggatagtagcctgggccacccagaacgctggcctcacccttacccaagtttcagtatacccattctggaataggacaaatctgcagacaaaagcaaggatgggaataaaggaactgaataatgcaaagcacacactccatttaattatgtgtagagagaggacttatctatttaagtccatgaaatattcgcaaaaaaaatcatg

SEQ ID NO: 41730 - DNA, 1539 bp, Artificial sequence
  DNA replication origin
gggcctcctcgacagccgtcttgagtggaagccgggccatggcggccaggcccccgcccggcgctgcagcagggacagggctctgctggccgcgtcctgggggctctggtttcccctgccctgggctctgcccctcgctgccatcactgaccttagacttcggttgcagggccagctcagctcctcctgcctgatgaggttgagccccgagggctgtggacaccggttctgccgcctcttgatcgtgcccggagccaaaccagtgtaaggccagcgctgtggcagccaccacagccagcgccaggagggccagcacagcactatcccagtcattgtcactgtcccagtcccagccccagaggggaccatctggctccaaggtgccctggatcatggttcagggctgcaatagaggcctgatggcaggctggcagtgcatgcagagcacagaggcctgggctgaggcaccggccagcgcctgccccaagggctgcccagttaaggtggaccagtcctccagggcctgggaatggtggggtctctgcttgcactcaggcctgggggtgtcagtagggcctggctgcagatatcaggagacagcgaggcttatggcaggataggagcccagggtctctgcaagcaccccaccagctcctgccctcttctcctcctcgtaggccccagggtcctcaggcagcgttcctgagctctgtgctgtcatcacagccaacctgcttctgcctggtagaccctcacacccctaaatttattccacaccccacagtccctcctctcagcctgggcccagcttcagggggcttggcagggaagggttacccacagggagatgttatctctagctctagcaatgtgatgtggccctgatgaaatcaccagaaaccggagaggctgattccactgtgggccagcaggggaggggtgggggccgtgcacgggagggtgcaggctgtgcctgacggtggtctctcaggctgaagagggagaccctggacacgggtcctggcagtgagcattatcattgcaggggtgctgtggaggtttgtactggggcacagggagggggcatagagaggagactgaggctcccatagctcctcctccagcagcttttggactccttactctgggtttaccagacatgggatagggttatcaagtcaagagaaaaaaaaaattaatgggataaataaaatccaaacatatttctctctttatggccaggcttatttcagcccacctagaccttctaggatctcctggaccccctgcgcccatcgagagtgtcttgactgcccagatgagactctcactgtgcccctggagaaccctgagcccagcctgccccctactccagttaccgcatcagccagcacctggatcccttagaaaccacccccctctggccccaggtgctctaatagccagactctgggtgtcttcatctcagtcctcagccttcccttatctgagctgaggactcgccctcgagaccacatcctggctggtacctcctagccc

SEQ ID NO: 41731 - DNA, 1458 bp, Artificial sequence
  DNA replication origin
gctgaggatgcgctcgcggtcggccgcgctcagccggcggtagaggcacgggtctcccagcactcgcagcaggttgtcgctcatcagcgcgtaggtctcctgcgccaggccgggctctccgtgctgctgggcaaaggccagcacgtccaggcaactgcccaggtccagccgccgccgcagggctgccgccgtggcgggctccagggcccgggagctgggcttccggggcccctccaccaccccccaacccccgggcctctgcagaaacaccatgagcttccgggcctcctcctgcttttccgtgagcgccccgctgcggccggcagggctgcccccctcccccggcgcctccccttgagggtcccccgaggcggccggcctgacctcctgctccgagctcggggcgatttcgcacctgctgcgtttccgtagctggggtaccggctgtgagcgcctcgcagaggaggaggccgcggggccaggcggcctctgcgcggggggctgtgcggggcccctgggcatcgcggcttggggcagcgggtctagacttttctccctggttccctctcctcttaggcctgggggagggtctgggctgggcgatccgttggtctcggagcttcttggctgtggctgacctccagcctcaaccaggccccctgtacctgtccctatgactgtccccactgaagaagaggggccgtgtctgtcctcagagtgtgtggaagtgctgggacccacggggctcccgggaaccgccctcgggacactcccttggggcctgtcttgcctggggaaggggtggcttctaagaaccatggcaataaggtttccccagctggctgagacctgcccctcctggtagcgcctggggagagccacactctcctgaggctttgacccgtcagctggggcaggggatgcggctggggttggggttggggctgaggtgggggctggggcaggggatgcggctggggttggggctggagttggagctgggcttagggctggggttgggactggggttagggctggggatgcggctggggttagggctggagttggagctgggcttagggctggggttgggactggggttagggctggggatgggggtgtgagggttgggactgggactggggctggggctggagttgcggctgcagctggacttggggctggggctggggttgaagttggagctgaggttggagctggggctggggctgaggtgggggatgaggttgaggtggtggctgaggttggtgctgagctgggggatgaagccagggctggggctaggactgaggctggagctgaagttaagacttgggctgaggctgaacttggggctggcgccgctctgagattttcgcccacggaaggatcctgggtaacctccaggggcaaaaagtctgaaggagaggggagagtcagggcttcaggtgggaaccc

SEQ ID NO: 41732 - DNA, 1618 bp, Artificial sequence
  DNA replication origin
ctcttgggtgacagacgtccactgtccacattttatagacaaggagaaagggaagtcaaatgtctcgtccaagtctacacagctaaaaaggggcagaactagggtgacgctcaggcctcatttagagatcgggggttggcgagaagtggggtgggcttctggaggggctgggagagccccacaaggctgcagagggtggtgagcccggagtgggcctggcctggtgtgggctgggggtatgggcaggagctgcagacagcagggctgcaccagcggaccagtttcagaggcaagggttctaggcccttgagaatccacagtgccaaacagacccagatagctacggggttggtacctggggaggccttaggacaggcagaaagtcccagaggcgagggcgttgcctggggacgtttttgctccctgtcctgctgacagagcataggaagtgtgaatgttttctaccccctcctctctcggctcagcagagctccagcgagccaagtccttgtctgtggagacgcatcagtccctggctctagggaatagggagtcccacagacaggggggtgtcagcaagctgagagggtctgtaagtaggtacggaattgagtcaggaaacagtctgggtgtggagtgaggggcagaaagaggctgagggagtctgggcttcaaaataatcgacaacctttaaagcagaaggggaaagttgtccagaaacaagagcaggaagttccgatcccagccccttccctgagccccggcctctcaggcccatcccaggagggtctccctggagagcagcgaagcagctttggttctctgcctgccactcagagtgaggtctgcagccggtcctcagggggcagagtcaggatgaatggactgaggaccccggtgctccccaaggggaagggctgcagctccttggcctggaactgggcagtccccccagagaccgtgaaggtggcagtgacctgggggttgaggcagtaaatggtgttgcccagggtggtgcagtgcagtggggcgggggcgggcaggggcagggaggcagccctgctccaggagccggtcactgtgttgtagcgcatcacggcggcgcccacgccccgcagcaggtcgaagcggtacaggaagccccccagtgccacgatgtcgctggaacgccggtggctggcactgtatgggcactcgtcccaagcatccttcacggggctgtacctgagcaggcggtagaagaggtgacccccggtgacgtagatgtccccacggcaggccacagcctcgtgggccacagggaaggtgcctgcggggagtggcgcgcgtggggtccaggcgtctgttcgcgggtcgtagcactccatgctgtacaggcattcgccaccgatggcatagagcagcccgtccagggccaccagcttgagctgggctcgggcctgctgcatgggccgaacctggctccagatgttggtcagagggttgtagcagaagacctcgttggagcagacggccttggcaccggagccacggatgccccccgccagaaacaggtagttgtgcatggtgcagagaccgcagccccgaagcggggcctcctcgggcacctgggtcaggg

SEQ ID NO: 41733 - DNA, 2195 bp, Artificial sequence
  DNA replication origin
gggcatggcaggcccaggcatggtagctcatgcctggaatcccagtgctttgggaggctaaagcaggagaaatgcttgaagccaggagtttcagaccagcccgggcaacagtctctacaaaaaaatttaaaaatagctgggtgtggtggtgcgcacctccagtcctagttactcaggagggtgaggtgggacaattgtgccacagcactctagactaggctacagaggaagatctggaagatcccctctgcaaaatgaaaaaaagggctcagtaaattcaagatatttgatttgggtgtcactggtcaactcggtgagacgtttcaggagagccataaaagtaaaaatatttcatgaattaaataattaatggatcattagacaaaatggattgtgtgtacagatttagatgggaaggggagaaaaaaacaggaggtaactagaaggtgatacagagtcaaggttttttgttttttgaattcttcgtttctaggctgtgtggaaagagctacctggacagaaaagcctgaagaatcagaagaaagggcaactgatggtgcagggactggtctcagacaagtaaggggtcatttcaccctatgaaggtaagggaaggtaaggaggtagagatagaataaggtaggtagaggtcaaggtaggatggcaagggggggatttcaggcccgatggtctctaactccctaataaatggcaatgaaaagtttcttcttgtaacaacagacattcttggtttgaggagaacgataaagctttatcaaagctgcatgcctccctaggggcacctaggcatgtgactgaggccacatggccacagtgtcctcaggaccctaagacggcacagagacagtggatggagtgtagaaggcctgggaacgtaaacatacatgcagtggatggacaaggtaaggacactgagagcacaagtatgagagtggcttaaggggtggttgatggttggggtgaagcagaggcatagaaaagacatgtagtttctataagtggggcgttggggtggccacaggtagatttggggatagagcatgagactgctagaaggatggaggctgggccggagtggcactggatctcagaagagggatggatctgaaaaggagatccagggagagggtgtgagagctgatgtggaggaagcagccacaggattagaattcacggcatttcttgcctaatgaggttgcctgggatgactgggaacgggtggagaaagaggcctgagcccgcaccaaagcacaatggaacggagcttaggatgggtggcggaagtgtggggcgggaggagcgtggggcgggaggagtgtggggcgggagcgtggggcgggagtgtagggtctggcttgggtatcactttaggtgtgaaggacgggggttgagcgagtcagagcctagagtctggtttgtggtctgagtgtcttgcctggtacgaagagtttctaacagagtctgggatccctctgagaacaaggaatgtgaggggataagagggatgcttggtgcagagatgtgctcttttgtacgggatgagagcagcacaggaagggaatgcacctgtgatgtgggagagaagtcttggagttgggctatgaagagtctgggcgggtcctgaagtgcaggtggaggaagccagaggtgcgtgtgggaacttggggtgtgaggtggtgtgtggactccggggtcccaggtgtggcaggtgtgagggtaagaggggcaggctgcacggaatgagaagcccagggtgtgcagacttcaggatcaggagtgtatggtgtgaggacatggagattaggttaagggggtgaaggactgaggtgagggatgtaaggtggggagagtggggtatggagtgtgcagtgaggggagcgggggaggggtgaggcggggtgaggcggggtgaggaggggtgaggggtgaggcggggtgaggggtgaggcggggtgaggggtgaggctgggtgaggaggcgggtgaacggtgacgtgagcgatgaggggtgaggggcgaggcgggtgaggcggggtaaggaggggtgaggcggggtgaggggtgaagggtgaggcggggtgaggggtgaagggtgaggcggggtgaggggtgaggggtgaggcggggtgaggggtgaagggtgaggcggggtgaggggtgaagggtgaggcgggg

SEQ ID NO: 41734 - DNA, 1630 bp, Artificial sequence
  DNA replication origin
ggtgaggggtgaggcggggtgaggggtgaggggtgaggcggggtgaggaggggtgaggggtgaggggcgaggcgggtgaggcggggtgaggaggggtgaggggtgaggcgggatgaggggtgaggggtgaggcgggatgaggggtgaggggtgaggcggggtgaggggtgaggcggggtgaggggtgaggggcgaggctgggtgaggaggcgggtgagcggtgacgtgagcgatgaggggtgaagggtgaggcggggtgaggggcgtcgggggaggggcatggggtgtggagtgagtggagtcgggtgagtggagttgggtcgaagtcaagggtctggcttgaggttggtgccaccgcgaacgctaggacagggtcaggcggagcccagccgtcagggcgcgttgggagggccggggcccaggggggcgcggcctcgctcacctccagcttggcccgcgctccggtcctgctctggcgcccccagcggccgcttgaggaacaaggccgctcctcgagagggatgccccgccctttccgttagcgaaccctccccggaagtgacctctcgccctcattgggtgtcctcgggaaaaggggcggggcattccgcgctgctcccacaggtctgcggcgtccgagtctgggactggcaggtgcggtgctggggacgtcctgaggttgagggagaatcctgcggagatgaagagcttcccggcctgacagttttgcccccacctccttcttgagcttaaggatttatacgcagggccccgtttgcctgctgtgtccccagtgtccaggacagcgcccggtaccaaaggtgctggtaaacatttgtcgaatgagtcgctgaacgcccagctatttccactgtcacagcgatcatgtgtggcggacattatgtggcatgtatcttacagaggaggcagcccgggctcagggagacgaggcagaggtgcacgcaggtctatgtgggctggaaagtgctggggcctcccgggcgctcctggtctccaggcaagaactggaagcagagccactcaacacctagaagggcagtgacagaaagctctggctgggaggaggctgaccagaggccagtctgagctcagccttttttttcagagggacgtgggcaccctagaagggtggtaagtaggcgagtggcagagttaaaaggtctctggctgccgaggcgggtggcgacggggccggccgttgctgttgtttggctgagtggtggacagggtcaaagccattccaaggtcgacttgacagggcttggtaatgtgggagggagggagaaagaagcaaggggctaatggccggggtgataccactggcagagatgtggaagagtgggagaagctagcttggaaggttaactttgattttgaacaccttgtgtttgagaatcctgacaaaccttagaccccctgaattttctctcagggattctgattcttagcagcctgattgcagaggaggaaaaatggctggggttgagccagacagttctgggcaaggagtgagcattcgcttgtttattgaggaggctgctgcctgggccacactccctccgccagctgccaggttcctgccccggttgaacccggttttctggccatc

SEQ ID NO: 41735 - DNA, 1018 bp, Artificial sequence
  DNA replication origin
gggtctgggccctcagccctgcacaggggcgaggacggcgctggggcccgcgcgctcgggtggggaagggcgggctcccgaaccctgcctctgtccaggccggctccacttccaggggcgcctctctcccctgcccgcgccctcgctgacgccccccaactccaggctgcccttcgccgtccttggggctcctggagctttcaaggcccaaatcccctgcaccacagtggctgtgcccacccggaaggctggcgcgaggatttggcggcggttggcctggcggggggcgcgggccgggggcagccgctagtcgcggggtggggggcgcgaggggtcgcggactggctgggggcgtctcggcgcggctggcggcggggccggcctaagcgcgcccgcgcacccatctgcccccgtcctaggtgccgaccaacccccaggatggcggaagctcaccaggccgtggccttccagttcacggtgaccccagacggggtcgacttccggctcagtcgggaggccctgaaacacgtctacctgtctgggatcaactcctggaagaaacgcctgatccgcatcaaggtgcgcacaggtgcttctcccagagcgtaggcagaggccggctgtcagctgttaagcgctttgttagggtccctcactgcctccttggctggcacttctgcccggtacaggttgtggaagtacagacaccagaggggtgcacaggatgtggtcggacacagggagctgtgggtgtggcggaggaaggagcacagcagggcatcaggagagaaagccttccaggccaagaccaggagccagttcccaagacttcacaggcaggctaacctcccgccttccggctccataagggcgcctgtttctgcccacagaatggcatcctcaggggcgtgtaccctggcagccccaccagctggctggtcgtcatcatggcaacagtgggttcctccttctgcaacgtggacatctccttggggctggtcagttgcatccagagatg

SEQ ID NO: 41736 - DNA, 1964 bp, Artificial sequence
  DNA replication origin
ctcccatacccctgtaggaagttactagagtctaccccatcgccagtcgtcttctgccacaatgacatccaggaaggtaggagaaggcatctgagtctcctaacccaagatggaagagccagagggctctggagtgagcagaacctcaccccattcccccagggaacatcttgctgctctcagagccagaaaatgctgacagcctcatgctggtggacttcgagtacagcagttataactataggtgaggctggaaagatggcttcccatagatctgttcccatagggctcttgaaaacaggccagctgcccagggcatttggggactgaatgtccaccttattctcccaggggctttgacattgggaaccatttttgtgagtgggtttatgattatactcacgaggaatggcctttctacaaagcaaggcccacagactaccccactcaagaacagcaggtatgtgggccagaggctggggagcaggacccatcctgtgaggaaggagggaggtggagtctggaaggaatggccggaaaggatgttacctgggaaatactccacagtctccccaattcctgactcttggccattgatcgtagttgcattttattcgtcattacctggcagaggcaaagaaaggtgagaccctctcccaagaggagcagagaaaactggaagaagatttgctggtagaagtcagtcggtgaggaaggaggggcagggtggggtagggcagagcagaggaaagagggattggggaagaggcagatttatcaagctgcagggaaggtggctgtggagagtggagttaggacagtgggggagaagttaaaactgtagggattggccaacctgggtgaggggatccaagcagtgctagacatgctcttgaatgcccctccttttcctgccctccccccaggtatgctctggcatcccatttcttctggggtctgtggtccatcctccaggcatccatgtccaccatagaatttggttacttggtaagtgaccctggggatgggaatgctagctggggggctggggagcagcagcagccacactcttccaggaggcctggggagtcccgggtggctgtgggcagcctgaggtggatgtagaatgctggtcccacgtcttctcaccactgtgtggggtgggtttccttccctaggactatgcccagtctcggttccagttctacttccagcagaaggggcagctgaccagtgtccactcctcatcctgactccaccctcccactccttggatttctcctggagcctccagggcaggaccttggagggaggaacaacgagcagaaggccctggcgactgggctgagcccccaagtgaaactgaggttcaggagaccggcctgttcctgagtttgagtaggtccccatggctggcaggccagagccccgtgctgtgtatgtaacacaataaacaagcttcttcttcccaccctgtcctggccctgctgagcagcagcagaaagtaccaaaccgagcagtacacacaaagggactcttcagtgctctgggattgaaagtggttagcgttcatgctgccagttggggtcccccatccctccccagtcccctggctgcagcttagaataataaatactaggacttggggaggaggagagtgatgggggtatgaagacgaccctgaggtggggatgccgcccggagcaccagcgatcccagaacaggcagcagctgacacatcggtgaccttttccctacatttggctatttttagctctaaagccaccatcctcacgagactctggggccccccaggctcccagacctttgagcaaccttcaccgcacagaaacccagccgcgccctgcaattcccaccgcggaaggtgggtgggttctggttctcgccccacgtttttccccgaccccgatttgggagtaggtgtcaggttcctggtgagggcg

SEQ ID NO: 41737 - DNA, 1232 bp, Artificial sequence
  DNA replication origin
gaagtgctaggattacaggcatgagccaccgtgcctggccttggcaatcatttcttttttctttttttgtttggtgttttgagacagagtcttgctctcacccaggctgaagtgcaatggcatgagctcagctcactgcaacctccgcctcctgggctcaagtgatcctcccacctcacccacctcggctcccaaagttctgggattacaggcatgaggcactgcatgtggcctctggcaagcatttaaaagcctgttctgtgacagcccatgacatcagatccactcaagtggagggctggatagagcccccgacacatccgctggcatggaggttcagctcaggagtacaggagccctgaggaggctcctgactcaccgctccatggtcccaaacagccagtggggctccttggtgaaaggcatctccatgccatgaaattgcgccatcttcgtggcaatggctgctgacaacactggctctcgaagctcttgagttttcaatggccgactctgcacccaggaagctatcagggtggtgatggggctggggcaggagtgggaagggctggggcaatgaggggaagtcagggttttgggggaaattccctacttggggtgagggatgtggaggcagacattgggcactggggtagggttagggggtggaggtgccttggggaggagagggtaggactgggcccgtactgggatgtactgttccagccggccctctgggaagactccgtacagctggggccccagcgaccgctccgcaagtatggcgaacatcacgctttctagcaccagggagtccacgccctgaaaaaggatggacagcaaaggggccaaggcaaagtggcacagggacacacatgagggctcgccttcctcccaccagagctgcgacttctgatccaattgcctggaggctctggagcacaggctttagcgttggtctatttttatttagagatgggggtctcactatgttgtccaggctggtctcgaactcctgtgctcaagtgatcctctcgcctcagcctcccaaagctctgggaatacaggcccaggcttcggtgtaatgaggtgttactcagaccgtgaacctcggtgtcctcaactgcgcaacgggaacaatactacccgcatcgcgtaagcgacaggccctaaagccactggtgctgcggcgctcacacccccctcacctgcaagatggctccgtacagccg

SEQ ID NO: 41738 - DNA, 1229 bp, Artificial sequence
  DNA replication origin
tcttccggccggcctgggcttctccggtcatactcgggtctctccggctctattcggctcacggctgcggcgctcggctctctccgtgccccggcccgggggctctttccgaaggccgaattccgcagatctctgccgggccccgcccctatgggcaaggaccaatggtctctctctgggcggggctgctgttggacggcctgggccaatccgaggcgccggaggccaatcagttggcggagcggcgcgtgcgcgggcgaggaactgcccgggcgcggtagcgtacgggaagaccggagaggagctgcgtctctgccccgtgggagccggcggggcggcggggcggcggctgcagctgcagctccggcgcgagggctcccttgccgggccctcttccccgacccctggggcgctccgacaaggaagagccgtccagcgcgcgtccgtcctgagcgtgggtgaggcctggaggaggcgcgcgcgctaggcagggccgcacagcgcgggcagagtgcgggatgcgggcacccggtgggtacgcagtaaacatttgctgaaggaatgtgacccttgggacagttccgatgactccagttgcataaatgcccagtctacacggggactccctggccggtagagccgcacctctgaatgaggagtcttttgctgccccgcttgagatgcgcgtcttcattcattcccctctccccctatcctcctcgtctcctccaggcctagaaccaattacagagtcaaacccaagagccgaagaaagtgaagactcgcagcttgccgcagccccctcctcggcctgcgcacctcccattgagggcgtcctgatttaaacgcgtgcctcctgcatttctgcttctgccccaggctagagcggcgaccaggaacgctggacccacagagatctgtggcaatgtctgtcgaaccatggtgttctttggggcatctgactagagtattgtttgataaccagaaagaaatcaaaaattggtgatcacaaggctaatgtcacttttgctgcagtggaaaatcatgatcattctgtttaaatctgagtcagttttgagacctagagcccattaattgacaaggaggcttggttcctctcaggaaggatcttacaataccagcatctgagcatataccaagaaatattcctccaatccttccctaaagggacctagagccactttaaaaagtaactggtccgggcgtgg

SEQ ID NO: 41739 - DNA, 996 bp, Artificial sequence
  DNA replication origin
acctcgtgacacgccctgcggcgtccgccccgcgcacctcgcccggactccgcggcggcgcggggagggcggcgggggaggcgggggagggacgcggccggggacgctggttggaggagaggcggcggcttcactgccgggcgctggttggggaagggccgggcgtgcgatgaggatttttcccggggaggggcgggagggaaggggcgggcgggtgggcgtcgggccccgccctggaggacccgcgcggggcgggaggccgaggaggcagcgccggggtccgcgggcctcgggttcgccgtgggctgtttcctctgggcgagaggccggggcggccccgggagctgcgccgccgcgcccaggatccccccaggaaccctaacccgggtgcggcccggagcggggtggcgggcgaggcgggaggcgcgggaggagctgtccgccgtcgggtgctgatcggagctgtccccacggggtgctgaccggggctgcacggggacgtctgcacgagggtcgccgagcagggctggattcagaatcgagcacaaggtactcagaggatgctggctggggctaaaagtggactttgagcactcagtagagactgcacagccggacggacgtaccgacgggcactgggagaagttagcacccacggaggcgacatgcgtcccactggaaacactttttcttgggcaccgtgttgctgggccctgtgtagggaactgacccgctctggcttgggatggagccctgtggggagggccatggttgaagctgagctcgagacggtggctgtgggaggaggcgggagatcagggttgagggcgcagaactagggagagactgcaggacactttttttctttctaaaatagagaccggtggctgggcgcggtggctcacgcctgcaatcccaccactttgagaggccaaggcgggtggatcacgacgtcaagagatcgagaccagagaccatcctggccaacatggtgaa

SEQ ID NO: 41740 - DNA, 2180 bp, Artificial sequence
  DNA replication origin
ccatcttcaccgcgcgtccccagcctcagtgacccccgggccccgccgggattctgagccgcgcccggcctggacggctgacctgtcaagggtggaggccctgggccgaccctctgcgggggaggatgcgggcgggatgcgggcacaccctcccggcgcggcgtgtcccggtggccttggcctctttcagtggacgccagacctggccgatagggcccggccgggagagagtggaaatcaagcccggagccctgcgggaagggactggggttgggaggacgctgggcctctgggtttaggcctcactccgccggagagggggagacaaacaggccagactctcttcccagagcaggagcgacccctccccatctgccgctgccgcgttgcagctccccctcccctgctctgcaagaccctgaccccaggggcctggagctgcgagtggagggaggagaggctgctggctctccagggaggcggggtgggaggggtgggggcagggttggctcctccgggcaggcctggctcagatgggggaggggatccacaggcgagcagagcttgggggtcaagatgatggcaggatgtgttccgagagctgggggctgtggaaaccactgggtgtaggagctgacgcctccctctgcccctcctcagggccagttgccaggcagggagtccagggttggtggctctctgaccctggtctcctttccaggcctccccaggacataagcctggaagaatttgacgacgaagatctgtctgagatcactgatgactgtggcctgggcctcagctacgactcagaccactgtgagaaggtgggagaagagttggggacacagatccagctcaagggagggcctcattaggttcttcttagcgttcacttggggttttagggtgggtgtgagctcagccttgaaccggggactcctctgatggctcctccccacttaacccttgaggtttccttggtatcaactctctcttattccaacacattgcaggcctccacgcagggccttccccagcattctccccgaccccatcggtggccagcccggggcagggaggtgctcctttgctttgggtgccctctgtcctcagatcactcccagaaagatctaatccctggcagctgccatcacaaccttgtcccctctgcagccctgtgccctcgtctgcagctcccatctgtctgtttcatgtctccccctgctgaaatcttttctcgtccatctcttgcttctcctcctccctgtctctccacatttctgctttcatttattgaagaacatttctgagcaactgccatgtggcaagtactgggggcttctgggtgctgggagtggaacaggacagctgctctctggagctgcaacttagtaggggagaaagacttgtaagggacaatggctgcccacgtgtcaagggctgcattccaacagggacataagttccacgagggggaagggaacccaatccacactgaaggaatcagggagaatttccagaggaaatgtcaaccatgccctgaggttagcagagccaggcagatggggtaggtaggagggaatggaggagaggaagtgccagcatggggaataactgtgccaatggccctggggttggcgcaaagttggtgaatcctcagagtgcagaggctgtctctccatttctgcatctgtttgatgtttactgaacatccgctgagccccaggtcttgttcttgggggcgggtgcaacagtgcataacatggacatgaccctgccctggtggggcttgcaacagaccaaaaaccatgtccagtaactgtaagttgtgttaaaacgctgcgaagggaacacagtgctggtgtcaaatgtgatggggttctgcagttagatgagtctgaaagtggggctggggctgctctgagaatccctgtcattcagctgtagagtttaggcccttcccaagaactggagtgatcccaatgtgtgttaggcagattttgaaaacatcgccctgtagacagaggggcagagtgagctggaaggggctctcctttgactgatgctccccgatttcccttctcctagcacctgggcccctgggctactgctgccctctggcccagccctgctatctccctccgtcctgcaggacagcctctccctggggcgctcgg

SEQ ID NO: 41741 - DNA, 763 bp, Artificial sequence
  DNA replication origin
cgagatcatgcgccccaggcgcgcgccgcccgcgtcctccgagtcggagccgggcgaggacagctcctggctgctgcgacgtcccccgcggccgccgctcgagcggcttctcaggtcagcctcgatgccgggatctgaggagggcgaagtcccccctggcgcagggggttccgcaggccggttcccttcgcagtcgcaacccgggcgcactggcgactgcgccccgccgggcccggtgtccgtggcagggagggggcccgggagctctgctgggcagggaggtggggtcaccctctctgcaccacccaggcctcttccagcagccagtccatcctccctgccctcctcccccgcttccccgcgccccgcgggcccaccacccctcacctctgagggcctccggggcgggtgagcatagcgctgtctcctgccaggaggccggacgcaccaggtcaaagcctccgttgttgtttagggagtcctggggtggagatacatgacggcggtcctgaggagggccagctcccagggggtgagcagggctggctgcagcccaggtgctatgaacccaggctcagctccagggagctgtgggtccgggcactcacctgggcccccagtgtggtcagacggagggtggtgggccggtgcttgtggggctcctccacggaaggggaggggataaggggcccgggggcaggtgcctctgagccagggtctcctccctcctggccttccccatctccctcctcctcctcctcct

SEQ ID NO: 41742 - DNA, 804 bp, Artificial sequence
  DNA replication origin
gtgttcaggtacggcctccctccttgctggcggtggccccagcctcagtccctgccatcacggaacgccagtggacacgaccgtcaatcccgcccccctccccagtgacctctcccccaacggcaggttcatcccgcggcatccagacgagctggagctggatgtggatgaccctgtgttggtggaggccgaggaggacgacttctggttccgtggcttcaacatgcgcacgggggagcgcggtgtgtttcctgccttctacgcccatgcggtgcccggccctgccaaggacctgctgggtgaggtcccaaccccgaggggaggcttttcaccccagatcctcccctgtgcccctgcctgacctgggccctctgtgccccgctccccagggagtaagcggagcccctgctgggtggagcgctttgacgtgcagttcctgggctccgtggaggtgccctgccaccagggcaacggcatcctgtgtgcagccatgcagaaggtcagtgtggaggccgggcaagtgcaggctgagggtccgcttggcggccacaccagcactgcaggctggcacagggcttgaggctccaaggtctgaggtctgatttcctccagggagggtctgggggatgctgcagggggagctcggggtgggtaccccaggccctggttcagaggcctgagcaggtgagtctagggcagagcacagcagctgtccctcatcacctctgggtctctgggccacagatcttccaggtggccccgactgccatcagcccttcctcttcccatctggaatcaagacca

SEQ ID NO: 41743 - DNA, 1076 bp, Artificial sequence
  DNA replication origin
gggaccggggactgggggatagggttaggccacggagtccgacggggccaggctggcaggggtgtccagtaggtgggaggcaggggtggcgccaggcctcctttgacacagggacttctgcccacctctgctctagttccagcgctgcagccatttcttccagatgaagaacatctccttctgcggctgccatccccgcaacagctggtgagagtctgaccgtccccgagtcccccaaccgcccccacaaaccctgagagtccaaccgccccctgagtccccacagaccctgagggctgcccgtgcccagccctgagagctccacctgcacccacttagctctgtgagctgagcctgcagtggcgcctgctctgagctggactcaggaggcgtgggtcagacaggcttgcatccagtctgggtggagagaggcacacgggcgaaggatgtgagaagcctgtgtgggtgcagaggacgcctgagtgggcctggggctcaggatggccagcctggaaacacagcaggtgacagcggtggggaagtggatcttcctggtggggtctagctgagccaagggtgtgggatgcactggtcgggggctatataggctctggggcccgcgtgtaaggggagcagctagaaatgccggggaagacctggacccttttgattatgccaaggagctgtacttaatcttgctggtaatgaggccatagaaggctcctaatggaaggaggtgacacaggggacctgggggctgctgaggttatacaggtgctatgtcctgagaccaagtgtgcagatgcaagaggcactgaagaggcagtacaggcaggacctaggttgaccggctgtagagggtgacctggaagagaccagggtgacgtctccctgggggatggttgtactgcagcccacacaccgagaggggatgcgggatcaatcacaaacggtgagactgaagtggccgttggtcccatgggtctggagtttaggagggagacctggagggaagataccaggtcagagcaggtagatcactgagacgagaggggaatggccaggcagggtgaggg

SEQ ID NO: 41744 - DNA, 839 bp, Artificial sequence
  DNA replication origin
taatgaggccatagaaggctcctaatggaaggaggtgacacaggggacctgggggctgctgaggttatacaggtgctatgtcctgagaccaagtgtgcagatgcaagaggcactgaagaggcagtacaggcaggacctaggttgaccggctgtagagggtgacctggaagagaccagggtgacgtctccctgggggatggttgtactgcagcccacacaccgagaggggatgcgggatcaatcacaaacggtgagactgaagtggccgttggtcccatgggtctggagtttaggagggagacctggagggaagataccaggtcagagcaggtagatcactgagacgagaggggaatggccaggcagggtgaggggaggaggggaggaggaggtgctggcataggagcagcaggccaaggggggctgccagcttccctccaggcacaggcccctgccctctgtgtcccagcaccctagaggaaggagatctgggaggaaccagagaggcagagccagccagaggctggaaaggacttgcggggagttggaggaagcaggctcacagacaggcaagacacagcagggcacggtgctgccaggactgaggcgtgggacagacgtcagtgcatcttgggggccttgtggactctccctgtggtcgagagtgagggtgctgcctgctggaaggtgcggagcccttttgtgttgtccccgccgagtgcagagatggtctgatgggatccatgcggaaacgctgctcagtggggtggagaggtgggacagcgggcagcgatgcagaccagactgcggggccagctctggggtggagaggtgggaca

SEQ ID NO: 41745 - DNA, 1247 bp, Artificial sequence
  DNA replication origin
ctgctcagtggggtggagaggtgggacagcgggcagcgatgcagaccagactgcggggccagctctggggtggagaggtgggacagcgggcaggggcgcagaccagacagcggggccagctctggggtggaaaggtgggacagtgggcaggggcgcagaccagacagtggggccagctctggggtcaccaggacagcgaacggggcgcagaccagacagcagggacagctctggggtggagaggtgggacagcgggcaggggcgcagaccagacagcggggccagctctggggtggagaggtgggacagtgggcaggggcgcagaccagacagtggggccagctctggggtcaccgggacagcgaacggggcgcagaccagacagcagggacagctctggggtggagaggtgggacagcgggcaggggcgcagaccagacagcagggacagctctggggtggagaggtgggacagtgggcacgggcgcagaccagacagtggggccagctctggggtcaccgggacagcggacggggcgcagaccagacggtggggccagctctggggtcactgggacagcggacggggcgcagaccagacagtggggacagctctggggtcactgggacagcggacgctgccaggagaggaagaatgacccaaatttctcatcagaaggaaactgggtgaagctcaggtctcaggctggacagggccccagctagaatttcgtgagaggaaggtggtcagtcgagtttggggtttggagtcaagatgtggcaggggtgtgggaggaggtggaggagctgctgccctggcccagaccttcctaatatttgtcaccccagaccccccgtccccggtcccttgccacgaggaggcacggacgaaaccgtgtgaggtgaacgatgaactcgtttcttcatggcggtggtggtaggtcaggagagcgtggggtgtgctgtgttgggatctggcattaggatgtctggtgttgggatcacagactgtagccttttctcccagggctgcccatcctgcctgtgtgtcctgggcaagctcctgaacctctgtgcctagctctccatcagggccctacctcagagggctgttgtgaggcttctgtgagttaatggaaagggcagaggatggtgcctgagtaatgcaggaagccagatctgtgggtcggcgcttattaccatcatgacttgaacgcggcatttgaggcgggccctgtgctctgtct

SEQ ID NO: 41746 - DNA, 672 bp, Artificial sequence
  DNA replication origin
catgggggaatggacgggtcggccagtttcaggggtgggggtggggcagcgtcctgctgcagaactctgcctgcctctccctctggacgacgatttttgatttttgctaatgtctgggtggaggagctgggcagtgactccatgagcgaggccccgcaaggagctgctttccagtgggagcgaggggtagaccggaagagggttttacagaccaggggtaacgtccagccccacctcggagctgggcaaggggctgtcagtctgctaggcccgcaggaggaggcctgagttggcaggagatatggtctccagtagccaggcagaggccttgctctgtggtcctggggcaggccctgaatagggccacagagggtagcagcaccggctcagagaagggagagtggacgcccctggtcatcatggaattaactcagagcgtgaactcttggtaggtgcccagccctgtgcttgggctgaaaccaaaaaaagacaacttcagatcttgaaattgtgcgacccccacactcctgtcccttaccctctccccaagccctttgttcctgcctcttctctctacatcatttgtggggtggccaaggctgggccagggctctgacgtgccctccacactgacttgcccgcagctatttcggcttcatcaccaaacacccc

SEQ ID NO: 41747 - DNA, 823 bp, Artificial sequence
  DNA replication origin
tgctaggcccgcaggaggaggcctgagttggcaggagatatggtctccagtagccaggcagaggccttgctctgtggtcctggggcaggccctgaatagggccacagagggtagcagcaccggctcagagaagggagagtggacgcccctggtcatcatggaattaactcagagcgtgaactcttggtaggtgcccagccctgtgcttgggctgaaaccaaaaaaagacaacttcagatcttgaaattgtgcgacccccacactcctgtcccttaccctctccccaagccctttgttcctgcctcttctctctacatcatttgtggggtggccaaggctgggccagggctctgacgtgccctccacactgacttgcccgcagctatttcggcttcatcaccaaacaccccctgctgagccgcttcgcctgccacgtctttgtctcccaggagtccatgaggccggtggcgcagagtgtggggtgagtggggccccagggtgtgggtgcagaatgggtgcagggttacggaggtggggagcggaggtgagcaggtgggggcaggagcctggcaggggaggtctggggaaggagaaccagatgtgctgtgtagagagggcagtggtgggtgacagtttggggtgctgggcatggggtgggaacaggcacagacacatggcccaggcactctggcaggggtagaattgctgggccaggagagctgagggtcacacttgggggtgacatggccatgcctgggtggggggttatggatggctgcagagggaggaaggagggagagctcagaggctctgtggaaggcag

SEQ ID NO: 41748 - DNA, 924 bp, Artificial sequence
  DNA replication origin
aatgcaggggtcgggacgaaggctcctgtgagtctgaagtgactgtgagtggcaccctctggccagccacagtggctctcacagctcattctgcagagcaccggcccagtgatgagccgaggaagtgcccctggaggtcagctggatctgcccagtggtctgcacagggggcggctgccaggggcctgagcacagggaaaccctcgaaactgtgggagggatgaagccagagaggtagaccccagaaccgaccaagcccagcatggggcgtggagggcggccaagctcaagaagaccatgagattggagaaggagctgcagagaggtggaaggcagacaggcgaaggactcacgagcacgtccaacagccgtcctaagggccggctggagggaaagagacctgaagacacgttggggggcggggccgggcaggggcggggccaggccgggcaggggcgggacgggggcgccggagggcagggcttggagaattctcacctgagtggaagagcagagggaggaggtgggtgggtggcagcggtttccaggcagcagctacaggggactgagggccacaccccgaatgccctagcccagggggcacaagtttcaaacgtacacacccagtggggctatctgcctctttacagctttatctcaattagtaggaaagttttctcataaacgttctgcgtttccgtcgtgccactggtctgcgtcctcggtctctctggggcctcaggtctgtgcgctgcacacgggctgaacctctggatcatgatgcacttcctaacactgggcagctatttctctgcttgttggctctgtgaagacgtgttttttacggacagcactttctaatgtttatgtagtaagtttgtgtatacttcccttagctcactaaggaaccttcaactgttgtct

SEQ ID NO: 41749 - DNA, 1156 bp, Artificial sequence
  DNA replication origin
gagctgctgtgcccagaaatttatttccacttaatagcataacagaaattttctgtgtaattacaaacattggaactttttttcacatctacccaatatttcaattaggtaaatataccttaatcaattaaccctattggtcaatattcagattacttttatgcttacattatttcaaagaagaatgcaataaacacttttctgtagaacgcgttttatttagaacgccatccttgggctagattggcggaagttggaggcgtcatgcagcgcctcctgcctgggagccaggcgatccgccaggttctgggaggacctaaggtcaacagccacgcctgctctctgggctcacagtcagcagccgctaccaggagagcaagtcctcagaaggcccgagaccagggcccgggagcgcccacaaggacgggaggtcacccagtgacaaacagggaagggcagcaggtgcgcccaggaacccagaggctcccagagcagaagtgggatgcaggggtgggggcgggtcatgctgaggttcaacagggacctgcttcctggttcaacagggagctggccagagagagggatctgctgaggcttctgtttaaaaaccctggcctgggtgtgggtgcaagtggatttgcaggtgcagtgaggcagcggccggagcaggctgttgcacgaagacccaggaaagtcagggtggtttgatccaggcagaagagggggaaatggagcctggggcagacgtaaaggtgctggggtgaggataagggtgacaggagggaggagtctggggtgaccaaggcctgcagctcaggtgactgggaaaaaacataaaacagaacacagatgaatgcaggggtcgggacgaaggctcctgtgagtctgaagtgactgtgagtggcaccctctggccagccacagtggctctcacagctcattctgcagagcaccggcccagtgatgagccgaggaagtgcccctggaggtcagctggatctgcccagtggtctgcacagggggcggctgccaggggcctgagcacagggaaaccctcgaaactgtgggagggatgaagccagagaggtagaccccagaaccgaccaagcccagcatggggcgtggagggcggccaagctcaagaagaccatgagat

SEQ ID NO: 41750 - DNA, 1200 bp, Artificial sequence
  DNA replication origin
gcaccttcagattctcgagcggagatctgatcctcctcgcctagcggtccgggctcagggtcgggggcgtaagtcacttggcgctgaccagcggagtcgggccggggggaaggcgctagagggagcccaggaggagccggtaccgggctgcgggcgcttccgcctcggccccgccccgtgacctgtgacccttgcggggcggggccgggggcggggccgggggcggggccgggggcgggccggggcgaggggcgttgctgcgcgtgctcgctccgaggccgccgtgtgcgcctgaggctgttggctgcggtcttgaaacgggctctgggagcttcctctgcgcggtcggccctggctgaggcgtcccgggctgcgcgcggggctcggcgctgcgcagtgtccggtgtcctctcggtccggagcttctccagaggaggagcggctcgtgcgcccccagacctccggtactgggagactcgggccctcctgtaagagacctgagcgcggagcgttatgggcacccggtgaatgagcaaatggcagggaaaaccgtgcagccccatggactgcgggctcttccttcacgactagcaaaagctttgacaccctttctcctgcgtacgcgtgtctgtgtgcgtgtaagctgtggctgggtgcggggggctgtgtacgtgtctgtgtgtggtgtgtgtggagtgtttgaggcaggtgtgtggtgtttcaggtgtgtgtgcatgtgtggtgtttgaggtgtgtgtgtgtgtttttgtagtgtttgagggatatgtgtgtgtggtgtttgaggtgggtgtgtggtgtttgaggggtgtgtgtgtgtggttgaggggtgtgtttggtgtttgaggggtgtgtgtggttgaggtgtatggtggttgaggtgtgtgtagtgtttgaggcacgtatgtgtgtggtgttgggtgtgtgtggtgttagaggtgtggcgtatgtgtgtttgcggtggttgaggtgtgtgtgtgtgtctggtgtttagggtgtgtctgttgtgtgcgtgtggtggtggaggcgtggtgtggtgtggaatgtgtgtctggggtccagtctggcctgttgcagggttacgctgctggggaaaaactcatctgaggacaacgtgattgggtcctcgctccctcgttgggcagccttggacttaacctttttgatcttgaaggaaaacac

SEQ ID NO: 41751 - DNA, 868 bp, Artificial sequence
  DNA replication origin
tattttggcagggaaagaaagacactaaagcacaaataagtgagtcagagtatgctagaagggcctcaggaggaaggcaggggaccagagtgaggcagtggagcagtgtggggccaggcaggcccacctgggagaggaaggtggaggggatggcctgggagcagagggtcctctcccgaggtgtggaaaccaagggaggtgaaggttctggggaagtcaggtgggacaggacagaaacgtgcctgcggggtgagcagcacaggtgctggtgtcacctttgggaatcttttccagggaagtggtcacccagggtttgtgggctgagcgagagggagggtagggagtgagtgagaggggccgggggagcgatagtgaggggtcgggaggggacagctctgagtgcagctgaagtgaggccaacagctctgataagagagaagccagcagtgggcaaacgcaggcccacctgaggtcctgaaggtgggtgggggtgtgagcccccttgctggagagtgtattaagataggagggccgaggtttggggggtgtcacaggaagtgctgaggcagggagggcccttgcagtggcctcagcctggggtggcagcggggcagtgggctggggtccatccaggggttggtttgcacccagcactattctgggtgctttgcccacatgagctctcccagaccttgtgaggcctatttgtgtctgaatgtgtgtgggggcaggtggggaagaagtggggatggtgagaaggacagatctttctagaattttggccctgttggaaggaaggaaaaccctaggggccatggtgtcctgtaaatccccaccttccaggtcagagatgggagagaagaggggg

SEQ ID NO: 41752 - DNA, 754 bp, Artificial sequence
  DNA replication origin
gataagagagaagccagcagtgggcaaacgcaggcccacctgaggtcctgaaggtgggtgggggtgtgagcccccttgctggagagtgtattaagataggagggccgaggtttggggggtgtcacaggaagtgctgaggcagggagggcccttgcagtggcctcagcctggggtggcagcggggcagtgggctggggtccatccaggggttggtttgcacccagcactattctgggtgctttgcccacatgagctctcccagaccttgtgaggcctatttgtgtctgaatgtgtgtgggggcaggtggggaagaagtggggatggtgagaaggacagatctttctagaattttggccctgttggaaggaaggaaaaccctaggggccatggtgtcctgtaaatccccaccttccaggtcagagatgggagagaagagggggtagacctgggcccagggtggccctgcctggccggtggggtctggtgggccagagggagggtcctcaggaagcttggggaggccgtggggaacctggggattattctcaacaaagtaaggggcaaagacatcctgtgtcccttggcttcctctccaggaacccccccggagcccagaggacgtcatgtgtgtgagtgcttgtgggtattgttatttttgctgtttgccggggtggcggtggagctggggagtgactcaggcttggactcttttcacgatgtgagcatcatgcgtgccaggcactgtgcagaacc

SEQ ID NO: 41753 - DNA, 891 bp, Artificial sequence
  DNA replication origin
tggggaacctggggattattctcaacaaagtaaggggcaaagacatcctgtgtcccttggcttcctctccaggaacccccccggagcccagaggacgtcatgtgtgtgagtgcttgtgggtattgttatttttgctgtttgccggggtggcggtggagctggggagtgactcaggcttggactcttttcacgatgtgagcatcatgcgtgccaggcactgtgcagaacccaggctcagggcggcactgggcaggggctacggtgttgccccgggcagtgggtctttgacccagctgagtctggggaccatcaatctgtgggctgctggttggtgaagatgtgagattttctctcaaaatgctcagtggccacagccccagtgctggcctggggtggctggattcacctgggctggtgggttggcaggaggcggctggtggggcccagaggtccagtctaagggtcggaggagtgccggccagggtctctgggtccacccagccgagggcaggcttgcagggagacaccaagggagagggaggaggcccagggctgtggaagacctggctgcggagagtccatcactggtggactgggaggccccatccaccaccttctgctggccacagtgggatgaagggccggcacctgggagcaaaggcaggtggaggttgcggtgggagggacggcaaggaaggttagggttagggctgaaggaggggttgggagggagttgggggcctgggtgacagcggggggagagacatgggcaggaagacggtggagacacgaggtgggccgggaagcactggtttcctctctccagggctgggccacaggaaatccagccctcgtgccttccaaggtgcttcctgccgatacgggagcctc

SEQ ID NO: 41754 - DNA, 1262 bp, Artificial sequence
  DNA replication origin
gtggaggttgcggtgggagggacggcaaggaaggttagggttagggctgaaggaggggttgggagggagttgggggcctgggtgacagcggggggagagacatgggcaggaagacggtggagacacgaggtgggccgggaagcactggtttcctctctccagggctgggccacaggaaatccagccctcgtgccttccaaggtgcttcctgccgatacgggagcctccagggccccttcctgctccctgctcccgggacccccacccctcccatcctgccccctcccctgggagaccctcagctgcaccactcaggccaggccagtggccttgggaggggcctgtgatgctgggaccacagttcctgggcagggagcaaccgtctaggcgtggggagaacgcaggacgtgacccacacaccgcactggaggctccgctctgcccggtcagtggcgtcctggggaggcgggaggaggaagccagactggtcccagggaagtgaggccctgctctggggttgaccagaggctgttttgaggggagagggctcatcagaaacactctgtcaggggtgctctggggtgagcaggtgctggtcgaggtggatctgctggggagtgggggctgtccttggagggagtgccaagctctgttctgtgtgggtcagggtgtttaggatggtccaggttgtcacgcgggggagggtagggaggtttttctgcgtgtatgggggccggagcagttcaaggttattcctgggaggctcaggcaaaatccgttttgtgggtgatctggagctgctcttggggaggctgggggttagaggctgttttcctccttaggcagaggggttccccaggctgggctcttctgtgaacgttctcaagctctgccctcagggggccagcggctcctctaggaggatctggggctgcttgggggcggaggaggggggtggggaacgccaggcaaagcgggttgggagagttctgcaggaggcggaactatttcgacttaggggctgctcttgggggcacaggggctcgcagtgcaggacagttccgagaggccgctcagggctggggggcctggtgcaccccgatggggcggcggtgcctgagctcgtttctttactgagctcccccctcctccgcccactcatcaccccctcccgcgttgccacgacaacgcgtaaaactaaaattcacttcccagtcgcaggtggagactagtagcgccccctcccctaggcccttccccgt

SEQ ID NO: 41755 - DNA, 1921 bp, Artificial sequence
  DNA replication origin
cccgggacccccggcccacggctactcacccctcccccgccgcctccgccgggaccctccccatcgccagggcggggccccgggaagcccggcccctggggcggggcttcggccgcggttcgcggaggcgcggggtcccgggcgccggcacccgagccccggactccttcggcgggggcccggggctcggcaccccgcatggggccggcggggcgggtccgcgctcccgggacctgagctcacgagcccgctccgctgcagaagtgcctgcgcctggacccggccgcgcccgtgtgggccgccaagcagcgcgtgctctgcgccctcaaccacagcctccaggacgcgctcaactatgggcttttccagccgccctcccggggccgcgccggcaagttcctggatgaggagcggctcctgcaggagtacccgcccaacctggacacgcccctgccctacctggaggtaagtggccggcgcgggggtgagctgaggagcgcgcagggtggatcaccaagccccgtggcgggaccagtgaagggcacggcagtggggaaacacaagtgggaggggtgaggggtggaggctgtgtgtgtgtgtgtgtgtgtgtgtgtgtggtgctgtgtgcagagtgcagtgagcgtgtacagggtgcagcgagcggacacagtgtatgcgatgagtaggcgcggtgtgtgcagtgagcgggcagggcgagcagtaaggatgtacagtgtgggcagtgtgcgagcatgtgtagtgagcaggcagtgtgtgcagttagcaggcacagtgtgtgcagtgagtgggcagtgtgcacagcatgtacagtgtgagtggtgtgtgctgtgtgccgtgagcatgtgtagtgagtgggcacagtgcagtcagtgtgcacaaagtatgcagtgggcacgtaccgtgtgtgcagtgagtggtgtgcagtgtgtagtgtgcagtgagcagtgtgtacagcattgcagtgtggggcagtgagtacagtgtgagtgttgtgattgtggtaagcaggatgcgcagtatacagtgaacagtgtgcacagtgtgtgcagtgtgggctgtgtgccacagagtcagtgtggtgtgtgtagtttgaacagtgtgtgcattgagcagcatggatggtgtggacgctgagcattgttctccagggaggagtgtgagcacgagagagtgccagaggggtgtgtggtgtgagcagggctatctgtgtgcacgtttgttcctttctccagctgtgaagtcttgtgaaggccaaccaagtcccctcctttactcacccatgcatggtgtgaagatgtattgagtgccttgctaggcatggggacgtagacggggtcagtcctgtggaaggtcttggagtttggcagggtggaggggggtgcccaactgcagtgggcattgaataaagattttgtgagctgagctcaaagttgggcgggcctccgtggtggcacaggaaagtggggtcagttctacctggagagtggagggggatgtctaggatggtaagcctggaatcaggccttcagagaggagtgggattttgccgagaatcctggggatgggaaggcgacgggacagtgcaggctgcgggcagctaggcacgtgccttccatcgggctgcatcatgcctgagtgtggtgggtgcatggcagctgttagctctgtccactgtggtagtatgactgatggtgtgtacaggagggcagtgaggggtgcggtgtggccagcatgagcgggacggggtttgtgcatggactcacttgctcagccggggtgggggcattttctctaccttttctttatctgagcagtttcgatacaagcggcgagtttatgcccagaacctcatcgatgataagcagtttgcaaagcttcacacaaaggtaaaggatcacgg

SEQ ID NO: 41756 - DNA, 900 bp, Artificial sequence
  DNA replication origin
ctggcccgcctgaggaggttgcctcccaaggcaggggtccctatggcaccctcccctatttctgaggtacactgggtgtttatggaagggccccggcctttggccagggcaccttgccttgtgtgtgtggtgtccgtagtgccggctggggaagtgaggccttgtggggtgagtgaataaactgggtgaatgagtacaaggccatcaaagtcatgtcacaggatgggtccctggggtgggggtctgcggtggggtgagctggagaggaagatgggccgaagaaggagcaggttgtctcagggtgctgaggattcagggctgctgtggggctggttcctgcctgggtggacctcgggctcttctaggccaggcaggtcggggcagcagggccggagagacggagccagggcagtgactgggcctggagtgggggacttgcttggggccccaccagggtgacctggccttggtgaggggctacttgggtacaagctgacagtcgtgactggtttggctatcagggcgcaaggaagggctttgagccgtgcatgggcccacccgagtgggaattggggccgtggtgggagtgcaggaccgtggttgacaattgtgatgtcaggtgacaggtcagactggtagggatgtggcgggggttgcctgaaggtggcctgaggcttgccggaggaaggcgggtgatgttcagatgatggaggccttggtgccaggctgactgacggccggtgttccaggcgaacctgaagaagttcatggactacgtccagctgcatagcacggacaaggtggcacgcctgttggacaaggggctggaccccaacttccatgaccctgactcaggaggtgaggagtggagtcggggaggggcatggcctttgcgcggct

SEQ ID NO: 41757 - DNA, 955 bp, Artificial sequence
  DNA replication origin
gacagccttccaggtacaccggtggtttacaggagctcaaggctgccccagaggtgtctgtctctgtgtccatgtgacttgacttctctgaaccttggttcttccctggaaggccctaagggagcacctcccccaggactgcccacaggaggtgttgggggacgagcccagcacgcgaggggtatttggtgttgatgttcccttcgtcccctcgccagggagagaggagggtcagcagggctctggggcaggggtatggggaaaatgagaagactggggtgacaggtgtgggtctgaccccccaaccccgagagaccagcaggggtgcagaagccaaactgcagagggggtggagaggggggtggtggaggggggtggtggagaggggggtggtggagggggatggtggaggggggatggtggaggggggtggtggagagggggtggtggagaggggggtggtggagaggggtgtgatcctagccgctgatgtaattcaggggaggtttccgggccctttctctggccaggttggttggcactgatgaccaggtggacgtggtctctgacttggagtttgttggggagtcgggaatattgtgggggtttgcggaccaggaacagagccagaactcctctattttcagtaggagtgagatgtgggaagagtggtcaggctgctgaggttgtgtggtcatagaaggtggaggcagcagtgggctgccagatgggtttgggcacactgggaagcagatacgcccgggcctgttggatgactgggtgcagggtcacaggaaggggaggatgagcttggcagcttgggcagctgcggggccttggctgagatgggaaacatggctgcatgttgggacagaccagtgtgcccgtttgcttgggactgctggttttagctctgaacttctgtccaggcagcccctcagtcccaggcagacag

SEQ ID NO: 41758 - DNA, 813 bp, Artificial sequence
  DNA replication origin
ttggtttgcctggaaccaaggcagttcctggaacataggatttagttttaacatctggaaagcctgggcaaactggacaagttggtcacccagctggctgttcagagtcttacctatgcccccttaccccagtaccattcagggaaacccccagctatgcgaagcggcggcgactggctggccccagtggcttggcatcccctcggcctctgcagcgctcagccagcgatatcaacctgaagggggaggcacagccagcagcttctcctggaccctcgctgagaagcctcccccaccagctgctgctccagcggctgcaagaggagaaagatcgtgaccgggatgccgaccaggagagcaacatcagtggccctttagcaggcagggccggccaaagcaagatcaggtaggagggggctggcaggccctggaggggttgggagggtggggtgccgggacctgagccaggaggagccagcaccgggaggcagagagaggcctggtggtgcctagcacctgtgtagtgatgggctagggcttcctggttggggaagggaagaaggcatctctggaggtggggacaggcacatgcacgctgatttccggttggagctgggcttgccatgaggacagtgggcagttgagggagcgtgttaggtggagagggtatgctcctacctgtgatttagaaaacacactgcattgtcaggcatggctgggaagagtcagggctggtggcctgtggtaagggggacagggatggagttgccactccagtagggcccaaaacctacaggtaagccccagccctgt

SEQ ID NO: 41759 - DNA, 1117 bp, Artificial sequence
  DNA replication origin
gctgggtgcccagtccccctctaggcctgggtcccctcgtcctggacaccggcccctgcccacgcccactgcgtgatgcccaccttccccagaccactcccagactggggtagagcctgagctctcactcctccactggggctctgctcagaagcctgcagtggctccctagtacccaggcaggccagagccacccgcttttccaagagccaggctccctcgggcttggcagtttgctacgctctagtcacacggggcacctctccttcccctcctgtgggctgtccgtcacgcagttgccaacacctgaactactctaacatcctgacccctgggccagctgttaagtgacgggctctcagcccaaactcccccgccgtgccccgtgtgatactggggggctgatgggggtcgggtcccggtccggctcaaccgacagagggcgcagcgacccgcgcggtgcagggcccagcctcgcctcccccagggggtgacttctctcctcggggcaccgaacttcctcagcccctcccgagagctgcagacccttgtccactcaccagggcagccccataaggggatcactgcccacctaactgctgcttagcccgggccctcggctgtcaacttcctgagacccaccacctctgacgcaccaggcacccaataaatgtttgcgaggaaggaaaaaacagaattctgccatccccacagagcaggtgagctggagcccctcacacagcaggtcttagttttgtgtctgctgaaaggatgaatgaacacgtacaaaaaatgaatgcagggaggagcctgtggcaacgcgtgcctccaactcaggagcagcctttctgcgggatggaaacatccggaatgcagaatgtgttctttcagccactgggccgcccagcccttagaaaatccgcgggtctataagaaagcttcaggggagaattgagatttggggcagtacagccagccttgcgagtccaacaagcccaggcaaagacagacacggagacatcgctgagaccaggctgcagagcaggggcggcagcacaggaaggggcgccttccataggccctgctgcaccctgagccctctgctgaacactcaggc

SEQ ID NO: 41760 - DNA, 939 bp, Artificial sequence
  DNA replication origin
acattctgcattccggatgtttccatcccgcagaaaggctgctcctgagttggaggcacgcgttgccacaggctcctccctgcattcattttttgtacgtgttcattcatcctttcagcagacacaaaactaagacctgctgtgtgaggggctccagctcacctgctctgtggggatggcagaattctgttttttccttcctcgcaaacatttattgggtgcctggtgcgtcagaggtggtgggtctcaggaagttgacagccgagggcccgggctaagcagcagttaggtgggcagtgatccccttatggggctgccctggtgagtggacaagggtctgcagctctcgggaggggctgaggaagttcggtgccccgaggagagaagtcaccccctgggggaggcgaggctgggccctgcaccgcgcgggtcgctgcgccctctgtcggttgagccggaccgggacccgacccccatcagccccccagtatcacacggggcacggcgggggagtttgggctgagagcccgtcacttaacagctggcccaggggtcaggatgttagagtagttcaggtgttggcaactgcgtgacggacagcccacaggaggggaaggagaggtgccccgtgtgactagagcgtagcaaactgccaagcccgagggagcctggctcttggaaaagcgggtggctctggcctgcctgggtactagggagccactgcaggcttctgagcagagccccagtggaggagtgagagctcaggctctaccccagtctgggagtggtctggggaaggtgggcatcacgcagtgggcgtgggcaggggccggtgtccaggacgaggggacccaggcctagagggggactgggcacccagcgatccgggccctggacctggaggggtggggggggcgcccctccctcccgttcaccggc

SEQ ID NO: 41761 - DNA, 990 bp, Artificial sequence
  DNA replication origin
cccccgctcccactaggctgccctgaccaccgtcccgcgtccgcgtccgaactccccctcccgggggtcggcggcgaggggagggcgggagggagggcgcgagggccgccaccaccgcccgcagagggaggagcccggccgtggaggaggcggggcgcggggcggccgcggcatggagcgagcctggcgcgcccaggagctgtattcgaattcgagctcggttccccgcgccccctgcgccccccgcaccgccgccccggggcccgaagcggaaactttacagcgccgtccccggccgcaagttcatcgccgtgaaggcgcacagcccgcagggtgaaggcgagatcccgctgcaccgcggcgaggccgtgaagggtgaggggcgcgggggggcgcgggggggcgggcccggcgcggggagggggcggcgccgcgcgcggtgctggccgggccggggcagtggctctggggtctcctctgccggggcggccctgggcccttgtgggatccctggtgtcacggtgaagggctctgcctggggaaggttcctgccgtgcgggtccctccggtgctctgtcgttccgggctccctgtgtcaccacggaggctcctctctcgccacgggcgtttctgtgtccccgggggtctctgcctgaaggaccctgtcccattacagagcttccttgcattgcggggttcccgtggcacttctgcagcttctccattggaggcccctgcgatgtgggggacccttgccgtcgtggggtgtctgtgaccgtcatgtgggtgtttgtgttatgcaggcttctgtcaccggggcttcctgtgttctggggggatcgcgtgccatgacaaacccctctcattctgggggtctcggggccatcactgggctcctagcctcagggccggctgaggtggaaacagcccagctggtgcatcacgtggcctcacccactggccacagcacgatgaccccgagctctcggc

SEQ ID NO: 41762 - DNA, 1023 bp, Artificial sequence
  DNA replication origin
cccgggctggagctgggtgcgtgtcttgggggtgcccttgcaaggaaccctcaggggtcccgggaggcccccagatccatgcatgtgcttctgtcctggagagctggtgggccaagcaaacctctcctgagtgatggtcactgggggccatcggtggtgtgtctggatcaagggtgcatgcaccctccctctgcatgtgaagggctcaggcctggggttactgtgtccccatctctgtgtccccacctctgagagtttcccagcgactccacccctgtacggcctggacccctgccctgtgctgagctcagcagaggcccagggaggcaggagcttcgccactgaccttttcctgggccggtgccctttcctccttccttggccttgttctgccttgctctgactggtggcttagagtgtggaagggacttggccccctgttctcagcccgcggagggtggatagggcagggtccagatgggaaatggtttcagagatttgggccctggttcagacagtatgggagaggggaggggaaggagaggtagggggatccacacctgtggcgggagcgggtcttgagctcccccacgtggtggtgaggaaggttctggtttgaggactgtgtggagtgaggggcatttggacctacgtctgaagctgacggggagggaggggggtttaggctggagtcagaattggagagcagcaaatgttttttaggtgtttgtcatgtgctgggccctgtgctgggagccgggatcacggaggctcagctggaagccttgtgggagcagtggctgtgacgggggccgtgtgagcgtgggagctccctgggctggcctgaaggagtcagagagggcctcaaaacagaggcattgtctgagctgagtcctctaggtggtcagcggctggggctgaggggacagccgtgtgtgcagggtccgtgtggcgctctacagctgtgtgtcagcacggcctgctctgagtgcctggcacagttttagcacttctacacgtata

SEQ ID NO: 41763 - DNA, 848 bp, Artificial sequence
  DNA replication origin
gctcccccacgtggtggtgaggaaggttctggtttgaggactgtgtggagtgaggggcatttggacctacgtctgaagctgacggggagggaggggggtttaggctggagtcagaattggagagcagcaaatgttttttaggtgtttgtcatgtgctgggccctgtgctgggagccgggatcacggaggctcagctggaagccttgtgggagcagtggctgtgacgggggccgtgtgagcgtgggagctccctgggctggcctgaaggagtcagagagggcctcaaaacagaggcattgtctgagctgagtcctctaggtggtcagcggctggggctgaggggacagccgtgtgtgcagggtccgtgtggcgctctacagctgtgtgtcagcacggcctgctctgagtgcctggcacagttttagcacttctacacgtataagtcgttgactcatcccagcagtcccaagaggtggggccacttgttgttattccatttctagggggtcacatggccctgaggggcaaagtcttgtttgcaacacaggcagcaagttctatgtgagtgaaacgcctgcatggggtgaggggcgaggctggtgtggggaccacggggtggtcaggtggcatggagtcaagtgacagtgtggcatcatggcggagggaacccagccgcagtgtctgattgtgcaggttgtgtaggatcaaagcccgggctgggcagagcagagcaatggagaggagggttcaggtctgggctccagccagcagccatggtgtgtgtgacctggggagtgagtgtcagaggtcccggggtagacgggagtatttcatgagtgggcagcggg

SEQ ID NO: 41764 - DNA, 1084 bp, Artificial sequence
  DNA replication origin
aatctgttctgggagacaggataaacagaggataaagacatagcatgcgaatgctggcaagtgctcaggagaccagcgagcagatcagggagggcagagaaaggcacgcaaaggcctcacccccacgggagggctgagcagaggctgaggatggggagcagcctgtggatatgtgggcaaagggcttcccaggagcgggggtggtcaggggaagcccacggcaggcatcagcctgcagcatttgagagagttcagagcctgtgcagctggagcagagggagctagagagagtggcaggaaatgagatcagaaagataacctgcagctttcgatgacctgtttcccccactaattgtgagctccttgagggtaagggccacatgttctttatctctgtgatcctagcacccagcacagcacctggcacgtcacaggcattctgcatgctgactaggagagtaaatggtggacaggtgcatctgagatagacggacagaagggatgctgactaggagagtaaatggtggacaggtgcatctgagatagacggacagaagggtggattgaaaggcactggaccagtggatggagggagggaaggagagggccatgggtagataggtcaaagagcagacagatacatgggtagatggatggatggactgggtgtgtagacaggtaggtggagaggtggatggatggaggaagggaggggtggtggattgggttggctggtgagtcaacggttaagaagatgatggtgggatgggtgggtgagtcaaaggatagatggctgtaaacataggtggagcagtggccggacggaaagaggaaagagtgcctatttctatcagaaggcacagatatcaaaaaagtatcgggctggattccaggtcccagctactacgttgtgtgactctcagtaagtcaacagccccctctaagcccgcccatatagaatagagaaatccaacttggaggatccccttggttctgatgacctatatcttatcctggcattccccaaccacacctgcacccctcatcccgctgaacctaaggccagctcaggccaagcctcatc

SEQ ID NO: 41765 - DNA, 922 bp, Artificial sequence
  DNA replication origin
gggggggcgggcggtcagggcctcaggggccctgggaacccccagaatcagggcctcaggagacgatcaagggtgctggcgggggtcacggtgccggctggctctggcctgagcacccaccctgcaggcttcgagggctaagcaagggggcaccagagccatggggtgggggctgggaggggtctccttgcgggcggggctcctgctgctccagggctccccccaggcccgggtggccactgccccttgtggggccagggtgtggtcagccaagccacgggcctgggctgggcctggccggcaaagcctcctgggcccaggctgtgccgcgtcgtcgcggggagaagacgcttttcctcttccctcaggtgccgcctcccccttccctccgacaataagcagcgcggcagcgtcaacctcacagttgctatggcaaccccggcctccaggcagctgctggcggtgtagggaaggagggctctgccacgccaggggctgggggaacgccgggaaggagggggcagggatctgaggaggggcagcctgaggtcaggggtcaggggtcaaaggcctcaggccaggggacaggactggcagtctagcaccagggatcgggaggggtcccagcccacacgtgtgggtggttcattgaggttcaggaatctgatgtcagcagttgggggtcagggatgggaagaggaatgtgggcctgaagtcaaaggtctaaggtcaggggaaagtttgggcacagaggcctgaagcgtgacccctcacctctgcgccgagccccgtcctcttctggcttccttgtcacagacacaaccttcatgacgaggcggttgccaccctggcgaatcagagccaccacctgcttgtgtccgaccttcaccacgttcaccccgttcacctgggatagacaggc

SEQ ID NO: 41766 - DNA, 896 bp, Artificial sequence
  DNA replication origin
cgcccgcaaggagacccctcccagcccccaccccatggctctggtgcccccttgcttagccctcgaagcctgcagggtgggtgctcaggccagagccagccggcaccgtgacccccgccagcacccttgatcgtctcctgaggccctgattctgggggttcccagggcccctgaggccctgaccgcccgcccccccccccccgcactccctgagctccttgagccatgaagaagtttgcgtccagccgtaacctgaacaagatcctggcacagtgcgactcatcctcgcgggagtacgaggagatccaggcggtggagcgcaagtggcacctgcacctggccacgccgcgccgcctgctgctggacaggaggtccaaggcctccctcttctttgcagccccaccgccccccaagagggcccccagcaccacactgaccctgcgctccaagtccatgacagctgagctcgaggaacttggtgagtggcgggggtggcggtggaggtggacgcaggtggacggtccatgatgggcagacagggccgggagacacaggtggtacgggagggcaggcggtccagccagagggtaggaaggacaggtgggtacaagagcaggtcagaggtgaatgggtgggtgctggcgcgatggggaaatttggtgcttgtggggtgaggagagggtggcatgtggaaggggtgagatgtgagaggctggggatggacagtggggtgtccaggacagatgacggggagcagggcctggcccaccagtatgtttgcatgtgtgtgcatgtgtgtgcgtgtgctgcctctggttttccacgtctccactttgactttactcctgcatttcatccaagtgaggagagagcggtagtgaggtgaccagggtctg

SEQ ID NO: 41767 - DNA, 667 bp, Artificial sequence
  DNA replication origin
aggctgggggcagatttgggaggtcatggtttttgggggaggtggtggtgagagggatggggtggggaaatgagtgtggataatggggcccgggtgccgagcctgcctcttactccctttactctgtttcttgattccaagcctccattcggagaagaaaagggggtgagtcatctgcctgtgtccccagggccttggctttgcctgacccctgtctgggggagtgctggtgtgtgaggaggttccagcgcaagtcagggtggcctggaagcctgggctgcaccctcctgttggccttctccctgggcatctggtaggggcatgagagaagggcctgcaaggatggatggggagttcccaggggtgtgaccctctgagactgtgatggccttgggggctcaggtgagcctggggcctgtgagctgtgcagatagcctgatggaggcagcccgtggggaggagctgggagagccccgtggaggccactgcatgcaccatggcccggacagcaggagggaaagggctccgagggtcccagagggggagctctagggagcagggagactgggccgtgttggcgtgcacgttgcttctttctgctggtcctctcggggcctgtgcttgggttgtgggacctactcccgtgctggttggttgtagggccaag

SEQ ID NO: 41768 - DNA, 768 bp, Artificial sequence
  DNA replication origin
tttggggaggagcgtttcacggaagaaggagcaaagaaaccaaatgccagctgaggtcagcaggagtgctggccatgcatccatggggaggaaggccctggaggccgccggtgaccctggtgggagcagtttcaatttgggtatggagagaggaagtctgccgcaggctgaggagccggtgggggacgggagacaagatggacagtagaggtgactttttggggaaaactggctgtgaaggggggagacagcaatacatggagaagtaggggagaggcaagttcagggggtttgagggtcagaaacttcacatgcacttgggctgcaagggagcaaccgcgatggaggcagctgagctggggacagggatgaggctgcccatgggaaggatgagaggtgatggggaggtgggggtgcccagtggacagggagtggcagctggggacagggatgaggctgcccatgggagggatgagaggtgatggggaggtgggggtgcccagtggacagggagtggcagctggggacagggatgagactgcccatgggagggatgaggcgatggggggcggtgcccactggacagggagtgtcggctgccgggggaaagctctgggttggggaaggcctaatccccacatgtccatcaacgtatgagatcctttagctggggccaggaagagacaggactgagagggaaactggaaaccccagttatgggcagagagaggcagtgtccttcaaacccaagtccaccctgccggcccc

SEQ ID NO: 41769 - DNA, 1639 bp, Artificial sequence
  DNA replication origin
gcttctgccgctcgggatacggcagcgggccgagggccgcgcccggctcgtacaggccggcagcgcccgcgcccaggcgcgcctccaggccgggcttgaagctggagcgcaccgtgtcgtaggcgcggcccggcgggggcggcggcgagaaggccgggggcggccccgagtcgaagtagtagggcgcgggcgggggaggcggcgcggtctgcggcgggggcgggatgccgcgaccctcgcgcaccgggtcttgcatcgaggtgctccgcgggaagcgcccttccagcagggacgccagcttctcgtcctcccctgcggacggaagggccggtgagaccagccagggcgctgggcggggggtggtgctgccttcggagaggttcctggggaccccggcaaccccctcccacagaggccagccttgacccgactccaccccggggaagccaccgtccggacacaatggacgcccgcggcagaacccggcgcgaggagctagaatgctcgggaagatggggttgggacccgtggtgggcggggaatggagggcaggggagaaacagggagcccagagcccgggctccgagcaagaccctggtctgggctggtccctggatgcccaagctctgtgccccaggcccagggctgcacggggagggctcttgtgaagaggacaggagagaggtgtgcgttcagttacaggatggaggagggccccaccggggacccctgagaaaggacacaaactctgacggcctgggttggggccaagacctgcccaaacccagggtcatcaagcaggccctgagaagatatcccagaaaggcagggacagccccgcaagacatggggacagaactgctgaggggcttggaggggccagtacagggctccccaccccagaatcaacaaggccgacgcagaagtaccagccctggaggcaaccagaggtgagaggaagatagtcggaaatgagcaggagtgacacactggcagggtgaggggcagcagggctgtggccactggagccaggcctccagcagagaaagacctaatgcccacccaggtaaggaggtgccctgtggaggaagccttgagaggctcctcccagagacccgcatgggtgagtgggtgaagggaagaacggacggatcaatcaaaatggaactgcaggctgagcacccagcatgtttcattttaacccctactggcagcgtgaccccaggccaggccctgagcccctttgagcttcagtaacccccctctgcatgccttgctcagacatcattgttagggtcctgtgcaggggctggagtgctcagggccctcatgctcctgctgtccagcagaacctgacacaacctcctgaacacccctgtggacatcatgatgcggacacacgtgctgcaggtgtgttcagtgaggctgcagggggcggacggccccacacccacacacccaggtctcgtggtgctcctgttcccagcctcactctgagattggtcaacatttttatgaactcgctaaaatacagactgcctgttcctgatcgcatcctcctccagccaccgcagtgctaatgaggcctccagtactacactgcttcttgctgggcataatatctctttgtagccaaggt

SEQ ID NO: 41770 - DNA, 1343 bp, Artificial sequence
  DNA replication origin
agaggcctcatgagcttcccaagctcctacctgtcttttgaatcctgaactaaagaaggtagaatggccaggcctttgtaagacctgcaaagtccttaagttctgaacacgttgctacgctgtgaactctgtcctccaaggctgacagtacggggcccactaggttggtcttccaggcagcaagaagcaggagtcaagaggtggcatccacataccacccccccagacccaaagaggagaggggagacctaggggcacagaaggcaaaagcagctttaaaaaggcagacaagggggcgggtgggggatgaccagctctgccgccagcatccatgcagcccacgggcccgaagggctcctctttggaaggagccttgggagtcgggtcctcaaggaaagacctatgggatcagcccagggctctggcagctgtgacagcctcagcagcaagccaggcccctgctcagatccttctgggcaggggcaggacagacggggaagtggtggggagaaggcaagagggcagatggagtgcagggagatggcgtgacttccatctatcttcttactgcactttagaaatgacacacgggaatccatgtttaagggattctaaggtggtgccaagagacaaatgtttctgggatgggaaatagggagttagtggcagatcccccaaaagaaaaggagtcagtgtgctccaagccgccagaggaagcaaggcaggaggcagctgtaaggcagagggtatcagccacactgggcagccacatggccacagagaggatgggaggagggaggcgtacctccaaagtaaaacacaaaacaacccttaatggtaaagacagcctgtgtcgggagggagagagagaactcacaggaatccctggggccaagagcctccaggagggccatggaggcgcctcatgcccaacctgagtctctgaggggagcccagctcccacttctggcaccaacagggacacagtgagcagcaaccctgacgtgtcagacgcccagaagaacctcctctctcgggcaggccaagcaagaccggattcagaggtggatggcgggggcgggttgggggttgccacagaaggaatggaacagaacaaggaggaacaggagagccagagaacagacaagaggaatgacagacggggccacggacaaggcacggatccctccccgcaccgccctgctcaccgagctgctgcgatgggcgacttcttggcagggtccagcaggctgcccaggccaccaactggttcctcccccagggaacgcgtgtccttgttcagctgctgcaggcgggagctgagctcactgatcacagttggt

SEQ ID NO: 41771 - DNA, 2047 bp, Artificial sequence
  DNA replication origin
ggcagggccagggtaggtgtccatcctgtgatacaggtccccaggccagggccactttgttggggctggtgggtggaggccaggtgcatattcctggtcctgcccctctctgggtgtccacagtcaggtccctctgagtgattctctcggagtctcctctggcaagcccctccagcagtcaccaccacctgggcacccacccccaggggaccccccgacccaacaccacctggcacctccccttgggaatccccccaaccttggctgcctccccactttggcccactgtgcaggtggatccatggaggccaggtccaatgggagcaaagacagcttattctggtggttggtgcctgtgctgaggcccacctcaggtgttcttgaagcccctttctgtttgggggcacagtgtggcctcttcaggaagttctgctctggatctgagcagctgggaggaggcagtagggacagaggctgaggagaggacagaaatgaggtcccatgggagagacagagctcagatctccacagagggctgacctctcacaggtgggagacaaaagacgaaacctgctttaaggggagccccatgcgtgtgtggggcaggcactggtgatgctgtgtggtgaggacagcctttaaggggagccccatgcctgtatggggcagggactggtgatgctgtgtggtgaggacagcacagaggttggggtggggggactcagcctgggcaggggcagggagagggggtgggagggccactggagaggggcccggccaaagaggatgtcaggggctcagcacccccaggcggccaggcacctgccgagcactgcagccacgcttgtggttcacctgcacttggagactctcgcacaggcgcctctcctccaccagcagctccagctttgtccctcccacagcagctgggccctctgcacctgagttcctccctccacacctggctgcccattgtgtggttgcagctgtgggtcgcgtgggcctggccggctaactctctctctcattgctctctcctgcccatctgcatgtggctgctctgtcgagctgcgccgtggtcccgagcgccggctgtgtaagtgagcatgcccatcccatgcctcttgccgtccacacgctgtgcctgtctgcctgggtctctgctctgcgtggctgtgagaggctctggtgccactgacagccccttgaggcttcccctgacacagtggggatagggatgggaatgggaggacatgggagtgggttttctctggagctatcaccccaggtaggcctcccaccacggcagagccaaggaggggctagagctctagggtcctgtcaggtgaggctgggaagtgagctgccatcggttcttgtgtgtgtgcgtgcgtgcatgtgtgcgtgttgcgtgtctgcgtgtgtgtgctgctgccaccgcagcatgtctgtaacgcgtgtgggcaccgttgctgctgttgtgtgccgtctgtgcaggaggctgcctttgtgttgagggtgtgcacggcctcacacctgccctgcatgtgctgctgctccatacgggtacgagccctgcctagtgtctgtctcctgtgtcacggacctgttcaacctcgtgctgctgccagcctttatcgcgactcagctgtccctggaacctgcccaggatcccctgggtcttctcatgagagcagagctgtgtggggggtgggcggtgaagggtactgcccaagtctcagcgtcccgggtatctgtggatcccgccatgcccagagccggtgtcggaggctggcaggagggagaagcccgccctttgccatgagaggctgtcttttctttggttgggctgcacttggagcctggatggagtggagggggccaccagtcattcctcatattccagccagtcgctggctctggtcccaggggccaaagaaaagggccagggtaaccgtaggatcccaccctttatttcttcctctggccgggctactcccgccagccgcagccccagcccgtttcctcctggaccctgcccgctccc

SEQ ID NO: 41772 - DNA, 772 bp, Artificial sequence
  DNA replication origin
ccccacgcatgcacacggtgcacgcctccacggccccgcgctagtccagagcggcccctggtggccactcagtaatcaggcacacacacggctcccacgtgctcagacgcacccagtttcacccacacacataaagggcaggacaggagactttggggtccaaggcagggaggcttctctgctgtagttgcccaagagcatggggaccaagctagccccctccttggggagagaccctgtgaggaagatggctgcggtggagcggcagggccctgccctcatcccccccggccgatggtctcccaggccggctggtcccgcgggtgcacagcaggacccgcggcctgccgcccctcccaccacgagcagcacctgaagggtcggtggggcacactagagctcagcgaggcgaggggccgagctggggccccagggcgggccactagggccctggccaaccccagaccagctggagcgtcccctgccccgttgtggggtggcagtggcagtgaggggccggagatggaagactgggcagctgcagtgggaccagtggaagtagaagggaggggagaggaaactattacggacagagatatttgttccttttctcgttccaaatatagagtggattaaaatatgcaaaacaggggggctccttggcccccatcgagaatcccaatgtctcccccctccccccgagtcaccaaggcgggtcctgacctcgcatgctggactaggttccccctctgggagaatggccaccaggagc

SEQ ID NO: 41773 - DNA, 1054 bp, Artificial sequence
  DNA replication origin
tctgcagcccctggcctcagtgctgggtcctgtgccctctactttctcacggctccctcttgattgcctttgcccacttgccttactgtttgcccttcaagacatagctcaccacctccttccactcagcgaggggtctctgtccctcctgttggctggccacccccaccaggtgccacccaggacgtgtcttttttgccacattatcggctgctcacatgactgcctgtgcgctcctgaaggacaatgtcttgtctctggtgctcagggtgggagcaaaaaggaaacctcacatccaactgggcagacaacccaaggtgagaagcaccaacttgctctaatttgagatagcaccagggccgtgcagacgcagagcctaacatctaactgggactccagggagggcgggtcagagaaaacgtcctggaagacaggatccggagatcagcctccaagctatgtatgcttgatgcaggcaaacgatgggtgatccaggcagaaggaagagggcatgtgtgagacagagccctgaagcgtcatagcggctcagggattgcaggaggtggggggagactggcgagcagcatgtgtgcatggggagggagcaggggatgctggcagggccacggcagcactggctgggccggactggctcacggggtccatccatcagctgcatttacagacaggctggtgtttgtcagcagagggcagaaatggaaacagaaaaccagtgaatcagcagggaaggagtgagggctaaatctggtctgcagccgtggggtaggacagttgcgagagatgcgagcgggttccaagacaggagcagcagaatttaaaagcaaccggacgctggcgggagcaagtcttaaaccctaggcttaaaacctggcaggggtcatggaggacaagtggcctccagcttaggaggtgctactcagtgggttggtgaacagagaaaagctttcggtgcagaaggcatgggctgagttccagcagactcggagaagatgctggaagatgccaggtgcctaggcatggaggtcaaagatag

SEQ ID NO: 41774 - DNA, 1324 bp, Artificial sequence
  DNA replication origin
cagagccccagggagacgctgcacagcatccccggggaacgcccctctctgagaagagccgttctgaagacctccctcagtgcatccctacacgtactttttgccgacgaagcagtgagcagcagtgagcacccatcgtgaattcagcaagctgcctccacatgtgtggtacctgtggctgttgtacgtgaagatctggaggctgaccatccagggccaggccccatgctgtgcagccttcccgccgacgatgcggacaccaccctgtgggttttgcctgaaccgtaacccacaggggccactggggagagaccagagcacagttcaaacctggcatgagcacagcctgtccttgtaactccacaactgaggggaggcagggacatggggttgggaaaagtggggaagagcttccgggttctgggaaagcaggggcagcctgcgctatgtaggaagccgcaggctctaggaaatggttctggggccacgacttctcaggtcttgtgggtgcagtcacagatggagaaagaggaggccataggaagccaggacaggctgcatgggccctgagggatggcccgtccctgggcagaacaggagggtagaggtggggatgcggggcctggggacagaggggtgtaatggcctgaggtccttataaccaatcttgggtgggagactcagggaagtcaggtgatgaagggggtcgttgacagtgatgggaggagggatagcagccaggggcagatactgtggcccacaggtgtagggggcacactgagagcagtggaggtctagaggtggaggctctgggaactgtgtcacgggtgggaggccacatatagcttgggaggtgttggtatttcggggtaccttggagtgagagagcctactggggggtaggggtgcaagcggtgtgaagcgatgatatcctggggctgttgggggcaaccacgggttgggacagctgtctgtggggggataagggctcccaaaatcaggacttcatgtcttcaagacagtggggtcagtccctgggggagtgggagaggcacaaggagcctgaggtgctgaggggtccatctctggaggaaaccacgaaagctgagggtctgggggctccaggctgctgattctgggagcagggggggtccaggttagggatgcagcctccttttccctagccctggacagagggagtcggggtggtacctgctcctcagaagatccttcccccaccaaggtgccccgacacttactcacacgtggcgttatctttagcaaccacggacactgccaagaccagcagaatggcagttggtag

SEQ ID NO: 41775 - DNA, 1762 bp, Artificial sequence
  DNA replication origin
acaagcaattccgccttattgtagggtgaaggagagagggtagattttataggggaaatttgggttgggaggggggataggaagaagtccagaaagcatctcttgatgtatatgcatgtatacatacagatatgtgtgtgtgtatatctatatatatatgtttatttatttatttcatctttcctttttctcaggagtgaagggctcactgggtctgttgagaaccaggtcagatcaggaggtcgaggtcagttctgggagctctgtggtctccatgtcataatggttctttccgtcggaataggtcttccccttcaagacctctatgagctgctgtaggcgcttggcaaaagaaagtccttggggaagttttgtggtagatgagggtgtaggtgggggtgggggtgggggtgggggtaaaggtgaggctggaggtgggggtgggggcgggggtgaaggtgggggtcggggctgggctgccggtggtcggggtggaagtggtcgagggggcggttggaaataccaaggaaggtgagcagagatagggtgggagaaggggggtcgaatcgggggcggtcgagtggtgggaggtggaggggtggccgattgaatcatacgcaaagcgttagaaccaatcttggaggcgatccagttcagatagggccaggtggccgtgtagattccggggcgcttggcacgggcacagcctaccccccagcttgtgattcccacgaccacataggcgctttccttgctgtctttgcacatgagaggcccgccgctgtctccctgtccagaaggacacagaggtcactatctgcctgagccactcttcccctgcccagaggggtcggaaggctctgggaggacaatttccacagtgacatggtctcctgctgctgtaaacacaagtggttgtagtaaagtttgagggggtgtcaggggcttcatttgggatgtgaggagggtgtgaattgtcagggctttccttgcagtgagatgagcaaacccacgtgtccacaggggcacatggcaggggcagccggtggctgtcaccgctcatccccactgtgagagtaggtgctagaaaagggaccggggaagcagtcactagagaagggccctgggcagagcagtggagatagtggagcttggggatccaaaaggaggatgttctcaggggccgggagagtcctggagggacccaggggcccagaagccagaaggaaggttacctggcaggtgtcgatcttgcctacaggataccccgcgcacacattggttggctgaacgcgcccattgtaccactgggtcgagttacacaagtccaggtcgatgagatccacacgtgcctccatcagtatagatgatggcctgggggctatagtcagaccactcggtggtcagtgatcacgggagacacggacaaaagccctgcctccttgccccaccgaaccccatcctctgtgatgctccagttaaacctcagacccatccagtcgatgccccgacccctccttatacaccagaaagagcagactagaggtggtgggaggaggtggggaaatgttatccaaatcaaggccagaggagagaggaagagaggaaggaagggtggaggcccgtggacaggtggatggggggtgggtgtgcgtattaacgatggattatggaggttagttgcagtattaccaataacacctagtgtgcaccaagcactccctgagtcacatggtcccgttattcccattttggatcagaa

SEQ ID NO: 41776 - DNA, 1089 bp, Artificial sequence
  DNA replication origin
ccacccctgacgtgctcaccgctccactccctctaggcgggcggcacccgctgaagcctcggtaccacacccacagccaggagccccagtcccgcactcggccgcatgcgcactccctgcggccctcccgccaggcgccgcgctgggcagccagcgccccggcggggtccttcaggccttcggccgggcagcctccctcggggtccttgtgcggttgcgtagcagctgcgaggacgcgggccgagccggaagtggagtgcgctgcggcgcgagctgggccggcgggcgtggttcgagagcgcgcagagtccagactggcggcagggcccgaggggccgacccgcagcgtccctggtctctccagccctcactcggaaccgcacgtgagggcaaatccgccccggtggctggcttagcacgcggggacagcccctccgaggcctccctagcggtgtgggcgagagggcgtccgggtcgggggaagcacggaaaggtggcttcgcgaggctgttgtggggggcgggacgggcagcctggcgatgcctggacatggttggtggccaaaaacatttatcgaaagatagcttacccacttagatggcaaggacacggacaagcaagtcttcgcccgtaagcggtggctcacgcctatagtccagggatgccgaggagggaggatcgcttgagtccaggagttggaggctgcagtgagccgtgatcgcgccaccgcactccagcctgggcgacagagtgagaccctatctctaaacaaaagaaagaacgtcttcaagcatggagccatgaagctggatttggctttctgtcgctctctctacagggtacaggtgaaagggggcagacccctcatcatgctttccaggcatctgccacttcccaggaattgtctccctggataaacaaggcgaagtccctggctgtgcagaagcagtagctgtgtggtggcacagtcaggaaaactcgggggccctgttggtattttctacccctgacccgtgtgcatacttctgtcgtagctctcaccacagtagactctgctatcattgtgtcttccatcctctgaaccctgtg

SEQ ID NO: 41777 - DNA, 1511 bp, Artificial sequence
  DNA replication origin
atctctagtgctggagtggatgggcacttgtcaattgtggttaggagggagaagaggtacctacgcagaaacaccctagaacttctcttaaggtgccccaatcggatgggcgcggtggctcacgcctgtaatcccagcactttgggaggccgaggcgggtggatcatgaggtcaggagatcgagaccatcctggctaacaaggtgaaaccccgtctctactaaaaatacaaaaaattagccgggcacggtggcgggcgcctgtagtcccagctcttcgggaggctgaggcaggagaatggcgtgaacccgggaagtggagcttgcattgagccgagattgcgccactgcagtccgcagtccggcctgggcgacagagcgagactccgtctcaaaaaaaaaaaaaaaaaaaagatgccccaatcatcattcactctgcaataaaaatgtcagaatattgctagctacatgctgataagaaggacaaaggggacatttttaagagaaacctggcaccataagtacagattagggcagagaaagacattcaaaagaggcagctgcagtagatacaaacgtgaccgctgtcagcctgcctggtatggcgggaaggaggctggtgccagagtggattcggattgatcaccacacatgtacctcaatcaacagtgaggaggtcccacaaggctaagtggggcaagtcggggacctatggcagtagcaggaaaacgaaagaaaacaggcggagacttgagacagaggcaggaatgtgaagaagtccaaaataaaaatccctgcacaggactcttaggctgttttcatgcactatcagcctactcctccctatttttgtactataagctctttactctgtatttcttttcaatgaagttatcttccatctttgtactgcctcttggtgaaaagctgtcttccaagttaataactgggacatcagctctccgcagtaatagctccttttcagttttaatttacagaactgatggggattaataactggcgctctgactttaagtggtgcaggaggtggccagtaggggacggcagccgtcacaccgggagcaagagggccctgcgtagtccccatgtgcctgcatgtggcgtgcagccacgacaatgccagcaagagggcccggcactgtgcccagctgccagcaggcgggtgtgctgccactacaatgtgaggaagagggctctgcaatgtccctagctgccagcaggcggcgtgccaccactatactgcgagcaagagagccctgccgtgccccggcgctagcagggggcggtggacaccactgtaaacaagagggccctgcagttgtcctagtcgccagtagggggcgcaatggtagagcaccgtgggcaagctggtcctgtagtgcccggctgcacgcagggggcgcccaaaacgggcttttcagattactcaggttccactcgtctctgcgccgccggggacgtgtgtctctgcgccgccggggacgtgtgtctc

SEQ ID NO: 41778 - DNA, 2501 bp, Artificial sequence
  DNA replication origin
gcacactcttgctctcccctcccctgccatgtgcagccctccactgggctgtgatgctctaggcctccccagccaccagaacttgccctcccctccccggccatgagtggacacggactcccgccctcccgccatgtgccgccctccactgggctgggatgctctgggccatgtgctgcctggggtccaggggccgttagtctccgccgctcctcggcctcgtgggcccgggcgctgggtggggccgcgggtgggcgtcaggggccaggctgggcgccgaggtctgcaaaggggcggagaagacgggcttgggctccgcggagagactgccagggggcggcggtgcacctcccacccgggtcacctcggtgccacgcatgcctgcctcagtgcaggcggacccacggccctccacgccctccctcgctcgcgtgctgcccggctggccgctgttcgcatcctctcgctaactccgtggggtcccgcccattcgggcgactgccccggctgcagcccacccgctaatctcggctatcttccctcactcagttcttcgcctccaccagcttcggctcttttcgtcacccctctttactcctcgttcctctccgtcactttccgtcatctccgattaggctcggccggctgcatctcaccatttcgctttcctctttgtcgccctctgataaatttcgtgactcttcgtcactgtccgtcagtccccgtcactttccgtcaattctcgccactttccgtcactctccgccgcccttcagctccgctcggctcttctccgtcagacatcgtctactttcgtcactctccgtcaccctccgtcactctccgtctgctccctaccccgcactccgggtggagaaagcctcagggggtcccgacaggaggagcggcagtctgggggtggcgctgagggaaggagcagtcgcgtggtccggaggacaggagcagggagtctgggggtggtttcgtggggaggagcagggggtctgggggtggttcccaggggaggagcgggggtctgggggtggtcctgaggggagaagaggggggttactgggcgtggtttcgtggggaggagcagggggtctgggcgtggtcccgagggcaggagcgggggtctgggggtggtcccgaggggaagcgtgggggtctggggatggcgccgagggaaggagctgtctggtgtggtccggaggacaggaacagtggatctgggggtggtcctgaggggaggagcgggggtctgggggtggtcccgaggggaagcgtgggggtctgtgggtggtccttaggggaggagcgggggtctgggggtggtcctgtggggaggagcagggggttctgggggcggtcctgatgggaggagcgggggtctggggatgatcctgaggggaggagctggggtctggggatggcgccgagggaaggagctgtccggtgtggtccggaggacaggaacagtggatctgggggcggtcccgtggggaggagcagggggtctgggggtggttttcagggatggagcatggggcctccctgtggtccagagggtggagcagggagtctgggggtggtacttatgggcgggacagcactatttctctttttggtccggttcccatctgctgatctgggggtccttgtgatcctgacaggtggggcagaatgggagggtcaaggtgaggggaagggatattgacaggaggtcagaacttcaagatcctcttgaatttcaagaactacttccaagcctggacaatatcgagaggcctcatctctacaaaataaaaattaagaaattcgctgggtgcgatggcacactcctgtagtcccacctactctggaggctgaggagggaagataacttgagcctgggagtccgaggctgcagtcagctgtgatcatgccactgcactccagcctgggtgacagagcaagaccctgaaaaaaaaaagggagggagggaaggagggagggagggaggaaggaagggaagggagggaggaaggaaggaatgaaggaagaaaatggcttaagctcagagagctgtatgtggcccccagctcccacccccaccagagggcctgcaaacccacggaggggcaggttgtcttgagctggaaccacaggggcggggggacctcaactgtaggggttagggttagggttaggctttgaggtttcgggttacagaatatagatgggtttggtcctgggaaaattccaggttgagttttgtagttgggggttggtctcaggtgagatacggcaggtttacttgggcctgaagagccgagctccccgaaaacgaaattcctggcccttttaagggtttacgactctaaggggttcacttgaaagggtcgtgatagatcgagcaagcatcggaacgtgactgggggctacacgcatcagataacagaacagaaagttttgcagggcttcctcatacagtgtctggaatttacagataacacaagtag

SEQ ID NO: 41779 - DNA, 2352 bp, Artificial sequence
  DNA replication origin
cgcctccaccagcttcggctcttttcgtcacccctctttactccccgttcctctccgtcactttccgtcatctccgaataggctcggccggctgcatctcaccatttcgctttcctctttgtcgccctctgataaatttcgtgactcttcgtcactgtccgtcagtccccgtcactttccgtcaattctcgccactttccgtcgctctccgccgcccttcagctccgctcggctcttctccgtcagacatcgtctactttcgtcactctccgtcacccttcgtcactctccgtctgctccctaccccgcactccgggtggagaaagcctcagggacttttcctgcccttagcccttttccgtccctctccgatcctgctgtctgtcagtccctggttatttctggtctgctcgtgactctgtcctcctcccttcactcctgggagggtggcctggtccctcctgagaggcctctccccactacccggcctgaatgatggtggtgagcgggaggtctcgaggtgatcccgagggaaggagcgggggtctgagggtggtcccgagagggacccgaggggtggagcggggggagggtctggagatggccccgaggaggtcccgataggaggagcggcagtctgggggtggtgccgagggaagaagccgtctggtgtggtctggaaaatgggagcagggggtctggggtggtcccgaggggaggagcgggggtctggggtggtcccgaggggaggagcgggggtctgaggtggtcccgaggggaggagcggggggtctgggggtggtcccgtgggtaggagggggggtctggggatggtcctaagaggaggagcagggggtctgggggtggtcccgaggggaggagcgggggtctggggtggtcccgaggggaggagcgggggtctggggtggtcccgaggggaggagcgggggttctgggggtggtcccgaggggaggagcgggggtctggggtggtcccgaggggaggagcgggggtctggggtggtcccgaggggaggagcgggggtctggggtggtcccgaggggaggagctgggggttctgggtgtggtcccgtgggtaggagggggggtctggggatggtcctaagaggaggagcagggggtctgggggtggtcccgaggggaggagcgggggtctggggtggtcccgaggggaggagcgggggtctggggtggtcccgaggggaggagcgggggtctggggtggtcccgaggggaggagctgggggttctgggtgtggtcccgtgggtaggagggggggtctggggatggtcctaagaggaggagcagggggtcgggggtggtcccgaggggaggagcgggggtctggggtggtcccgaggggaggagcgggggtctggggtggtcccgaggggaggagcgggggtctggggtggtcctaagaggaggagcagggggtctgggggtggtcccgaggggaggagctgggggttctgggtgtggtcccgtgggtaggagggggggtctggggatggtcctaagaggaggagcagggggtctgggggtggtcccgaggggaggagcgggggtctggggtggtcccgaggggaggagcgggggtctggggtggtcccgaggggaggagcgggggtctggggtggtcccgaggggaggagctgggggttctgggtgtggtcccgtgggtaggagggggggtctggggatggtcctaagaggaggagcagggggtctggggtggtcccgaggggaggagcgggggtctggggtggtcccgaggggaggagcgggggtctgggggtggtcccgaggggaggagcgggggtctggggtggtcccgaggggaggagctgggggttctgggtgtggtcccgtgggtaggagggggggtctggggatggccctaagaggaggagcgggggtctgcatgtggttttcaggggtggagcatggggtctccctgtggttcggagggtggagcagggggtctggggttggtacttttgggcgggacagcgctatttctctttttggtccggttcccatctgctgatctgggggtccttgtgatcctgacaggtggggccgaatgggagggtcaaggtgaggggaaggaaggagtggcagcctggtcccaagggagcaggaaagggtttgtggttcagttctgatgtgtgacccatccataggagaatggacacctcagactctctcaatcctggccagtggcaggtcccagtagctgccttccctggctgtccttgaggctcactggaggatacttctttttcattctggcaaattttaaaaaattcttctatagatctcagtg

SEQ ID NO: 41780 - DNA, 996 bp, Artificial sequence
  DNA replication origin
caccccagacccccgctcctcccctcgggaccaccccagacccccgctcctcccctcgggaccacccccagaccccctgctcctcctcttaggaccatccccagaccccccctcctacccacgggaccacccccagaccccccgctcctcccctcgggaccacctcagacccccgctcctcccctcgggaccaccccagacccccgctcctcccctcgggaccaccccagaccccctgctcccattttccagaccacaccagacggcttcttccctcggcaccacccccagactgccgctcctcctatcgggacctcctcggggccatctccagaccctccccccgctccacccctcgggtccctctcgggaccaccctcagacccccgctccttccctcgggatcacctcgagacctcccgctcaccaccatcattcaggccgggtagtggggagaggcctctcaggagggaccaggccaccctcccaggagtgaagggaggaggacagagtcacgagcagaccagaaataaccagggactgacagacagcaggatcggagagggacggaaaagggctaagggcaggaaaagtccctgaggctttctccacccggagtgcggggtagggagcagacggagagtgacgaagggtgacggagagtgacgaaagtagacgatgtctgacggagaagagccgagcggagctgaagggcggcggagagcgacggaaagtggcgagaattgacggaaagtgacggggactgacggacagtgacgaagagtcacgaaatttatcagagggcgacaaagaggaaagcgaaatggtgagatgcagccggccgagcctattcggagatgacggaaagtgacggagaggaacggggagtaaagaggggtgacgaaaagagccgaagctggtggaggcgaagaactgagtgagggaagatagccgagattagcgggtgggctgcagccggggcagtcgcccgaatgg

SEQ ID NO: 41781 - DNA, 2238 bp, Artificial sequence
  DNA replication origin
  misc_feature (1348)..(1422): n is a, c, g, or t
ttgctctcccctcccctgccatgtgcagccctccactgggctgtgatgctctaggcctccccagccaccagaacttgccctcccctcctcggccatgagtggacacagactcccgccctcccgccatgtgccgccctccactgggctgggatgctctgggccatgtgctgcctggggtccaggggccgttagtctccgccgctcctcggcctcgtgggcccgggcgctgggtggggccgcgggtgggcgtcaggggccaggctgggcgccgaggtctgcaaaggggcggagaagacggccttgggctccgcgcagaacctgcgagtgggcggcggtgcacctcccgcccgggtcacctcggtgccacccatgcctgcctcagtgcaggcggacccacggccctccacgccctccctcgctcgcgtgctgcccggctggccgctgttcgcatcctctcgctaactccgtggggtcccgcccattcgggcgactgccccggctgcagcccacccgctaatctcggctatcttccctcactcagttcttcgcctccaccagcttcggctcttttcgtcacccctctttactcctcgttcctctccgtcactttccgtcatctccgattaggctcggccggctgcatctcaccatttcgctttcctctttgtcgccctctgataaatttcgtgactcttcgtcactgtccgtcagtccccgtcactttccgtcaattctcgccactttccgtcactctccgccgcccttcagctccgctcggctcttctccgtcagacatcgtctactttcgtcactctccgtcaccctccgtcactctccgtctgctccctaccccgcactccgggtggagaaagcctcagggacttttcctgcccttagcccttttctgtccctctccgatcctgctgtctgtcagtccctggttatttctggtctgctcgtgactctgtcctcctcccttcactcctgggagagtggcctggtccctcctgagaggcctctccccactacccggcctgaatgatggtggtgagcgggaggtctcgaggtgatcccaagggaaggagcgggggtctgggggtggcggcgagggggttccgaggggaggagcgagcgtctggggatggttccgagagggacccgaggggtgtaccgggggtagggtctggaggtggcccgaagggggtcccgacaggaggagcggcagtctgggggtggcgctgagggaaggagcagtcgcgtggtccggaggacaggagcagggagtctgggggtggtttcgtggggaggagcagggggtctgggggtggtcccgaggggaggagcgggnnnnnnnnnnnnnnnnnnnnnnnnnnnnnnnnnnnnnnnnnnnnnnnnnnnnnnnnnnnnnnnnnnnnnnnnnnnggatggcgccgagggaaggagctgtctggtgtggtccggaggacaggaacagtggatctgggggtggtcctgatgggaggagcgggggtctgggggtggtcccgaggggaagcgtgggggtctgtgggtggtccttaggggaggagcgggggtctgggggtggtcctgtggggaggagcagggggttctgggggcggtcctgatgggaggagcgggggtctgggggtgatcccgaggggaagcgtgggggtctgtgggtggtccttaggggaggagcgggggtctggggatgatcctgaggggaggagctggggtctggggatggcgccgagggaaggagctgtccggtgtggtccggaggacaggaacagtggatctgggggcggtcccgtggggaggagcagggagtctgggggtggttttcagggatggagcatggggcctccctgtggtccagagggtggagcagggagtctgggggtggtacttatgggcgggacagcactatttctctttttggtccggttcccatctgctgatctgggggtccttgtgatcctgacaggtggggcagaatgggagggtcaaggtgaggggaagggatattgacaggaggtcagaacttcaagatcctcttgaatttcaagaactacttccaagcctggacaatatcgagaggcctcatctctacaaaataaaaattaagaaattcgctgggtgcaatggcacactcctgtagtcccacctactctggaggctgaggagggaagataacttgagcctgggagtccgaggctgcagtcagctgtgatcatg

SEQ ID NO: 41782 - DNA, 3071 bp, Artificial sequence
  DNA replication origin
cgcaacggtacagtcacaaagatgacactggctccaagtgtcttcagcaaaatgggaacgtgtcagaagagtaggggggtcgctgcgggaacagggttggcccaaggcagccgccggtcccgagcagcatgcgcgatgcgggctgggcaggaccccgtggcccctccgccgccctctcagtccgcgcgagggccccactcggggctcggccgggctccgggaacgcggtctgcggtccaggggccgcgagcctccgccgctcctcggcctcgtgggcccgggcgctgggtggggccgcgggtgggcgtcaggggccaggctgggcgccgaggtctgcaaaggggcggagaagacggccttgggctccgcgcagaacctgcgagtgggcggcggtgcacctcccacccgggtcacctcggtgccacccatgcctgcctcagtgcaggcggacccacggccctccacgccctccctcgctcgcgtgctgcccggctggccgctgttcgcatcctctcgctaactccgtggggtcccgcccattcgggcgactgccccggctgcagcccacccgctaatctcggctatcttccctcactcagttcttcgcctccaccagcttcggctcttttcgtcacccctctttactccccgttcctctccgtcactttccgtcatctccgaataggctcggccggctgcatctcaccatttcgctttcctctttgtcgccctctgataaatttcgtgactcttcgtcactgtccgtcagtccccgtcactttccgtcaattctcgccactttccgtcgctctccgccgcccttcagctccgctcggctcttctccgtcagacatcgtctactttcgtcactctccgtcaccctccgtcactctccgtctgctccctaccccgcactccgggtggagaaagcctcagggacttttcctgcccttagcccttttccgtccctctccgatcctgctgtctgtcagtccctggttatttctggtctgctcgtgactctgtcctcctcccttcactcctgggagggtggcctggtccctcctgagaggcctctccccactacccggcctgaatgatggtggtgagcgggaggtctcgaggtgatcccgagggaaggagcgggggtctgagggtggtcccgagagggacccgaggggtggagcggggggagggtctggagatggccccgaggaggtcccgataggaggagcggcagtctgggggtggtgccgagggaagaagccgtctggtgtggtctggaaaatgggagcagggggtctggggtggtcccgaggggaggagcgggggtctggggtggtcccgaggggaggagcgggggtctgaggtggtcccgaggggaggagctgggggttctgggtgtggtcccgtgggtaggagggggggtctggggatggtcctaagaggaggagcagggggtctgggggtggtcccgaggggaggagcgggggtctggggtggtcccgaggggaggagcgggggtctggggtggtcccgaggggaggagcgggggtctggggtggtcccgaggggaggagctgggggttctgggtgtggtcccgtgggtaggagggggggtctggggatggtcctaagaggaggagcagggggtctgggggtggtcccgaggggaggagcgggggtctggggtggtcccgaggggaggagcgggggtctggggtggtcccgaggggaggagcgggggtctggggtggtcccgaggggaggagctgggggttctgggtgtggtcccgtgggtaggagggggggtctgggtgtggtcccgaggggaggagctgggggttctgggtgtggtcccgtgggtaggagggggggtctggggatggtcctaagaggaggagcagggggtctgggggtggtcccgaggggaggagcgggggtctggggtggtcccgaggggaggagcgggggtctggggtggtcccgaggggaggagctgggggttctgggtgtggtcccgtgggtaggagggggggtctgggtgtggtcccgaggggaggagctgggggttctgggtgtggtcccgtgggtaggagggggggtctggggatggtcctaagaggaggagcagggggtctgggggtggtcccgaggggaggagcgggggtctggggtggtcccgaggggaggagcgggggtctgaggtggtcccgaggggaggagctgggggttctgggtgtggtcccgtgggtaggagggggggtctggggatggtcctaagaggaggagcagggggtctgggggtggtcccgaggggaggagcgggggtctggggtggtcccgaggggaggagcgggggtctggggtggtcccgaggggaggagcagggggtctgggggtggtcccgaggggaggagcgggggtctggggtggtcccgaggggaggagctgggggttctgggtgtggtcccgtgggtagaagggggggtctggggatggtcctaagaggaggagcagggggtctgggggtggtcccgaggggaggagcgggggtctggggtggtcccgaggggaggagctgggggttctgggtgtggtcccgtgggtaggaggggggggtctggggatggccctaagaggaggagcgggggtctgcgtgtggttttcaggggtggagcatggggtctccctgtggttcggagggtggagcagggggtctggggttggtacttttgggcgggacagcgctatttctctttttggtccggttcccatctgctgatctgggggtccttgtgatcctgacaggtggggccgaatgggagggtcaaggtgaggggaaggaaggagtggcagcctggtcccaagggagcaggaaagggtttgtggttcagttctgatgtgtgacccatccataggagaatggacacctcagactctctcaatcctggccagtggcaggtcccagtagctgccttccctggctgtccttgaggctcactggaggatacttctttttcattctggcaaattttaaaaaattcttctatagatctcagtgagttcaa

SEQ ID NO: 41783 - DNA, 1166 bp, Artificial sequence
  DNA replication origin
ggggtagctagagagtgggggtagctagagagggggatagctagagagaggtggggtagctagagagagtggggggagctagagacagtgggggtagctagagggggtgtagctagagacagtgggggtagctagagagggggatagctagagagagtggggatagctagagaggggggggtagctagagagaggtggggtagctagagagggggatagctagagagaggtggggtagctagagagggggatagctagagagaggtggggtagctagagagggggatagctagagagaggtggggtagctagagagggggatagctagagagaggtggggtagctagagagagtgggggtagctggggggggtagctagagagaggtgggggtagctagagagaggtggggtagctagagagggggatagctagagagaggtggggtagctagagagagtgggggtagctggggggggtagctagagagaggtgggggtagctagagagaggtggggtagctagagagggggatagctagagagaggtggggtagctagagagggggatagctagagagaggtggggagtagttagagagggggatagctagagagaggcgggggtagctagagacagtggggggagctagagacagtgggggtagctagagggggggatagctagagagaggtggggtagctagagacagtggggggagctagagacagtgggggtagctggggggggtagctagagagagtgggggttgcatctgacagtgagtgtttgtggaagagagagcaactccatctggaatgctgatccacctgttcacttctgaccaaccgctgctctgggaaggtctctaagatgattttgctactttctccaatgtgacctcaatagcctggaccataaaccctgccctggggcaggtgcacgtggctgtccctgaggcaccttccctgaccgtgagggcccccctccctcccaccaacgttttcctgcatattcctccctggggtgaagccctgggtctgcagggacgaccgggatccactctcctcgcagacacggcttctgttcttacatctctgctaagtatttctttcggagaatctggattagtcagcttcttccttcagctctcagcttcctcgacct

SEQ ID NO: 41784 - DNA, 801 bp, Artificial sequence
  DNA replication origin
gtccacatcacaccaggacacggaggaagggccgggccctgtgaccacagtccacatcacaccaggacacagaggaagggccgggccctgtgaccacagtccacatcacaccaggacacagaggaagggccgggccctgtgacctctggtcctcatgactctggggcacagcgggaggaagggccgggccctgtgactgtgggaggaggcgtggaagccgcttcctgctcccgtgccacaccagggcacaggtcattttatagactctcccagggctgtggaaggaggcgggaaccaggaggctggtgtccccgcagggcctcagtgaagggaggagggaggaggaggagggaggagggggagggaggaaacagatgggccaagaggaagccacagggggctttgggcagagagggggagtctcaatggacaggaagaaggagggagaggatggagaaggagcagggggaggaaggaggagggggaggaggagcaggggggagggcggagtgtggggaggtgacggggcctgagttaggatggaaagaggcggagaggccggtggcctgtggcttgtaggccgaccagatgtccctgtgccaggacagcagccgccctcaaggtaccccacagctggggtgagggaggaaacagggagccgggacagaaatggggtgcagggagagaagccccagccgtggctatgcgggagaattccacccgggaacatgggatcccaaggcagccctttgagccgtccactgcggcccccaaacgttccgtgcactctctgaagcccac

SEQ ID NO: 41785 - DNA, 1803 bp, Artificial sequence
  DNA replication origin
caccctgccgccggggcctgcgtggggacgggtcgggacagctgggacggtggggatgttggggcactgggaatgctgggatctgagcacccctgtccttccgttgattcacccagcaaccattcaccccgtgcgttgaatgtgcgcgtcacggccactcacgcctctgggacgtgagtctcccgaggactcagcgggcgggaaggtgtaggtgtctcaccccgcctggcgggtcaccgggcgtctgggcccgtccgtcatctgcgctgtcccgccgcgaccgtgaaggccagggtggagaggacctcccccaggaagggtcagtgctccgtgggacggcctccagaccccactccgctgtgccgtccggacgagatggcagaggtggctgggagtgggggccgcccccggggctccttcctgctccactttgtcatgtgtggggaaggcgtcgggggacctggggacaggagggggcgcccctcagtggtcaggggacttgggatgtgaggggaggggtcagggggaacgtggggacagatgtggggataggaggggacacccctcagtggtcaggggacctgggatgtgaggggaggggttggggaacgtggggacaggtgtggggacaggaggggacacccctcagtggtcaggggacctgggatgtgaggggaggggtcagggcacgtggggacaggagtggacacccctcagtggtcaggggacctgggatgtgaggggagggctcaggaggacatggggacaggtgtggggacaggagtggacacccctcagtggtcaggggacctgggatgtgaggggaggggtcagggcacgtggggacaggagtggacacccctcagtggtcaggggacctgggatgtgaggggagggctcaggaggacatggggacaggtgtggggacaggagtggacacccctcagtggtcaggggacctgggatgtgaggggaggggtcagggcacgtggggacaggagtggacacccctcagtggtcaggggacctgggatgtgaggggaggggtcagggcacgtggggacaggagtggacacccctcagtggtcaggggacctgggatgtgaggggagggctcaggaggacatggggacaggtgtggggacaggagtggacacccctcagtggtcaggggacctgggatgtgaggggaggggtcagggggaacgtggggacaggtgtggggataggaggggacacccctcagtggtcaggggacctgggatgtgaggggaggggtcagggggaatgtggggacaggtgtggggataggagcggacacccctcagtggtcaggggacctgggatgtgagggagggctcaggaggacatggggacaggtgtggggacaggagtggacacccctcagtggtcaggggacttgggatgtgaggggaggggtcgggggacgtggggacaggaggggacacccctcagtggtcaggggacctgggatatgatgaaggtgacgggaggggagggactgtgacgggggaagggactgtgatgggagggagggagtatgacagtagccggaatggatggaatccgtcatgacacagaggatgtgagtgtacagctttgggtccagcctgtcctaggagacactgatttcctcgagtcttctgaaccaaaaagtatctgagacaggtctcaggacatttagaaagtgtgttttgctggccgggcacggtggctcacgcctgtcatcccagcactttgggaggccaaggcgggcagatcacctgacgtcaggagttcaag

SEQ ID NO: 41786 - DNA, 1068 bp, Artificial sequence
  DNA replication origin
tgttttgctggccgggcacggtggctcacgcctgtcatcccagcactttgggaggccaaggcgggcagatcacctgacgtcaggagttcaagaccagcctgaccaacaaggtgaaaccctgtctctactaaaaatacagaaattacctgggtgtggtggtgggcgcctgtagtcccagctacttgggaggctgagataggagaattgcttgaacctgggaagcggaggttgcagtgagccgagattgcaccactgcactccagcctgggagacagagcaagactccgtctcaaaaaaaaaaaaaaaaaagtgtgttttgctaaggttgaggacgcgcctgtgaccgagcctcaggaggtcctgacgacctgtgccctaggtggtcggaggacatcttggtattatgcattttaaggaaacgtcagacatgaatccatacgtgtaagacgaaccttggttctgtcaagcgcgtcggtgcgaagagacccccgaacaggctttgtgtgagcgataaagcggttcattcacttgggtgcaagtgggctgagtccgaagagagagtcagcgaagggagatgggggaggggtggctcaataggagttgggtaggtaatggaaaattacagcaaaaggtggttatctattgtcagcagaggagggattgcaaggtgcgtggtgcacagatcataagactcattgtccagaggacgaacggcacaaagtcgattgatcggctaaggtagggcagggagaactcacgatagtaaaatgttgtaattttagttaaccagttaaggcaggaactggctgttttacttctctgtggtttttccttggctgctccagacttcttggctcctgcaggccacctggacgtatatgtgcaagtcacaggggtgataatggctgagcttcggctcagaggcctgacaggttcaatcggtgaaggtgggactgctccactggtggtgaggcgggcttccaggtcataaggtagattttaaaattttctgactggcaattggttgaaagagttattattaggccgggcacggtggctcacgcctgt

SEQ ID NO: 41787 - DNA, 1068 bp, Artificial sequence
  DNA replication origin
gccgtgcaggcggaggggaagacgtgcagggggaggggaggccgtgcagggggaggggaggccgtgcagggggaggggaggccgtgcagggggaggggaggccgtgcagggggaagggaggccgtgcagggggaagggaggccgtgcaggcggaggggggtacgtgcagggggcagcggaggccgtgcagggggaggggaggccgtgcagggggaaggggggccgtgcagggggaggggaggccgtgcagggggaggggaggccgtgcagggggaggggaggccgtgcagggggaggggggccgtgcagggggaagggaggccgtgcagggggaggggaggccgtgcagggggagggggggccgtgcaggcggaggggggccgtgcagggggagggggggccgtgcaggcggagcggggggcgtgcagggggaggggaagccgtcctgggccttttccagctggctgcagagaaggggccagctccctcctggggacccggagccgcggtacaggtgtggttgcttctcttggagaaagaggctgagctgacatcccccgggctgataaagaatgggctcctcctcctgggcccagcaggctcccgggaccctccctccctccctccctccctccctccttccgggcagcagggaagatctgagttcatgtagctggtgttggcttagggtctgggaggaaggcttttgggaagatgtaaataagaacaaaatctgcagccacctgggaagcctggcctcagtgtggaagagaaggcagcaggattattacagaaccttgtgaagccaacgcgggcagccgccaggagctgcagaccgagaggatctcgtcctttcttgcggcccagggagaccaggcctttcattctgggctcgagaccaacaattcgaattccgaactccccctgcgtgtgggactcaaggtgggtttgcagtttgcaggcagctgaagtttgtctcttctccaggaggccggggcttcttcccttcctctctgtcccatttcttttttcttgagacagagtctcactttgtcacccaggctggag

SEQ ID NO: 41788 - DNA, 1532 bp, Artificial sequence
  DNA replication origin
aggttgcggtgagccgagatcgcgccatttcactgcagcctgggcaacaagagcgaaactgcgtctcaaaaaaaaaaaaaccaaggcgagaaggcagaaagaagtggctcccctggactgagacagagggacgggggctccaaaccccaggcaggagaccagcccgtgttatacggtgcctggaggaggcgtgactcatttgcatagcgctgaggggattggtctgaccaggcctgtcattcacgtagcccgcgaaaaacctggcccgcccaccccagttccgtaatatgcaaatgtagggcgccatgatgttccacacgcctgagggtagtgggggcggccgtggtgtcaggcccgggtgggggcggccttggtgtcaggcccgggtgggggcggccgtggtgccaggcccgggtgggggcggccgtgttgccaggcccgggtgggggcggccttggtgtcaggcccgggtgggggcggccttggtgtcaggcacgggtgggggcgagggcaagagggcaacggtgggaatcgccatgtgggctggaccagctaaaggctcgcatttgcatattaaaggttgccaagccgggtctaagagccagggctttcacgctagacaagaaacattttttggagctgcaaaaaatgcttccaaggaccccttttcctctctctctctctcttttttttttttcttttttggatatggagtttcactcttgttgcccagcctggagtgcagtggcgggatctccgctcactgtaacctccacctcccgggttcaagcgattctcctgcctcagcctcccgagtagctgggatgacaggtgccacaggtgcccaccaccacgcccagctaatttttgtatttttagtagagatggggttttgtcaagttggccaggctggtctcgaactcctgacctgaagtcaccgtaaaaaacctcttttcctcttctccttcctcaggttgcccagggctcacctctgatgggtgggcaggtgagcgcttccaacagcttctcgaggctgcactgcagaaatgccaacgaggactggatgtcggcactgtgtccccggctctgggatgtgcccctccaccacctctccatcccaggtgaggttggggtggggcaggggccgttgcctctatcccaggtgacggcagggtggggcgggagctgtggcgtctgcattccccagtggggacgctggctgtaggagcaatcctgggtgtagggaaatcctagaaagcacactgatgtggacacacacatacacacagtgcacacgtgtgtgcatacacatatgtacatagtcatggacatgcacagacatgcatacacacaggcatgcacacatgtgcacacatacacaggcatacatgcacacacgcacacacgcacacacgcacacatgcacatctgcacacgcacatctgcacacacacatgcacatctgcacacacacatgcacatctgcacacatacgcatgtgcatactgtgttggtctgttctcacgctgcta

SEQ ID NO: 41789 - DNA, 1651 bp, Artificial sequence
  DNA replication origin
gagcccccaggagctgggagaggcaggaaggaccctcccctagagcctccagaaggaactggatccaactgaagtgaactgaactgtggccccccacaaaagacctgtccatgtattgatcatctggaacctgtgaatgggacattatttggaaacagggtctctgcagatgtgattaagtggaagatctggagatgagatcatcctggattagggtggaccctaaatctaatgacaggtgtccttctaagagacagaagaggagacacagacacagaggaggaggccacagacagaggcagagactggagtgatgcggccacaagcccagggacgcctggagcccccaggagctgggagaggcaggaaggaccctcccctagagcctccagaaggaactggatccaactgaagtgaactgaactgtggccccccacaaaagacctgtccatgtattgatcatctggaacctgtgaatgggacattatttggaaacagggtctctgcagatgtgattaagtggaagatctgaaatgagatcatcctggattagggtggaccctaaatctaatgactactgtccttctaagagacagaagaggagacacagacacagaggagaaggccacagacagaggcagagactggagtgatgcggcctcaagcccagggacgcctggagcccccaggagctgggagaggcaggaaggaccctcccctagagtctgtggtcagctcccgctttctggaactgtggtagagctggttcctgtggtttctggcccccatttgtggccccttttgcagtgacagcctcaggaccccacaggtgtttccagggtctcggtgttcatcgatcctcaggcatcaccgtgctgtgtccgccactgcccgcacgtctgtgacacgaacggtcactctgtctgtcaggggtctgtgacgtggagcaggtgcacccgggaacacgcttatgtgttcaggcacataagccgggagaggactgacggccgacttcctatttctacacgggctcacggcggcaagaacatggccctgagtgtcggtgaggctggggcaaccgctcagcctctcgcccggggacgtgggaggcttgggggacactaagtctgagccccaggaggcagttgttgttccggccccgagttgggtgggtgtctgagggcccggcccctggctttgtgtgtgtctgagtgcctggtccccgtgcccagtgggtgtccgagggcctggcccctgggctgagtgggtgtccgagggcccggcccctgggctgagtgggtgtccgagggcccgacccctggctgtgtgtgtctgagtgcccagcccccgtgccgaatgggtgtccgagcacccgatccccggccgtcccacgctcaccgagtgggccacgtcttccagggtggcggagaaggactcgatgaggccgtgcggcagctgggagaggaagccgatggtgtccacgtacaggacggtcatgcgtgagggcagcgtgcccgcgtgggccgtgacgtccagcgtggcaaacagctggtcccgtggctggatggcggcatcgcccgtcagtgccttgatcagcgtggtctttcctaggagggcgtggaggtcagggcgctgcagagatccctgcgtc

SEQ ID NO: 41790 - DNA, 1235 bp, Artificial sequence
  DNA replication origin
gtccgagggcccgacccctggctgtgtgtgtctgagtgcccagcccccgtgccgaatgggtgtccgagcacccgatccccggccgtcccacgctcaccgagtgggccacgtcttccagggtggcggagaaggactcgatgaggccgtgcggcagctgggagaggaagccgatggtgtccacgtacaggacggtcatgcgtgagggcagcgtgcccgcgtgggccgtgacgtccagcgtggcaaacagctggtcccgtggctggatggcggcatcgcccgtcagtgccttgatcagcgtggtctttcctaggagggcgtggaggtcagggcgctgcagagatccctgcgtcccaactcctagcgccgcagccaggccctccaaatggagaccacggcaccctctggggggccgcaccccgggctacacggtccctgagctcctcgggcaccccgggccagacccgacgcgtgggacaaagccaccgtcgctgttctcgggccgatggagcggggccgccgtgcggacacgggggagatggtggtgtggacgggtgtgcgtgtgaaggcgtggatgggagtgaggtcgtctgtgtagatttggcaatggcgtagatggtgggatggtgtaggtggggtggtggtgctggtgtggatgggaggatggtgtagacacaggggaggtgatggtgtagatgggtggatatagatacggcagtggtgccggtgttgacagaaggatggtgtagacagaggagaggcgatggtgtagacagatgggtggattgtatagacgggtggtggtatagatggggcagtggtgccagtgtagacaggaggacggtgcagacgaaggggacattgtggtgtacacgggtggattatgtagacggggtggtggtatagctggggcagtggtgccagtgtagacaggaggacggtgcagacaaagggaacattgtggtgtacacgggtggattatgtagacggggtggtggtatagatggggtagtggtgctggtgtagacaggaggatggtatagacagaggagaggtgatggtgtagatgggtggattgtgtagacagggtggtggtatagatagggcagtggggatggtctagacaggaggatggtgtagatggaggggagattgtggtatagacagggtggtaaagctctggatgggaggatggggtagatgacatcctcaccttggctgctgtaccccacacagag

SEQ ID NO: 41791 - DNA, 805 bp, Artificial sequence
  DNA replication origin
actgcactccagcctgggtgacagagcgagactccgtctaaaaaaaaaaaaaaagaagaaaagcaccgtgtgggctctctctccggggcccgttgcccccactgcctgcccccggctccccactaggcaggtcccctcggcccgggacacgcgtcactcacagtgtgtgagctacacgcggagcggggccgcaacagcggctcctcccttcggcccagaggcccagctcagtgcccccttcaccttcacctcgacctctgccgggagggagacagcgtccgcagagaccgagccactcccgttcccacaccaggtcgaacttgaaaagggacgtcgcccacctgtaccgaggagtcggctcgcgctacatcatggggtcaggtaactcgggccgggcgcggcgtcccagagggtcctcggaatgcggttgtcagcggcagccacccttctcagccctggaagattccaacagggtggggtccagctggggtctccgtctcctggtagcatttgaggacataggagaccctcagccctggaagattccaacagggtgggggctggctgggggctccgtctggtagcatttgaggagataggagatgctggtggtttttggaggttttgcctaaatcagtagccacaaactggggatttaaacagcagagatctatgctctcccctcctggacaccaaaactctgagatcaaggtgaggacagggctgcgctccctccaggggctccttctgcctctcccagctcctgggggctccaggcatccctgggtttgtggccgcgtcactc

SEQ ID NO: 41792 - DNA, 1433 bp, Artificial sequence
  DNA replication origin
gccgctaccgaaaacatccaaccgagacatgctgaagtacgggggtcttgcggggccagaggggaagcggcctctcggattgcccaggtgagctgggagcacacgccagtaggagtcggaggacggtgaggctttatctgtgtcgagattcacaccgggccctggagagacttaaactggtaaagattaggtcggggcagtttatagagtccaacaaacagggtaggcggtggaccggctgtaaccccacctgcccctgcaggccccagccaaatcctcctcctgggtgacccccaccccaccagcagtctcttagggtggggtccagcatgcgatccttgcgcttcccaggtttctgaccatcccgcttccagtagagttgggaagacgctactcacttgcccaggtgggggtcggctgccctgggtcacctgcccaggtgggggtcagctttcctgcctgactcagatgcatctcacccctgctgggatgtgttcaccctgtgtgtgtgtgtgtgtgtgtgtgtccccaatgggatgtgtccacggtgcatgtgtgtgtgtgtctgtccctgtcgggatgtatttactgtgtgtgtgtctgtgtgtgtgtctgcgtgtgtatgtgtttgtgtccctgctgggatgtgtttactgtgtttgtgtgtgtctctgtgtatgtgtctgtgtgtgtgtctgtccctgtcgggatgtatttactgtgtgtgtgtgtgtgtgtgtctgcgtgtgtatgtgtttgtgtccctgccgggatgtgtttactgtgtttgtgtgtgtctctgtgtatgtgtctgtgtgtgtgtctgtccctgtcgggatgtatttactgtgtgtgtgtgtgtgtgtctgcgtgtgtatgtgtttgtgtccctgccgggatgtgtttactgtgtttgtgtgtgtctctgtgtatgtgtctgtgtgtgtgtctgtccctgtcgggatgtatttactgtgtgtgtgtgtgtgtgtctgcatgtgtatgtgtttgtgtccctgccgggatgtgtttactgtgtgtgtgtgtgtgtgtctgcgtgtgtatgtgtttgtgtccctgctgggatgtgtttactgtgtttgtgtgtgtctctgtgtatgtgtctgtgtgtgtgtctgtccctgtcgggatgtatttactgtgtgtgtgtgtgtgtgtgtatgtgtttgtgtccctgccgggatgtgtttactgtgtttgtgtgtgtctctgtgtgtctgtctgtgtgtctgtgtctgtccctgtcgggatgtatttactgtgtgtgtgtgtgtgtgtgtgtgtgtgtgtgtctgcgtgtgtatgtgtttgtgtccctgccgggatgtgttcaccgtatgcatgtctatgtctttgagacacacactcctagagacacaccccctcccacgctgacttcctggatcccgggt

SEQ ID NO: 41793 - DNA, 956 bp, Artificial sequence
  DNA replication origin
ctgtagtcgatgagtggtttttctttacgggtgttttccaaaatggctaattcctggaacagatgaagccccgaactgctcagaacagcgcgcagacctcttgcctctctactccccaaacctgccggtggttcctcagtaatcccctgagcacccgcagctcccgggttccctgctgcgcccgcctggagcccaaattccatgtaaggcagggtcgccctcgtgtcccgctgtggctccggtgtccttctcccgtcagattcctacttagaggccctggggggacgaagtcatatcgggggacaaacggcggctcaaggtgccttctccggggagattgtctcaagggcaggaggaggcctccccgggcaggtgtggacgggggccccgggcagaagcgtctctcacggtggcccttgtgtccccgcagccgagtggcaggtggcggaggccacagcgctggtgcacacgctggacggctggtccgtggtgcagacaatggtcgtgtccaccaaaacgccggacaggaagctcatctttggcaaagggaactttgagcacctgacaggtgggtccgtccagacctgctccttccccaaacctcctttcctgtccgccgctaccgaaaacatccaaccgagacatgctgaagtacgggggtcttgcggggccagaggggaagcggcctctcggattgcccaggtgagctgggagcacacgccagtaggagtcggaggacggtgaggctttatctgtgtcgagattcacaccgggccctggagagacttaaactggtaaagattaggtcggggcagtttatagagtccaacaaacagggtaggcggtggaccggctgtaaccccacctgcccctgcaggccccagccaaatcctcctcctgggtgacccccaccccaccagcagtctcttagggtggggtccagcatgcgatccttg

SEQ ID NO: 41794 - DNA, 1911 bp, Artificial sequence
  DNA replication origin
ccctgccggggcgcggcgctagggagcccgccccggccgcacgccaatcaccagcacgtgacaagggatgaccaatgaggatcacgccctatgctgcggagaggcgctggtgagcacgccccagctgcacgccaatcactagcacgtgacgccggatgaccaatgaggagcacggcctgtgccggggagaggcgctggtgagccagccccggccgcacgccaatcacgagcacgtgatgaggagcggcctgtgggcagcccccgccccaacgttcagcctccagacgcgccatgtgggccctgcgggccgccgtacgcccggggctgcggctctcccgcgtgggccgcggccgctcggctccgcgggcagccgcgccgtcctgccccgcgcgcgcgctagccgctgtcggccgcaggagccccgggaatctggaggggccgtggggcggagggcggggcctgcgggcggacggcggccgaagccgcacgggagacgacgaggaggagccggaagatgcggacgagaacgccgaggaggagctgctgcggggagagcctctgctgccggcggggacccagcgcgtgtgtctggttcaccctgacgtcaagtggggcccggggaagtcgcagatgactcgaggtgaccgcggcagggctttcgggggagaaacaggagctggagacctgggggcggggctctgaggggagggggctcataggtggagattcaggggcggggctctgaagggacgatctcataggtggagattcaggggcggggttctgtggggagaatctcataggtggaggcgcaagggcggggctctgcaggaaggatttcataggtggagattcaggggcgggactcgggagaatcatagctggcgatgcaagggcggggctctggggaggctcataggtagagattcagggacggggctctgacctgagaatctcataggtggagacccagggcggggctttgaggggaagagctcaggtggcgacgtaggggcggggcttcagggggccaggctctaaggagagggtctgatggttggagatgccagggcgtggcgctgaggggcggggctctgaggggaagagcttatggatggtgatgcgggggcggggctctgaagggaggatctcataggtggaggtgcatgggtggggttcgggggaggagcccatgggtgaaagggcggggcttatggggaagaggggaggatatcattggtggaggtgcgtgggcggggcttcgggggaggggcctatggggtaaaagtgcgggggcggagcttatggggtggagtccgtgggatggggtggggcccgtggggtccgtggggtggggtggggtggggtggggtggggtggggttgggtgggccggggcggttctcgccgatgggacctacgtttctcttgctctgggttagaggtaggcacggtgtgtttgaggtcagggaagggagggcgtccagcggaccaatctgtgtctagtcccaccccccaccccccaggaggaaatgcaaatgaataagtcgctgcacgtgtcagagtctcataaaggttgatttttcccttggaagctcctgtagtcgatgagtggtttttctttacgggtgttttccaaaatggctaattcctggaacagatgaagccccgaactgctcagaacagcgcgcagacctcttgcctctctactccccaaacctgccggtggttcctcagtaatcccctgagcacccgcagctcccgggttccctgctgcgcccgcctggagcccaaattccatgtaaggcagggtcgccctcgtgtcccgctgtggctccggtgtccttctcccgtcagattcctacttagaggccctggggggacgaagtcatatcgggggacaaacggcggc

SEQ ID NO: 41795 - DNA, 1071 bp, Artificial sequence
  DNA replication origin
tccccgcgtctgccttgggggcccgagtcccgccctgggggtcctggacgccgcctcggcatccccgcgtctgccttgggggctcgagtcccgccctgggggtccccgatgccgcccgggggtcctcacgtctaccttggagactggagttcccccgtgggagtctcggacgccaccccggagtcaccgtgtctagccttgggggcttgagtccagccctgggggtcctggacgtcgccgaggagcccccacgtctgcctttggggcttgagacctgctctgggggtcccggtcgccgcccaggtgggtccccacgtctagccttgggggcttgagtccagccctggggggcccggatgccgcccgggggttctcctcgtctgccttgggggttgggtccagccccaggcgtcctgaccaccgcccaggggcccccacgtctgcctgggggcctcaaattcagtcctgggggtcccggacgcctcccaggggtcttcatgtctgccgtgggcctcgagtccagccgtgagggtcccgaatgctgccttggagggtggagtccagctctgagggtcctgaagtcagctttgggggttcgaacccatccatcccaggggtccctgagtctacattaggggctggagtccagccttgagggtctccactgctgccttgggggcctggatgggatccagcgggtctgagtccagcctcgggagcccctgcggtggagctctgagtggggcaggggcctgggagatgccaggaggatgagagcggcgcccccctggtccaggggacagtaagaggcagccggtctcagagaagctaccccaaaactgttacccgtggtgtgcagagcgtcctgcaaccccagccctcaccaggatttcttgcgtttttcaggaaatcggttgtgattggcatgttccttaagcgtctgcaggaagccgaggcctttttggtatttcaggaggggttgctaacccccctccttgtaggatcggggtatcccagctgctaattcccctcctaacagccctgcagcgcctggattggaggtgtgacagg

SEQ ID NO: 41796 - DNA, 1203 bp, Artificial sequence
  DNA replication origin
gggaggggggacggggagagagggaggggggacggggagagagggaggggggacggggagagagggaggggggacggggagaggggaggggggacggggagaggggaggggggacggggagaggggaggggggacgggggggcggggagaggggaggggggacggggagagagggaggggggacggggagagagggaggggggacggggagaggggagggggacggggagaggggaggggggcggggagaggggagggggggcggggagaggggagggggggcagggagagaggaggggaacaggatgggggggcggggacaggtgccggaaccagggtcacacgtggaaggccaggaccctgggtcagggcggggtgggaagacccggggtcacacgtggggcggcctcctgactgcagcgtggccttcagtcgcgctgtcaccagcctgtgggacccctggggtgcagagagggagccaagcctcgggggcccagcccggatgccgccgactcccacccgccagcctcgccgagagcccactgacgtgatcactccacagagatcccatcccggggttccggggcccgtgcaggagaaacgcaggtgcagggcctcgtgcccacaccgccggcatctgtgctccacaaccaaactcctagagccgtcatcatccctgggctgcagcgctggccggcgacgactccccgaccacctcgctggggtcacatgtccccgtgggtagaaaatccagtgacggatgtagacaaagagccctctgcacgcctggaagcccagcgccttcggaggccgaggtggggggatcacctgagctcaggagtttgagaccagcctgggcaacgtggcaaaacctcgtctctaggaaaaatttaacaatcagacggacacggtggtgcgcacctgtgatcccagctactcgggaggctgaggcaggagaatggcttgaacccgggaggcagaggttgcagtgagccgagatcgccccattgcactccagcctgggggacagagcaagaccctgtttcaaaaaaaaaccatttagccatttgcatgatgaggaccaagagaataaaaatgaaatctcagcaactcactctccaattcctgtaggaaaatgaaatgagaaacatacgcatgtaaagtatttagtatttcctgcagtttaagaaatagaatccgggg

SEQ ID NO: 41797 - DNA, 886 bp, Artificial sequence
  DNA replication origin
gatccccgagcagggacccgacccagcccacccctcccctccctcacggggtgccttcgtgtcagaaccaagagtgttcacaggggcagccccgggtccacccaggagcagcagcatgagctctgttccgggaggaccatgaaaggtgccagccacagccctgaggtcccggggcacctcctcacgggacaagacacagctgctcaaggcgcagcaggggtgaccgccggcaccagaccggcatccacagcgctgtcctgaggggcggcagggacagtgatggcaagacgggctacccagaataaggggacccagcctggtgggggggacggggcccggagagccatgagacgggggagacagaggagatggagagggggagatgggggagaactggggggcctcagatacaggggatgaggcaaagccggacccagccatggcctgcagccctgaggtcccggggcgcctcctcgtgggacaggacacagctcctcgaggtggagccgaggtgacggggagcagaggtgacgggcaccacaggttcccagcactggcaccagaccggcaccgagagccccgcccagaacaaggggggacccagcctgcggagggacggggtctggacagccacgagacggaggagacggagaagggagagatggaggaaatggagacgggcaagacggaggggagggaggagatggagaaaggggagttgggggagaacgggcgggcatcagatgcaggaatgaggcagagccagacccagccgcgctcagcagttcctagagaagacacggctcccgggggagcgggaggcctttatgactcagagccggggaaggagcagaggccggaggtcgtccccagcacggtgcccacg

SEQ ID NO: 41798 - DNA, 1443 bp, Artificial sequence
  DNA replication origin
ccctgctgcgccttgagcagctgtgtcttgtcccgtgaggaggtgccccgggacctcagggctgtggctggcacctttcatggtcctcccggaacagagctcatgctgctgctcctgggtggacccggggctgcccctgtgaacactcttggttctgacacgaaggcaccccgtgagggaggggaggggtgggctgggtcgggtccctgctcggggatctccaaggggtgacggccacgaagtgcgggggacccacgattgtcattcagagggtgaggcgctgagccctggaacatcctggcttctggcgggacgctggccacggtcagggtgccccgagtgcttgttttgtggggtccctggccccctgcacacgtgagccctcgggggaatggacccccagaacacgtggagggcatgactgctgggctctgggtctccccgcagcgccgccgtccacgaggacccccgacaggacccccccacttctccggcaaaggtgtcggtgtgcacgcccggccccggcactgcccggggcatctggggttgtggctggggaaggacggggcacttgggggaatgcattgggtacagggatgtcggaggatgctcagtggctgtgcaggggcctcaccagcgtcgtgggtgggggacgctgtctttcacggccccagggaggcctctcatgtctcagccttgaaccctaattgggggggctcccagtgtcagtgtggggaggctgagggcgctggtcagagccctcccatgaccatgggctccggctcataggtgtgtgtgtgttggggggtggtgtccggaggtggtgtggggcggacatggtctcccagacgggctccccggagctgagggcagggtgggccctgcgggccgtggctcccagtgtcatttccctgcggcagaacctcctgccctgcacctgtcctgttgttgggggtcctgacccttcgcagacccaggtgggggcatccgggaattcaggggagcacctggtgacactgaggacaccttggggacagcagcattcccccgggaggtgctgcctcgtctacccaccacctggagcccccgcagtctctcctcaggggtcacgggaccaccctgtgcgtccgcctccttcacagcgacggctgccggtggatgaacggggtgcgtatgctgctctcggggtggtcccggcttggccctgccctgccgcgtggacgctgccacctccgtttcctgggggagagttttgtcgtgtgtgaggacggggttgttcccatggtcaccacctgtgaccctcacctgcgtgcagagggagcacagctgggcctgggctcatccacgtcgggtgcccctggggtgcttgtggcctcccctgcacagggagctcctcctggtggggcctccgacccccctcatttaggtgtcccccagctgtgg

SEQ ID NO: 41799 - DNA, 1546 bp, Artificial sequence
  DNA replication origin
tcctggctgaggacgccggctccacgaatgctcccgggggaggggcctgcggtgcaggtgaaaacccacccaggacgggacggagccccgggcgtgagctacacacagaggacctgggcgggcgcgcctcttccccaaagcgagctgcacgggacctgtgtttacaactgggtcgtggtgtccacacaggactggagaacaaacaggaccacagtttagacacattctcccaaagcacagaagctcccagtggaggctaccacttccgttctgaccagaacacgcagcagtgcgaggactggacgcgcgccttcccttaaggtctcggcagtgacgtcgggcgctgctccggggaacccagcgcggccacggaccacacagactctcagagatcctgtggggacacctctgctttccaagacgcccccgacagcctggcactgagctccccgcggtcacccccacggacctgagctcccactgccggagcaggcgtggacacggtgaaggcagtcgaccccagcgtgctgctggctgtgccgcagacacaaagccgggcagccgtgggggtggacactggtcaggtggggagcagaggtgacagacggtggtggggacaggcgcacacccatccaggctaggtctgggggccacagctgccttagggtgtccgacaggagaaggcagagactgggaagttgtggggacccagaggttggctgccaggtcagagccaccgtgcaaacaatgaccacgaggaggacggacacacaggacagacggcccagggtgggccgcaggggccctgtgctgcttggcaggaatcggacggggcggctgatgggggagcaggggttaaaatgcacgtccatggaacccatgggtcgggaacccaacggtaaccagaaagtattttgagctgcaccaaaatcagaaggccgcgggctgcggtgtccatggcccacgtcgctgcctgaagatactcaaggaaaacagcagaacaaaggggagaaacacccgtggttccctgggaagaggagtgaacctcgtcggcccctcgcctcactgatcacacacaaagtcagtatcaggagcgtgagagacgctatcactggattctgcagacatcagagtcacgagcaggaaataccaacaataacccactgatgggaacgggcaagtttccgaaacacacaaaccagcaaagctcactcaaggctgggcaggggctcacacctgtaattccggcacgttgggggaccgaggcggggagaaccctcgagctcaggcatccaagaccaacctgggcaacacggtgaaaccccatctctacaaaaaaatacaaaaaagtagccgggtgtggtggtgcgtgcctggaagcccagctactcggggggctcaggtgcgaggattccttaagcccagcaggtggagggtgcagtgagctgagattgcgccaatgccctccagcctgcgtgacacagccagaccctgtctccaaaaaaataataaaatactacagataatctctgcaaagagaatccag

SEQ ID NO: 41800 - DNA, 1107 bp, Artificial sequence
  DNA replication origin
gccgaggagtacgacatcctggtggccgaggagactgcgggagagccctgggaggacgggtgagtggggaggacgggtgagtggggggacgggtcagtgggaggacgggtgagtggggaggacgggtgagtgggaggacgggtgtgtgtgcagccgggggatgcggggtcagtcaggtggggtgcgcggacacagaggggcggggtgagacctgacacggggccggtgaggtaaggacagccgatgacagggccgggcctcggtgcagtctgcccgtcattccccgcgtggggttctgtgatcctgggcgcgaggcttcgcacatcaggcccagcacggggaggccgagtcgtgtttcgccaacgacgtctgtccttatcccacggctggcacctgctgggcaggctgcagggcccgtggccattccagcctccgcttcggccttccagccttggaggccctgagaggccctgggctggttgctttctcacggagcgtgagggttcttcgtgtcttcagcatacaaaccctttatttgcgacgtgttcgcctttttcccagtttgtgacgtatgttttcaccccctcttcacgtggtgtctcagagatgttctgaatttggaggaggagacactgactggttatttttacagcggtgtttctggtgtcatatctaagaattcatttctgaatccaaagccacgaagattttcctctgcgatgttttgtgttttggtctggggtcctcttgagtaaccttccctgtggggtgtgaagctcggattgaggttccccttgtggtacgtgggtgtccgggtgtccgactgtcccagcatcagctttgcaggccgcagcgttgcctcggcgtcgtgactgtgccgtgtgcgggctccgttccggaaccttcctccgtcccactgctgcacgcgtctgtccgttcccgcggcagagctggctgtggtgagaagcctccgacttgggcgccgtgtggaactgtcggggccattctggtgttgggctgcctgtgtgtgaatcttagactcagcccgtccttgctctgccgtcctgtgggaacgtgtgttggactctgacgtggtggtgagtgctg

SEQ ID NO: 41801 - DNA, 908 bp, Artificial sequence
  DNA replication origin
tcagatccagcagcgcccctgctggccgcgcctccctgcgctagtcccagtccacgcatccttggggcaccggtggcccctagtcgcctccgcatcacggcctcccacgcctcagtccccacccagaaccaggacactcgcgtgtccgcctttcacgtcaaacacgtggcgtgagagcccggagcttcgtgccgcgtccttaagcacgtgtgacaggacgcgcgcaccccacacccaggccccgaaggtgagaccgggctcacgcgccttggacgcactcccctccccgcagggaagatcacgctgcaggacctgaagcgctgcaagctggctaacgtcttcttcgacaccttcttcaacatcgagaagtacctcgaccacgagcagaaagagcagatctccctgctcagggtgagtgcggcgggcacgcgggccgggccgcgccacgccgtgtacgtaacccgtgtgcttcctccaggacggtgacagcggcggccccgagctctcggactgggagaagtacgcggccgaggagtacgacatcctggtggccgaggagactgcgggagagccctgggaggacgggtgagtggggaggacgggtgagtggggggacgggtcagtgggaggacgggtgagtggggaggacgggtgagtgggaggacgggtgtgtgtgcagccgggggatgcggggtcagtcaggtggggtgcgcggacacagaggggcggggtgagacctgacacggggccggtgaggtaaggacagccgatgacagggccgggcctcggtgcagtctgcccgtcattccccgcgtggggttctgtgatcctgggcgcgaggcttcgcacatcaggcccagcacggggaggccgagtcgtgtttcgccaacgacgtctgtccttatccc

SEQ ID NO: 41802 - DNA, 1461 bp, Artificial sequence
  DNA replication origin
cgtgcaggcatcccctgccccctgccgcccccaccgggcgcgcacgcgtccccctgtgccgtgcagcccccaccaggcgtgcacatgtccccctgtgccgtgcagcccccaccgggcgtgcacatgtccccctgtgccgtgcagcccccaccaggcgtgcaggcatccgcctggggacacatgtcacatgggcggctcccggcccctccactgggacaaacgcatgccgcagcaggaacccacctggtcggtgtttttttgtcttcctcagagatcaaaaaccagacaaagtcggcatagctgatcttcccttccttctgcacttttctgcctctagatcgaaagccaggatggagagacgaagatgcatgtcagggagagcttcacaggaacggagcccctgtccacgcgcctcggtgaggggagccccccgggcccggccctcctcctgcccccctcctgcccctcctcctgcctctccggggaggaggtggaggccccgtggccagagggttttccccagatccaggcagggtcaggagtgcaccttcgttactgctcactcaggcccagcgcccgacaagaacccccgacctggggcctgggccacccccttcctcagacttcgcgtgacagtcttgtgccacccccccccactagggattcacgtgacagagacacgtgcccccctcgccagggcctggggtgacaaccactcgctgtcggggcacaaaaagctcacgtcaggcaacgatgaggagagggaccggggtcctcgcaggggcaatggctgccgtcaggcgcctgagccgtacgtaccgtgtgactgctcctgagaagatcctgtctatcatcttggtagaaagggctggaaaggaatgcggttgatgggcagcccgcaccgtgcctcggccccgacgtcaccaccccccggagccgagactggatgcggtggggaccgaaaagctgagaggacgcctgggtctgggagagccccggggccccgatgcccctgcacggcccatcctaggggcccaccacgctttcccgtcgagcagagccaagtccagcatgaaatccacagagcgcaaagctgaccgcggctccaagaccgacttgtaaagagcagaatattcaggcctcaaaggtacagctttcagacggagagagagacctcgagtgtgatcacggaaacaaacacgtttcaaccaaaggttcaccaacgggagacgggagtgagacctcagcaacgggaggcgggagtgagacctcagcaacgggaggcgggagtgagacctcagcaacgggaggcgggagtgagacctcagcaacgggaggcgggagtgagacctcagcaacgggaggcgggagggagacctcagcaacgggaggcgggagggagacctcagcaacgggaggcgggagggagacctcgccaacgggaggcgggagggagacctc

SEQ ID NO: 41803 - DNA, 1168 bp, Artificial sequence
  DNA replication origin
ggagacctcaccaacgggaggcgggagtgagacctcaccaacgggaggcgggagggagacctcagcaacgggaggcgggagggagacctcaccaacgggaggcgggagtgagacctcagcaacgggaggcgggattgagacctcaccaacgggaggccggagtgagacctcaccaaggagaggcgggagtgagacctcaccaacgggaggccggagtgagacctcaccaacgggaggcgggagggagacctcaccaacgggaggcaggagtgaaagcaccgtcgccgtcagcttgggccacgagaaggtcccgcagcctgggcggccatccctgcggtcaccggtgtccctgggacgcacgagccaaggtgccgccccccgcttcaggccgcagtgcgtgagaaacagcgcagcccggccgcacacggcatcctgccctgggaccgagagtgggctccagaggaacgcggaaagctggggccgcgccgggccgggggttcacagggacagtgagcgcctggttctgggccgattcccagctgtgcaggtgctggcccaggccacacgggccggcgctgtggagctgtgctctcctcgtggctagttaggggcccagggcgcaggtggctccctgaactgagcgcaggacaaatccagggaatgctacgtctgctcaggtgcgcgtccgacgcagggatctactgcggccacgcgacccaggaccagccccgggagacgcagacgggtgcagctcacgttcggggaaccaggcgtattatgagtcgaccacacacaacagatgccaccgtaattcggaaacagtcttggtcatatggttttttggggtaaaaagcacacttaaaggaatcctttagaaaactcaagccccacaggccacaggccgctttgagttcctgcaagtgtggatgactcttagaggggccgggaggcagtggctgctgtgaggacacctgggcggcaccggctcccgcggaggtatatgaacgaccgctaagcctggggctccacctagcccgggattggatggaaactgctccaggccttgggggctggaacctggagctcctgagggaaggcgtgtggcctgcccgcccttgctcgggtgttaacaaggaagccccacagcgctgctggccctcgggccagg

SEQ ID NO: 41804 - DNA, 886 bp, Artificial sequence
  DNA replication origin
agacgcagacgggtgcagctcacgttcggggaaccaggcgtattatgagtcgaccacacacaacagatgccaccgtaattcggaaacagtcttggtcatatggttttttggggtaaaaagcacacttaaaggaatcctttagaaaactcaagccccacaggccacaggccgctttgagttcctgcaagtgtggatgactcttagaggggccgggaggcagtggctgctgtgaggacacctgggcggcaccggctcccgcggaggtatatgaacgaccgctaagcctggggctccacctagcccgggattggatggaaactgctccaggccttgggggctggaacctggagctcctgagggaaggcgtgtggcctgcccgcccttgctcgggtgttaacaaggaagccccacagcgctgctggccctcgggccaggagcttcaggaccagcggcccacactgaccctgtagacgcccccaggcagaggcctcgggcagaggcgcacgcggggacccagacacggggcagcgactggggaaggagaggcagctgcagacacagagcggcgagtgcgaaggagaggcagctgcagacacagagctgggagtgcggaaggagaggcagctgcagacccgcaggccctgagagaagggtgtgctcggtgtccgcgcggcccgcccgcccctgtgcccccacgcaccgtggtcattgtgccgcgccaggtcgtccgcgtcgatgagcaggtcgtggtccgtgtccagctcccagaacttgcagtagatgacgtagaaatgctcgtacgagaagaattcggtcagctggttgatgtccgcctcctcctccagcagcgccacattctgccaaaggacccaggcggcctgagcgc

SEQ ID NO: 41805 - DNA, 1156 bp, Artificial sequence
  DNA replication origin
agaggggcgcgcccttggtctcagccgcacggggccgccagggcacaggcgggggcagagggaagggccctgcgggaggcgccgccccaggccgcggaaagcggggagggtctggccggggacgccccggagctacacgggcccaggacaggtgggaagggggtgcggccaccccggaaaaccagagtccccccaacaccgggctcccgggcgggtggagactctcccagagcgcggccgcctcctccggaagctcaggaaccccgggccccgcccgccccgtccgcagaagccccgcggcggccgctgcagaaacacccgcgccccgcgctggaaccgacggcccctccgctggggacccaccgtggtgatgtagcgcgagtggaactcggacgcctccttcaggaacgacagccccgggtgcgtgttcaccacgtcctgcgggtgggaagacacgaggcgcgtggtgtagacgccggccctcccgtgaggtgtgcggtgtggacgctgcagacgcggaccctcccgtgagcgatgaggtgtgcggtgtagacgccggccctcccgtgagggatgaggcgtatggtgtagacgccggccctcccgtgagggatgaggcatgtggtgtagacgcgggccctcccgtgaggtgtgcagtgtagacgcggaccctcccgtgagcgatgaggtgtgcggtgtagacgcggaccctcccatgagggatgaggcatgtggtgtagacgcgggccctcccatgaggtgtgcggtgtagacgcggaccctcccgtgagggatgaggcgtgtggtgtagacgccggccctcccatgaggcatgcggtgtagacgcgggccctcccgtgaaggataaggcctgtggtgtagacgcaggctctcacctgcaagaaggggacaaagtcctcctgcaccaggtagttgcagccggggctcatgagcagatggacgaacttggccgcgtcgtcgtggcagttctggaggattctggaaggacaggatgactgggcaccaccctcacaggggggtggctttcgaccccgcagacgcagggtggaacacgtgtgtggtgttccacgtggtgcgtggcaggtggccacacacgacggccaggcctgtgcccgtacaagggtttctcctctca

SEQ ID NO: 41806 - DNA, 1269 bp, Artificial sequence
  DNA replication origin
ccgcgttgctgggggaactgggacgccacgcagctgccgggaaagcggcccacggggcggctgagcgtaaagccccgtggcccggccaggacatctgtcctcccagaagcacaccagtgggaagagggcccgtgcccgtgagagcctgcacagatggggacgtcggctgcttggttcacggtgccccaggcgagaggagccggacgccagagcagggactggaggaataaactgtggcagagtcgtcctgacaggtgcagggcgggagtgaccacgggggggcgtgggggactgcagagggggctgcgcgccacagcggggattgcagtgctgctatgggaaaggacgcgctccggctggcgcacctgtggatgacttgaaggcagccgtgtgcggctggaggggccgggccccgcaggacgcacaggcacgtgccggctcccgtgatgaggatcctgacggagctcagccctggccacctggaagggcgtcccggtgcggtgggagggaacgagccgggtgcagcaccgggtccttgggctagtgctagtcccacgcttttgacctcatgagaccattctggctcacaggccgtgcaggtttcaaaccccaagcgctcaacacccagggatggggggatgtgtgagccttcacatctgtgctcctcaccgcgtgcaagacacaccgtcatgacccggtggcagggatggagcatcagatctatccagccgtgcaggatatagcgtctcatgtgtccagacctgcaggctggagtgcagtgtgtgatcacagcgtgatccatttttattctacttgtttttcgagacacggtcttgctgttgcccaggctggagtgcagtgtgtgatcacagcgtgatccatttttattctacttgtttttcgagacacggtcttgctgttgcccaggctggagtgcagtgtgtgatcacagcgtgatccatttttattctacttgtttttcgagacacggtcttgctgttgcccaggctggagtgcagtgtgtgatcacagctcagtgcagtctcaacttcacgggctcaagcaatcctcccaccttagcctcccaagtagctgggaccacaggtgcgcgctatcatgcctgggtaatttttttaatttctacagtgaagtctcactatgttgccgaggctggtctggaacccttggccgcaagccatcctcccgccttggcctctcaaagtgctgggactacagggatgacactgcaaccagagacagctgcacccc

SEQ ID NO: 41807 - DNA, 919 bp, Artificial sequence
  DNA replication origin
aagacaacgacaaaacttgctttttaccaccaaacgtgacatccagccaacggaccaggttctttcaagtcttaaagcctcactaccttagacggccaccaaggccagtgccgctgtgcgtggaagcgaggtgacaccgagaactgagtcctggaaggaaaatgacatgaaacgcgcacatgagaaccaggcgccgaggcggggaagcaccgcggagggggggtggccgctgtggggggcggcaccacggtggggggaggcgccgttggggagaagcaccgtggggatgaagcaccgcgtggggaggggcgctgtggcggggaagcaccgtggggacgggcgccctggcggggaagcaccgcggcgggggtaggggagggcggggcggcgccctggcggggaagcaccgcggccggggaggggcatcgtggcggggaagcactgaggggaatacatgggtcccatgcaggaacctcactgggctgcgcgagcggctttgtaggacccgaagcggacgcagcgcgtgagctgcaaaagaggtgtctgacccagcccgaggcgcgcagagaccctgtgggtggggccgggcgcactccgcgagggtgagttctccacacaacggaggctgtactgaaaaggatgaaggtgtcccagcagacggaatgccagcaaagagacctcccagtgaaggaactctcagagataccccacaacttcaagagcaccaaggataaaacgcggaagctgagcaaggcgtgttaagtcgagtgagtctgccagggcacggagcaggtgctcactccacacgggacaaggagatggcactgctgtaactacttttggcaagtttttactgagagatgaaacaattcttaatgcttctggtgttttaagttacagcatactaggtaaatattag

SEQ ID NO: 41808 - DNA, 931 bp, Artificial sequence
  DNA replication origin
attgtgggatgctgggctcggggagatgcattgtgggatggtgggctcggggagatgcattgtgggatcgcgggctcggggagatgcactgtgggattgcgggctcggggagatgcactgtgggatggtgggctcggagagatgcactgcgggatggtgggctcggggagatgcactgtgggatggtgggctcggggagatgcactgcgggatcgtgggctcggggagatgcactgcgggatcatgggctcggggagatgcactgtgggatcgcgggctcggggagatgcagggacctcctgccccaggacacagaggtcacgttctgaatcacagggaaggggtgtgcccttaggtaaagctgtgctgaaggagcactcagtcggcagctactgcgggaagcctgctctgccccaggtcacggaggcggcctctgttcctcctacatggggatcagagaaaaacaactgagtctcaccgtgggtgagggtcctgcagcgacagcagggtgggcacagttgaggcgctgtcagtgggacccttgtgacctggggtgagggtcctgtgggagtagcagggtggggacagttggggcgctgtgggacccttgtgacctgcggtgaggatactgtggcagtagcagggtggggacagttggggtgctgtctgtgggacccttgtgacctggggtgagggtcctgtgggagtagcagggcgggctgttttctctgtgtggacactggagcttggacccagtcctggattgatccaggcagtcaggattgtgggtgcaaaggccctgagctgtggtccactggtatgcggacttcctccctggacccctcctccatggcagttggttgaggaggacacagccccgtcccctgagtagttgatggaggaggaggaggacgcagccccattccctagg

SEQ ID NO: 41809 - DNA, 1156 bp, Artificial sequence
  DNA replication origin
gcgcgctggggatttacttggagctcattcttcccactgaaggtgacgcgttctgggagcttccccggaggaccctgcgttttgcctcctcttccccagagctctgcaaggctgtgagagatttcgggtgagcccgctcggcccacgcttctgaaggcagagcctgttcaggctccacgggcttccccgggttcttccttccaggcagctgtggcctgaggtgtcctcctttcctgccagcctgtgggcgccgtctagaagacgtttgtcaactattctgtccagggttcttggcagttttcatcaggaaggttggtttgtgtacccaggtcattgctatattgccaaacacaggagcccgagagctcactgcagaatattcgcggggtcagttccgtaccccaaatagcagagctgtgtgaacccagcgtgatgaaggaggaagagccgcaggctccacagtgggacccccacagcgagagacgggaaggcgccgctgcgggaatgcgttgtgggctcgggaagatgcactgtgggatcgcgggcttggggagatgcattgtgggatggtgggcacagggagatgactgtgggatggtgggctcggggagatgcattgtgggattgcgggcacggggagatgcattgtgggatcgtggactcatggagatgcactgcgggatcgcgggctcggggagatgcactgcgggatcgcgggctcggggagatgcattgtgggatgctgggctcggggagatgcattgtgggatggtgggctcggggagatgcattgtgggatcgcgggctcggggagatgcactgtgggattgcgggctcggggagatgcactgtgggatggtgggctcggagagatgcactgcgggatggtgggctcggggagatgcactgtgggatggtgggctcggggagatgcactgcgggatcgtgggctcggggagatgcactgcgggatcatgggctcggggagatgcactgtgggatcgcgggctcggggagatgcagggacctcctgccccaggacacagaggtcacgttctgaatcacagggaaggggtgtgcccttaggtaaagctgtgctgaaggagcactcagtcggcagctactgcgggaagcctgctctgccccaggtcacgga

SEQ ID NO: 41810 - DNA, 1391 bp, Artificial sequence
  DNA replication origin
gggtgccggatcctcccctcgctgtgttgcgcggcatccaccgtcaccccttggctggtggacagaatgatccccacgtcccccagcccagccttccgagctctgtggagactcacgcctcgctgcagccgtggctgcaggcgccagtgcctgggctgcaggtgtgggtgcaggccccagccgacgtctctcagcgtccgttgaggcccggttgctcggctgcagtcatgtgtctgagtgaatgttagcccacgtgagctctggcctactcagacacctgcacctgctgcgtttctgtgttgacccctccacaccagttctccctctttgctagagaggggatttttaaacccacacgtggggcctctcatctccgtgttcggctcctctgtgtaaacaccgacctttttgactcctgtgtttagccgtccagcgtgcggtttgcaggtgtagctggcagccctctaccagccctctcagagggtccctgggagtcaagtgctgggccgagaagaatgctcagagcttgcagcaggccctgccttccagggggtggccgtcatctgggtgggcgaggggctcagctggaatccatgagtgtgcgtcccggccaaaccccccgtccctgattccataccacagcctcccgtgcttccgcctcccgctgcagagtgggggccgctgcagagcgggggctcctgggggcacggctgtgcgttgcagcccgtactgagcgtcccttccgccggccccctgctgctccggcacctcctctgtggctttgatcgtggtgtccggtcctgctgccgtgggggcgagggtcatttctgctggtcaccgcgccctgcctgctgtgcgcaccctctgcacatgcgggggtctgcccgaggctggtgtcgcgagaggatgtgtcacggtgcacgtggcctgtgttctcggggtacactcacctgcacccatcaagcgcacgcacttctacgcaaaaacaggcagcctcagtgttaggctcagcctttgtttttggtcgtatatggacgtgttttgcaaaactgtgggtgtactctggaagggcgacacatgtatctgtgacttctggaattgtgatgagtcagggagctgccttctcagtgccctcaacagaaatagcttgttgggagtcagggtgtcgcctttatcagtgcgctttgggtgacgggctctttacgaagttctttttaaagtacacgtactgaggaggatttaaagtggatgacctggccgccacaggcccctctggtttgtctgaactttttaatgaacaggcggctggctttagaattcttcttccacatacatgcagctgtttttgctccttctgtgtttaccgtagatgcctggcctcaccggctacg

SEQ ID NO: 41811 - DNA, 1337 bp, Artificial sequence
  DNA replication origin
gttggctcccaatctggttcccctagctgcgtttgggaggccgtccgtgtgtagtgctgatatgaactgaaggggcggcacctctgccctgtgagtttgcgccccacatcgtgggtgactgggcggcacctctgtcctgtgagtttgcgccccgcatcgtgggtgacgggacggcacctctgccctgtgagtttgtgccccacatcatgggttactgggccgcacctctgccctgtgagtttgcatcctgcatcgtgggtgactgggcggcacctctgccctgtgagtttgcatcctgcatcgtgggtgactgggcagcacctctgccctgtgagtttgcgccccgcatcgtgggtgactgggcggcacctctgccctgtgagtttgcgccccgcatcgtgggttactgggtgcacttgtttaaatcgtctcctggtggtttgagcacattccctctggtgctgtcttaaagcttccctttggagacttaccgggggtcagaggccgacttctgaatcctcaaggacagtaaggaagtgagaaggatggagggatccgaggatggctggagaagggaaggaggtggaagagaaggaagtggagaggggcgtacccctaagaagagttggaaggggccttgcgggtggggggctgtggtgggcgtcagaggtggtgtggaaggttgcaggagaagaaaaggccagtctgagatggctgcagacttctggttccaagtctaggacactcggaaaaaggaaaacgatggagacaggaaacagatcggggcttgcgggggttgggtgcgtcagtgccacacagacgtttttcagggcagggaaactcctctgcgtgaccccacagtggtagatccgtgtcatcctgcgtttttccagactcaacagagcgtgcggcagcgggagagcccagtgcacgctgttgactcggggtgatagtgacccgtccaaggaggtttattgactgtaacagatgcaggcggtcacgcaggaccttcctgatcggggacccgggaggctttctgctgacagcgttcagcctggcagggatgtggccagtttctgaccctcagcccgaaggtatcctgtctccttcccggtgggatcgaggtgcaggcccccggaatgtcagctcaccctcatttaaagttgcccgtcccccttttccaccgcccctcttttcttgttctaaatacgattgcaaacaagcgcagttatcacagtgagcagtggcagagaagacgagatcctggatgcccactgcagcttagctgtattctagaaactcctgaagtttggggaggggcggagatgccggcgcgc

SEQ ID NO: 41812 - DNA, 1217 bp, Artificial sequence
  DNA replication origin
ttggtgaatatccatagctcttcctataacttcttgaatatatacacttggccaacccactcagcataaattcccgtctcatcttttcttccctccaagtgcttgtttttagttttcttttttttttttttttttttttttttgagatggagtcttgctctggtgcccaggctggagtgcagcctctgcctcctgggttccagtgattctcctgcctcagcctcccgggtagctgagattacaggtacattagccagaggctgcgcttctcacctgcggtgtataatcaccttctatgaaataaatggcgtttcttctaagaaatacagtgggattttgggaggccgaagcgggaggattgcttggacccaggaattccagagcactctaggtaacatagcaagacctcgtctctgcaaaaataaataaataaataaataaacaaaaattagcctggcgtgatggtgcacgcctgtaatcccagctactggggaggctgaggcaggaagtccaactgtgtttgcgccactgcactccagcctaggagacagagcaagaccctgtctccaaagaattgtaaaataaataaaaaacggaccaggcgcagtgactcacgtctgaaatcccagcactttgggaggccaaggcgggaggatcacttgaggtcaggagttcgagaccagcctggcccacatgggggaaacccagtctctactaaaaatacaacatcagccaggcgtggtggcacgtgcctgtaagtcccagctcctcgggagcctgaggcaggagaatcgcttgaacctgggaggcagaggttgcagtgagccaagatcgcgccatcgtactccagcctgggcaacagagcaaaactctgtctcaaaattaaaacaaattaaaataataaaataaaataaaataggaagcctttctacctttataaattgtgtgatttttaggttaacaactgtcaatgacggaatgttcagtacgtgggactttcttgtctgtatgtgtgtggtggggggggtcggggcggggaacagactcaatatgaaaccgttttggggtctgacgctcgcccaccagcctccatcgcgcagccacacgcccactatgcgaccagagccacctgcgcagttgttagcagaaggaagagtaacttactactctcgtccctgcggatctacgggtgcctcgaacgtggggcgcgttcctgg

SEQ ID NO: 41813 - DNA, 1325 bp, Artificial sequence
  DNA replication origin
gcgccttgatccggcgcaggcagtcctgcagcatccgctgcgtgctggcctcgctgagccagtacaggaacagctcgtccaccttcatcttcaggaccggctgcagcactttgccgggcggcatggcgggggctgggcccgcggcgcccccggacgcccgcgccccgccccgccccgggggcttcggtccgccccggaccgacctcggtgatgcgagcacggcccgctgagggggcgcggcgcagggaacagggcccgcgcctcgggaactgcgcggactcgcggggcgcggggaccgaggagggggcgcggtccggcccgcgctgctcagggcagcttcaaaacgggcgcgccggccgcgctcccaaacaagggcgcccgcgttcacgtcactgcgtcgcgtcatcgcgacgatgtcatcacgaggcgacgccgccgctagccacgcgcgccccgcggccctcggagcttttgcaggaggctttggtggggccgagcggctgcggtgaggacgagggaggggctgtggcggccgtaccgcccgagctctttctgcgtttaggatttttagaggcgcggcccatggcggcgtggcagtcctagagctgcggaaatgcgagcatgcgcaatgcgtgcctgccagagcgaggagagggtggaacctccgcatggagcatgcgccgtgcatagcggtggaggagcggagttcgggaggccggtcgggtgagcgtgcgcaatggctgcccgcggggcgcaagccagaggctgggaggtgtgtgagcgggtggggctggaggacgggagtgcgcctgcgcagtgggaggcaccgggaacgagcgagcatgcggggtgcgcgcccgccgagctcgggagcgagcgtgcgtcctacgggagcgcgcgaggaaaagatcaaacttttcaataacagcgggctacctgggacccaaagggccccgtttactttagctttgcttatcaaacagtagagacaggttggaggagttggacccctttaaacgttggtgttcagggatgagcgtgaagtgcgttgaaaattgcaaaaatcatccacgtccagggaggtgacattagttaaataactttacccaatggtcgtttttgtttctgcttttaacagtatccataaaaacactgcattatcatctgtctggcacacatgcacctgtttcctttacatcttgccccgctttttattcattttttatcaaaatagggtttcacctggtgttgcaccctgttagagagtaatttcaaggtcttttatgagccaggttctcctacttctgagctgcataaatcgagcc

SEQ ID NO: 41814 - DNA, 1717 bp, Artificial sequence
  DNA replication origin
ttccaggcagaggaaagccacatctgcatgcagagaaaactccagtggggacagagggggtgcatcgtgtttagaagccacgtggggggtgggggggcaggtgtgtctcatcgcacacgtgtgaacggagtgccgggggcccctcttctcctgagcccccaaaggcacgagccggtgggtctcgggagttgtggggcgattcctggaggtggctctgtgcaaagtgttgtcatatcagccaggaaaacacccccttgccacagcctcaagtcaacccaatctcgtctgaaaggtttggatggaggtgggggggtccctggcttccgtcgctggagcggtggccgcagggctggtcttcactgtcatcgtgatgtcaccatcgtcctcacgttgggtgtctccctggattctcggctctccagggaggcggcgacggcccatcccaccagctgcccacggaggcggggtccccgggatgcaggcttgacctcagaggaaaacccacctgagccattctagggggaggggacaccaggaccccccaaaggcctggtcggctgaggtcatggttcatcccggggttgggggaggggacaccaggaccccccaaaggcctggtcggctgaggtcatggttcatcccggggttgggggaggggacaccaggaccccccaaaggcctggtcggctgaggtcatggtttatcccggggttgggggaggggacaccaggaccccccaaaggcccggtcagctgaggtcatggttcatcccggggttggagcagaacgggccgtggaggatgggctcagggagtgtttgttcatggcgtgaattcacacggaatcttcctgcctccctccttccttccttctttcctccctccctccgtcctttcgttccctccttccttccaatttcctccctctctccctccctgcctttctttgtggacagcctggcatctgcaccgtgtcctggctgagcctcctgccagctctgcggcctcgttgaggggggcggggtgcgtgtctcaccatctttgcacctcagcttccccatctgtgacgcagggacggcaacaggcacccctcgaggtcacccctccagcatttgtttacagctgtctcacatgaacttagatccatggaagagcgtcaccctgactcgtcaacctgcaaaaacggcccaggacagagaggggggcccttgggatggtggcggccgggacccgaggctgttgtccggtcgtagagccttagaggctgttggcggtgtagacgcgggtcccaggctgcaagctgcctctctcctctgcctcaggctcttcttttctatttatttatttttaagacagggtctcgctctgtcacccaggctggagtgcagtggtgccatctcggctcacagcagcctccaactcctgggctcaagccgtcctcccgcctcagcctcccgagcagcggagaccacaggcatgtgccgggctaattttctaatgttttgtagagatgacgtctttgctacgttgcccaggctggtgttgaactcctgggctcaaggcctcctctcgctctggtctcccaaagtgctgggattagaggtgtgagccaccgcgtctggccaagacgtcttttgggggggacataattctcaaccaaattgcctctgtctctccttctcactctctctctctccacacacacacacacacacaca

SEQ ID NO: 41815 - DNA, 1162 bp, Artificial sequence
  DNA replication origin
ccttttctgcacagcttgggacccgggtccgagaagcggcttcctccctcggaatcttgcaagtgtgggagggaacggggcggctgaggagatgacggtgcaaagtgaaacgcggctgattttcctctcctgggctagaccattgctcactcccgacagcttctgttctgtgacgggagcgtcagaaacacagtcgagcaaaggtttcacgacgtcagttccgaagtagccggttacggggcctgaacggcacggggttggcagccgggggagggatggggcttgaacccggtttgggatgaatgtaaagacctgagccccggcccacgaggcgggaaggcggtcccggggttcgcagcccggggacccacaaggctgaaggcagtgacgtgtttcaaaactcagcaaagggtccgacaacggtccaccgtttccgtagctggcactgccatcctgtggccgaagagaaaatatgtcatggaaaacgcggggccggggcggccgtcctgtctctggggcgtccgtgctgtctctggggtgtccgtcctgtctctggggcgtccgtcctgtctctggggcgcccgtcctgtctctggggcgtccgtcctgtctctggggcgtccgtgctgtctctggggcgtccgtcctgtctctggggcgtccgtgctgtctctggggcctccatcctgtctctggggcgtccgtcctgtctctggggcgtccgtgctgtctctggggtgtccgtcctgtctctggggcgtccgtcctgtctctggggcgtccgtgctgtctctggggcctccgtcctgtctctggggcatccgtgctgtctctggggtctccgtcctgtctctggggcgtccgtcctgtctctggggtctctgtgctgtctctgggggcgtccgtcctgtctctggggcatcagtcctgtctctggggcgtccgtcctgtctctggggtctccgtgctgtctctgggggcgtccgtcctgtctctggggcatcagtcctgtctctggggtgtccgtcctgtctctgggggtgtccgtgctgtctctggggtctccgtgctgtctctggggcgtccgtcctgtctctggggcgtccgtcctgtctctggggtgtccgtcctgtcacccgtgtgcctttcatgtcactggagt

SEQ ID NO: 41816 - DNA, 1217 bp, Artificial sequence
  DNA replication origin
tatgattgatgattggttgacagatgattgataattgatatagatgcatgattaatagatggttgataattgacagataattggtatagatgcatgattgatagatgatttattgacagacaattgatacataagcgatacagatgcatgattgatagggaattgattgacagatgattgataatttatatagatgtatgactgatcagtgattggttgataggtaattgatatagatgcatgattgacagatgattggttgtcagataattgaccgatagtaatggatagctgattaatagatagataattgattaatcaataattgatagatgatagataaagaatctctcatgcccaggcagctttctcagctctggcactgctgatgtttgggactggaggactctctgtcttggggccaccctgggtgctgcagggtgctaactctcttgatgaggccgtcctgggtactgtagggtactgagtctctgtgatgaagccgtcctgggctctgtagggtgttgagtctgagtctctgtgatgaggccgtcctgggccctgtaggatgctgagtctctgtgatgaggccgtcctggacactgtagggtgctgagtctgagtctctgtgatgaggccgtcctgggccctgtagggtgttaagtctctgtgatgaggccgtcctggacactgtagggtgctgagtctctgtgatgaggccgtcctgggcactgtagggtgttgagtctgagtctctgtgatgaggccgtcctgggccctgtagggtgttgagtgtctgtgatgaggccgtcctgggagctgtagggtgttgactctgtggtggggccgtcctgggcgctgtagggtgctgagtctctgtgatgagaccgtcctgggagctgtagggtgttgactctgtggtggggccatcctgggcgctgtagggtgctgagtctctgtgatgagaccgtcctgggagctgtagggtgttgactctgtggtggggccgtcctgggcgctgtagggtgctgagtctctgtgatgaggccgtcctgggagctgtagggtgttgactctgtggtggggccgtcctgggcgctgtagggtgttgagtctctgtgatgaggccgtcctgggagctgtagggtgttgactctgtggtggggccgtcctgggcgctgtagggtgctgaggagcgtccctgggctccacccagc

SEQ ID NO: 41817 - DNA, 1666 bp, Artificial sequence
  DNA replication origin
aaacacaacaaaataccacgaaaagtccacatgcgtctactatgaaagcaggaacatctaacaacctaagggcccctttgtacacgaaaaaaggcaaaaattaacatttcacgctagaccaggacagcacaaagggaatatggcctggggccttcatctcttcatcctcacgaattaccatgtgtggttggagacatatgtgtggtttgtctgcctcacgtgggtgtctgtaaagaaacgtctgtccctgcgtccagggcccctttgagcctcacgcctctcccccctgcacaggtagctccacggagccttgtggaatcagccgaggccggacgtgtggtttatgaggcctccagggccctcagggtcggcctgcagcctgggctggacgatcgctgagtaacatttgcagcagcagcagcagcctgaggaaggggtcaatgtttgccacgcagatgtgtatgtctgtgtgtgggtgtgtgtgtgtacaggtgtgcgtgcatgggcctgtgtatgtgtgtgtctgtgcaggtgtgtatgaatgtctgtgtgtatatgtctgtgtgtgggtgtgaatgtatgtgtacaagcgtgtgtgtgcacctgtgtgtgcgtgggtgtgtatctgtgtgtgtatgaatgtgtgtgtgtacagatgtgtatgtctgtgtgtaggtgtgaatgtatgtgtacaggcgtgtatgtgcacctgtgtggggggggtgtgtctgtgtgtgtgtgtgtacaggtgtgtatgtctgtgtgtaggtgtgaatgtatgtgtacaggcatgtgtgtgcacctgtgtgtggggggtgtgtctgtgtgtgcatgtgaatgtatgtgtacaggtgtgtgtgtgcatgtgcctctgtgtgtgtgtgtgcaggtgtgtctgtatatgtctgtgggtgtgaacgtgtacaggcgtgtgtacccgtgtgtgtgtgcatgtgtgtatgaatgtgtgtgtacaggtgtgtgtctgtgtgtaggtgtgaatgtatgtgtacaggcgtgtgtgtgcacctgtgtgtgtggggggctgtgtctgtgtgtgcatgtgaatgtatgtgtacaggtgtgtgtgtgcatgtgcctctgtgtgtgtgtgtgcaggtgtgtctgtgtatatgtctgtgggtgtgaacgtgtacaggcgtgtgtacccgtgtgtgtgtgcgtgtatgaatgtgtgtgtacaggtgtgtatgtctgtgtgtgggtgtgaatggatgtgtacaggcgtgtgtgtgcacctgtgttcaggtgtatatgaatgtgtgtgtcctggtgtgtacgtgtggggttgtgaatgtgtgtgtacaggagtgtgtgcgcctgtgtgtggtgcaggtgtgtatgaatgtgtgtgtgggtgcgtatgtctgtgtgtgggtgtgaatgtatgtgtataggagtgtgtgtacgtgtgtgtgtgtgcaggtgtgtatgaatgtatgtctgtgtgttggtgtgaatgtgtgtgtacagatgtgtgtgtaggtgcgtacgaatgcatatgtgtgtctgggtgtgaatgtatgtgtacaggcatctgtgtgcctgtgtgtgtgtgggtgtgtatgtctgtctctgtgtgcacaggccagggaagctcacacacaaacagctgtcttctttgattcatctctgcccccaccct

SEQ ID NO: 41818 - DNA, 1728 bp, Artificial sequence
  DNA replication origin
tccaagggccattgtatggtgagattccagatgttggatggcaagaaggaggagtcctgacccggattggtcaacatcagggaaaccacagcccgtttagatggaagattgaaagttccgtcatgccgtgtgagcttcccacaaccgagatacagatacataatctccctgggaacgtatcaaactgtcggggcaccaggagcctctgccttctcttcggctgccaatttcagggacgaggaccgcagccaggtcagaagcacggtttgcaggggtgacagcttgtcacttgcagagttacgcagtctaagccacttcataaatgcaaggtgccgacgtgttggaaaggctggagtcccggggtggaaacacgtatgtcgggggccaggtgtgtccctgggggaacagcccacgcgtatcggatgccaggtctccgcccaccccggagccagctccgcttggactggccagcttgggtctgctctggagaggggacgtatggagaagctgctctggagaggggatatatggggaggctgctctggagaggggatgtatggagaggggacgtatggagaagctgctctggagaggggacgtatggggaggctgctctggagaggggacatatggagaggctgctctggagaggggatatatggggaggctgctctggagaggggacatatggagaggctgctctggagagggcatgtatggagaggctgctctggagagggacatacggagaaggtgctctagagaggggacgtatggagaaggtgctgtagagaggggatatatggagaggctgctctggagaggggacatatggggaggctgctctggagaggggatatatggggaggctgctctggagaggggatatatggggaggctgctctggagaggggacatatggagaggctgctctggagaggggacatatggagaggctgctctggagaggggacgtatggggaggctgctctggagaggggatatatggggaggctgttctggagaggggacgtatggagaggctgctctggagaggggatatatggggaggctgctctggagaggggacgtatggagaggctgctctggagagggcatgtatggagaggctgctctggagaggggacatatggagaggctgctctggagaggggatgtatggagaggggacgtatggagaagctgctctggagaggggacgtatggggaggctgctctggagaggggacatatggagaggctgctctggagaggggatatatggggaggctgctctggagaggggacatatggagaggctgctctggagagggcatgtatggagaggctgctctggagaggggacatatggagaggctgctctggagaggggacgtatggggaggctgctctggagaggggacgtatggggaggctgctctggagaggggatatatggggaggctgttctggagaggggacgtatggagaggctgctctggagaggggatgtatggagagaggggatgtatggagagaggggatttatggagaggtcccacaccaggctccatccaaggaagggagaagcattttcacccaggccctgtttacgcttcgccgcgctgtcctctgtcacgcaccgtggccgagaccacagctgaacgtccagaggctgcagagaaaaacagaagctggctctgtgtgtgtgtgtgtgtgtgtgtgtgt

SEQ ID NO: 41819 - DNA, 1474 bp, Artificial sequence
  DNA replication origin
gaactcttcatccccaagatgatgacgttaagaagtggggcctttggggggtgatgaggtcatgagagcggagccttctgaatgggattagtgcccttataaaagggatcctagagagctcacttgtcccttccaccgtgtgaggacacaccaagaagtcgccgtctatgaaacaggataggtaggtgggtggatggatgagtgaatggatggatggaagagtggacaaatggatggatgatggatgggtgagtgggtggattaattgttgtatagatggatagatggttggatggatagacggatgagcagatgaatggatggatgaatggatgagtggatgggtggatggaagagtggacagatggatgggtgagtgggtggattaatggttacatagatggctggatgggctgacggatgcatgatggataagcagatgagtggatggatgaatgaatgggtgaatggatggatgggtgggtgggtggatggaagagtggacagatggatgggtgagtgggtggactaaaggttgtatagatggctagatggacagatggatgagcagatgagtggatggatgaatggatggatgaatggatggagggatggatggatggatagatggatggaagtgtggacagacggatgggtgagtgggtggattaatgattgtatagatggctggatgggtagatggatgcatgatggatgagtagatgaatagacggatgaatggatgggtggatggatggatggaagagtggacagatggatgagtgagtgggtagattaatggttgtatagatggttggatggatagatggatgcatgatggatgagcagatgcgtggatggatggaatgatgggtggatgggtgtatgcatggatggatagatggatagctggatgagtggatggatggatgggtggattaatggttgtatagatggctggatgggtagatggatgtatgatggataagcagatgactggatggatggatgggtggatgggtgtatggatggatggatgggtggatggatagctggatgggtggatggatgggtgaattaatggatgatggatgatggatgagtgaatgggtagatgggtgggtggatagatgataaatgggaatgggtggatggatgggtggtagatagattgatgagtggatagatggatacatgatagatgggtggatgggtggatcaatgggcagatagatggatgagtggataggtgtatagatgggtgtaggggtagaggaatggattgatgatggatgggatgatggatggataatgaatgagtggatgggtggatggatgaatgggtgaatgagtggatggatgggtggatgagtggatcaatgggcaggtggatgagtggatgaaaggttagatgagtggatggatgggtgtatgagtagatagatggatgaatgatgaatgattggatagatgg

SEQ ID NO: 41820 - DNA, 1741 bp, Artificial sequence
  DNA replication origin
ccaacacggtgaaaccccatctctactaaaaatacaaaaattagccaggcgtggtggcaggtgcctgtaatcccagcactttgggggaccgaggtgggtggatcatctgaggtcaggagttcgagaccagcctgaccaacatggtgaaaccccgtctctactaaagaaatacaaaaattagtcaggcgtggtgacaggtgcctgtcatcccagctactcggggggctgaggcagaattgttgaacctgggaggcggtggttgtagagagccgaggtcactgcactccagcctgggcgatagagtgagactcagtgtcaaaaaaaaaaaaaaaattaaagatagagggagaaagaggagaaacaagaggaggaggaggctggaggaggagaaggaggaggaagagaaagaggaggaggtggaggaggagggagacagaggaggaggagggagtggttggaggaggagaaagagaaggatgaggaagagaaaaagaaggagggggaggaggaagaagaggaggaggggaaggaggagaaagaggaggagagggaggaagaggaggaggctggaggaggagaaaaaggagaaagagaaaaaggaggagggagaggaggaggggaaggaggagggagagaaagaggaggagagggaggaagaggaggaggctggaggaggaggaaaaggagaaagagaaaaaggaggagggagaggaggaggggaagggggagggagagaaagaggaggagagggaggaagaggaggaggctggaggaggaggaaaaggagaaagagaaaaaggaggagggagaggaggaggggaagggggagggagagaagtagaagcaggaagagtggggaaggaggaggttggagaaggtggaggaggaagaagagaaacaggaagaagaggaggaaaaaggggaggaggagggagaggaggaaagagaggaggaggggaaggaggaggaagagaaagaggaggagggggagaagcagggagaggaggaggaggaagagaaagaggaggagggagaggaggagggagaggaggaggaagagaaagaggagaagggagaggaggagggggaggaggagggagaggaggaggaggaagagaaagaggagaagggagaggaggaagagcctggaggaggaggaagagaaagaagaaaaggaagaggaggggaaagaagaggctggagaagatggaggaggaagaagagaaagaggaagaggagaggggagaggatgaggggaaggaggaggaagagaaagaggaggagggagaggaggaagaggctggagaggagaaggaggaagagaaagaggaggagggggaggaggggaaggaagaggttggagaaggtagaggaggaagaagcgaaagaaaaggagggggaggagagaggggaggagaaagaacaggaagaggagagggagaaggaggaacaagagaagggggaagaggggaggaggaaaagatgagaggaggagaaggaagcggaagagaaagagggagaggtggagaagggggaggaggaggggaaggaggaggaggaagaggaggaggagaagaaggtggaggagggagaaaagggaagaggggggcagagggtggagagggactcaggaaaacaggtccccctcacccccatcccaccgtaataaagacatgacgcctttttatgctgagaaaacatcaagctgtgtttctccttccccagagacacttcgcagccc

SEQ ID NO: 41821 - DNA, 1088 bp, Artificial sequence
  DNA replication origin
ctaatgaggcgcccgcgctgaccgcccaaggctgcctgttggggggccggggatgcgccccggtcatgccctgcgctcactggggaacttgacccgcggtggctgggaaggcggggagcgcagagcgcgcggggtctccaggcaggagcgtgcggggcagggatctgggggagggatttgggggaggtccgagtgcagccgggctaattggggagctcaggcgccggcccgggccggagtgcgggggagggggccccggggcgaggcaggggagggcggtttccacccgcagctcagcctcctggcccgaggcgaagcttggggcgagagacctgagctcgaccgggctggactctcgcccggagcccagctctgcgctctgcgcaccgccccgctcttctcccccgcagcgcacggggcagggggcgcacccggggtaggggtgggagcaagcgacagcccagccacccccacgcccccagccacgcaggataaaccacccgggcatgtctgcttctgcaggcgtgggcaggagagctactctgtgccactggctgagggtcccgggggatctgagcggacagctgtctgcactggtcactcagggagtctagctcagggcacttgtccgctcgccgcagctaagaaagccctgaggtgtgtggggagatactgcaggcaggggactgccctgggttcacttcattccttcatccattcattccttcatccattcatccattcatccattcatccattcatccattcatccatccattcatccattcatccattcatccatccattcatccatccattcatccattcatccatccattcatccatccatccatccattcatccatccattcatccatccatccatccattcatccatccattcatccattcagccatccattcatccattcatccattcattcatccattcatccatccatccatccattcatccatccattcatccattcatccatccattcatccatccattcatccattcagccatccattcatccattcatccattcattcattcatcctttcatccatccattcattcattc

SEQ ID NO: 41822 - DNA, 1003 bp, Artificial sequence
  DNA replication origin
aaaccgccctcccctgcctcgccccggggccccctcccccgcactccggcccgggccggcgcctgagctccccaattagcccggctgcactcggacctcccccaaatccctcccccagatccctgccccgcacgctcctgcctggagaccccgcgcgctctgcgctccccgccttcccagccaccgcgggtcaagttccccagtgagcgcagggcatgaccggggcgcatccccggccccccaacaggcagccttgggcggtcagcgcgggcgcctcattagtagggtgggatgaagggttccccggagagacgcaaggcgagcccccacccacccacccaccgaggccctgagcatggataagcgcccccagtccgggcaccgtgggggacccctagggtcgtggcctcgcgggctggtccaggagcgcccaggagcctggggcaggggtgggggtgggggttccaggaccggcacgtgggggccccagaacccctgcgctcacccgcggggtcgagctgtctctccagaagctgcgcttggtcaggacttgggccttgtccccgcggaagttctgttccaggccagcccccggaggcaggaggatggggaggaggcggccaggtctgcggcacaaattaggccattaattcctgcctgctcctagagaaggcaaagtttctgtcctggaatacgtttccaaagacacagcttctggaaggggaagggaaaggatggagaggctgcgcggtgctgattccacccgacaggcaatgctcgcgttccttggagtgggaggggtcggggcgatgagaaacctctgggggatcggggcaggtggacacgcgcgctcggagctgtccaaggcctggtctccccggcgatgaccctacccaagagtcaggtccccacctcagggaatcctcccgttccttggagttggggggatgggagcgatgggaaacctctgggggcttggggcaggtggataggcgcgctctgg

SEQ ID NO: 41823 - DNA, 2321 bp, Artificial sequence
  DNA replication origin
ccccgaaagtgagaagaaggggccgggtgtccccaaaccgggacgcgggcgcttgggaggcggcggcggcggaggccgaggatccccggggccgcctcccgggtctccagcgcccgcagaaagaagcccaggtccccgggagatccggttcgtaaagatctatattctttccgcccgcgccagatcccggcggaccccggcgcgaggcctcctcccttagcgccgcgctgtcaccctggcgtctggggtatttaccgggtgaaaaaaatacttgtgtttttggttttcatggtgggatgctcctgctcgctccctcccgcctctcgctattgaatgtgcttcaggggaagccggtgctcgccatcgcgacctgaaattcgttttccaagtcctggaaaccaaacgcgtcacggttcctgccaaggaccttctgcaaataaagtggggcaccaggaggcccggagtccccttcctcccgtaaccccacggcgcatcttcctccccggcggggcctggggacccaggatgacagctgagctgtgaacttgtgtgagatggcacagcagtggggggacatgagtgacggtgggttggggtgtgtgtaagacacagaaagagagagacagacagggagaggcagagagagaaacggagagacggggagatggagagagagagacagggagagagagagatggagagagagagagaaagagagagacaaggaaagacagagagaaagggagagacagagggatggagacagagaaagagacagagggggaaagacggagagagatggagagagagaaagagagacacagacagggagagacagagacatggagacagagagaaagagagtcaaggagagacagagagagatggagacagagaaagagacagacagggagagacggagagagatggagagagagaaacacagggagagacagagagagatggagagagagaaagagagacacagacagggagagagagggagagatagagagagagaaagagagacacagacagatggagagagagaaacagacagggagagacagagagagatggagagagagaaacacagggagagacagagagagatggagagagagaaagagagacacagacagggagagagagggagagacagagagagagaaagggagagacagagagatggagagagagaaacacacagggagagacagagagagatggagagagagaaagagagacacagacagggagagagagggagagacagagagagagaaagggagagacagagagatggagatagagaaacacacagggagagacagagagagatggagagagagaaacacagggagagacagagagagatggagagagagaaagagagacacagacagggagagagagggagagatagagagagaaaaagagagagacagacagatagagagagagaaacagacagggagagacagagagagatggagagagagaaagagagacacagacagatggagagagagaaacagacagggagagacagagagagatggagagagagaaacacagggagagacagagagagatggagagagagaaagagagacacagacagggagagagagggagagatagagagagaaagagagagacagacagatggagagagagaaacagacagggagagacagagagagatggagagagagaaacacagggagagacagagagagatggagagagagaaagagagacacagacagggagagagagggagagacagagagagagaaagggagagacagacagatggagagagagaaacagacagggagagacagagagagatggagagagagaaagagagagacaaggagagacagagaaagagatggagacagagaaagagagagacagggagagatggagagagagaaagggagagactgggagatggagagagagaaagagcgacacggacagggagagagagggagagagaaagagagaaacggagagacagagagatggagagagaaaaagagagacacagatagagatacagagagagacaaagagaggcagagacacagagagggagacagggagggggaagagaaagagggagagaggcagagacagacagagagggagattcggagaagggtctctggcttagagcaactttctgggtcctcagaggccgggtaacttttctgcttctaaaggcctccccatctctgcctctgctgggaaactgggtccccagggactgcgccgtaaacctctcacagctgctcactgtctcccta

SEQ ID NO: 41824 - DNA, 2576 bp, Artificial sequence
  DNA replication origin
agtcaggcacccccacctggcttgctgcctggttaagaagggcgcagatgcctgtgcctggataccagagatgggacagacacccattcccttttcatcaccacccccgagtgcccgagggcctggggcgtctgcctggcccctggcccctggcttgggctctgcacctctgagctggagacaccctactcagctccccacttactttggagtgagcagcgcttgggtgcccagcgtggatttggggcttccagggagtcggggttcggtcgcggagcccaagcttcccaagggcgcccccgccctgccctggcttagtggtggggatgggatggggggaagcggggagctgcgtggaaggaggtgaagggtcacaggaggagagagcgcagcgcccacgtgcgccctgcctgaacgcgcagcgcagcgcccggctgcggtgccccttgccccttcggtccctaatttgggggtcgggagtgcatgcgcgggcggaacgggcttggggggggggctctggcagggcggacgcgtggcctcccttcttcaccgttttattccaaggggacaggctggggattgtatttgggcgcgtgtttggctgagggtgcagggacttggggggtggcggtggggagcgcggaaggtataaacgtataaatcataagtaaacaactcagaaatggaccccgagcgctggtcgccgctagctctccagctctccctggcccaggcccgaaggagaggggtccgcatccctccgcggttctcctctcctgggtacctggccttgaggtgggggaacgagcctacttcttgtaccgtcttttgccgacggcgggacccagtgaaattaggccgttggagcccgcaggcctgcctggctttgcgcaccggagtcttggggacctggtgtccccgggaaaaacttggggacctggtatccccgggagaggcttggggacctggtgtcccgggagaggcttgggtacctggtttctctggaagaggcttggacacctggtgtcctgggagggcctttgggacctggtgtcctgggagaggcttggagatctgttgtcctgggagaggcttggggacctggtgtccctggagaggcttggggacctggtgaccttggagaggcttggagacctggtgttctgggagaggcttggggacctggtgttctgggagaggcttggggacctggtgtctctggaagaggcttggacacctggtgacccgggagggccttggggatctggtgtcccgggagagccttggggacctggtgtcctgggagaggcttggggacctggtgaccttggagaggcttggggacctggtgtcctgaaagagccttggggatctggtgtcccaggagaggcttggggacctggtgtctctggaagaggcttggacacctggtgtcctggggagaggcttggggacctggtgtcctgggagaggcttggggacctggtgtcctgggagaggcttggagatctggtgagccgggagaggcttggggacctggtgtcccgggagaggcttggggacttggtgtcccgggagaggcttggacacctggtgtcccaggagaggcttggggacctggtgaccttggagaggcctggggacctggtgacccgggagagccttggggacctggtgtcctggggagagccttggggacctggtgaccttggagaggcttggggacctggtgtctcgggagtgccttggggacctagtgacccgggagaggcttggggacctggtgtcccgggagaggcttggggacctggtgtcctgggagagccttggggatctggtgtcctggggagaggctgggggacctggtgtctcgggagagagccttggggacctggtgacccgggagaggcttggacacctggtgtcccgggagaggcttggggacctggtgacccgggagagccttggggacctggtgtcctggggagaggctgggggacctggtgtctcgggagagagccttggggacctggtgacccgggagaggcttggacacctggtgtcccgggagaggcttgggagcctggtgtcccgggagagccttggggaccaggtgaccttggagaggcttggggacctggtgatcttggagaggcttggggacctggtgtctcgggagagccttggtgacctggggacccgggagaggcttggggacctggtgtccccgggagaggttacgggggctggttgggggagagaacgttgtgagccaaagtccctgaatccctgcgaagagagcgcatcgggagctccccctgagggcgttccatttgtggacccccctcccatgcgctttgcagggagctgttcggattcccctggcccggctcccgcggatgcatccagtggcagcgccaattctgggccagggggaaggaggaaaggcgggtgtggggtggtctccacggctggagaaggggcgacgctccctaggggagaagaggcacgttggaggtttccgggggcgcggggcggagcaggccccccagtccccatcctgcgccctcaccccg

SEQ ID NO: 41825 - DNA, 1289 bp, Artificial sequence
  DNA replication origin
agggatgacagaaaagtagggaacccagagctcgtaacaattgagcaacatactcgtccctaaaatcaggcgagcacgcaccaactcctatacacagttactgctggatctctgcctgtccacctgagctcctgccaatagccgggcattgcacagggtccagggcctggtaggatgggcccgggatgggtcaggccagaggtgggtttcttccagaaagcagaattggaggaacgtttcttggacaccttttttcttggattacaaatagagacatgagagccccaaagggaagaatttcattactagagaacagtggcatggaattcacgccagggaggagccctctggacatgagggaggatcccttggtttatgagggaggagctctgggtcctcccagggaggagggaggatcccttggttgatgagagaggagctcttagtccatccagggaggatggaggatcccttggtttatgagggaggagctctcagcccatccagggaggagggaggatcccttggtttatgagggaggagctctcagtccatccagggaggagggaggatccgttggtttatgagggaggagctctcagcccatccagggaggagggaggatcccttggtttatgagggaggagctctcagcccattcagggaggagggaggatcccttggtttatgagggaggagctctcagtccatccagggaggagggaaggatcccttggtttatgagggaggagctctcagcccatccagggaggagggaggatcccttggtttatgagggaggagctctcagcccatccagggaggagggaaggaaccctcgtgggattgtttgttttatgcgcctacttggctgggccacggcacccagatacatggtgacatgttattctgaaggtttctgtgagggcttttgctctatctctatctagctctacctctatctctctctatctggactacaggcacccaccataatgcccagctaatttttttgtatttttagtagagatggggtttcaccatattggccaggctggtctcgaactcctgacctcaggtggtccaaccaactcaacctcccaaggtgccgggattacaggcatgagccaccgtgcctggcccagagcacgtttttaaatataagagcacaaagcgctttgggagactgaggagggtggattgcctgaggtcaggagctcgagaccagcctgtcgaacatggtgaaaccccgtttctactaaaaatacaaaaaaaaattagctggccat

SEQ ID NO: 41826 - DNA, 2239 bp, Artificial sequence
  DNA replication origin
ggctctgtcacccaggctggagtgcagtggcgtgatctcgactcactgcaagctccgcctcccaggttcacaccattctcctgcctcagcctcccgagtagctgggacgacaggtgcccgccaccacgcctggctaacttttttgtatttttagtggagacggcgtttcactgtgttagccaggatggtctcgatctcctgaccttgtgattcacccccttggcctcccaaagtgctgggattacaggcgcgagccactgcgcctggccgagcatggctcttaattatttcagatgacacgtgtcatggagaaggcatcaaagctgatgaaatcacccttatcttccatttctttcccaaagatatgtagcttcccacaatgtaccacccctggaagtccataattttttttccctttgcctaggtaatcctccaggaattcatcatcctttgttaagatggtatataaaaccctgcttatgtaccatcaggtgttcagacctcaggtggggagggtacctgtaggtggtgaggtgttcagatctcgggtggggagggtcactgcaggtggtcaggtggtcagatcttgggtggggagggtctctgcaggtggtcaggtgtttagatctcaggtggggagggtctctgcaggtggtcaggtgtttagatctcaggtggggagggtccctgcaggtggtcaggtgtttagatctcaggtggggagggtccctgcaggtggtcagttgtttagatctcaggtggggagggtccctgcaggtggtcaggtgttcagatctcaggtggggagggtcactgcaggtggtcaggtgttcagatctcaggtggggagggtccctgcaggtggtcagttgtttagatctcaggtggggagggtctctgcaggtggtcaggtgttcagatctcaggtggggagggtccctgcaggtggtcaggtgtttagatctcaggtggggagggtcactgcaggtggtcaggtgttcagatctcaggtgggggagggtcactgcaggtggtcagttgtttagatctcaggtggggagggtctctgcaggtggtcaggtgtttagatctcaggtggggagggtccctgcaggtggtcaggtgtttagatctcaggtggggagggtcactgcaggtggtcagttgtttagatctcaggtggggagggtctctgcaggtggtcaggtggtcagatctcaggtgggggagggtcactgcaggtggtgaggtggtcagatctcaggtggggacggtcactgcagttggtgaggtgttcagatctcaggtggggagggtcctgcaggtggtcagttgttcagaacttgggtgcaggacaggttactccagtaccacctggctacttcttagccccagctcctggatcacaggtagatgctggcacctgtcctgtgacctcgcagtacaaaaaggaagaaggaatttgacggttttgactggtcctgacagatcccagcctcaggccaggccgacctccctcaatccacctttgcaaccaggttcaagagcagagaggcagctcttagctgacttcccacaatggcagaatcaattgtggatgctgcagcaattttctgccctacaaagatcaacgatatccaccctttctcttctcaaccttctcccagacccaaaaatccagactccaaaaaatatccttctctacatgagcacattcctttgaaacagagacaccaagtagggaggctgaaccatttttatggatcacagggaacctcgaaccagaggaagacaaaagcatttttgtctctaaacagcttggtggtttctcaaaaggctaaacatgaagctaccctaaagccggccattcaactcctgggtacgtaccaaaaagaactgaaaacggatgttcaaacaaaaacctagacacaaatgttcatagcagcatgactcacaatgacccaaagctggaaacaacccaggagtccattggcagttgaacgggtaaacagaatatggtccatccagacagtggaatattatacagccatgaaaaagaacaaagctctgacactggctgaagtgtggaagaaccttgaagacatcatgctcagtgacagaaatcggacatcaaaggacaaatattggaggattccattacataaacgtgtccagaagaggcaaatccagagagacagaaagcacattgtgcagaatcatgccatgtggtgtcaaaaac

SEQ ID NO: 41827 - DNA, 1464 bp, Artificial sequence
  DNA replication origin
gttcctgcaaaggatatgagctcatccttttttatggctgcatagtattccacgcatatgtggcacattttctttaagggtgcaagttgggagaagggaaaggatcagaaaaaataacttactgggtacaaagcttagtacctgggtgacaaaataatctgtacaacaaactcctatgacacaagtttacctatataacaaacccacacaggtacccctggacctaaaataaaagtgtttttggtttttggtttgtttgtttgtttttgttgtgtttgtttgtttgtttgagacagagtctctgcctctgtcactcaggccagagtacagtggtgcaatcttggctcactgcaacctccacctcccagaaaaagaaagcaaacacggcatgcagcatcagctttctagaagacgctggagcttctggtgggtggaccatgctggagcttctggtgggtagacctggtggagcttctggtgggtaaataatgctggagcttctggtgagtagaccagggtggagcttctggtgggtaaattatgctggagcttctggtgggtaaatcatgctggagcttctggtgggtggaccatgctggggcttctggtggctaaataatgctgaagcttctggtgggtggaccatggtggagcttctggtgggtgaaccatgctggagcttctggtgggtaaatcatgctggagcctctggtgggtaaatcatgctggaccctctggtggataaatcatgctggagcttctggtaggtggactatggtggagcttctggtggatggatcatgctggagcttctggtgagtagaccatggtgggagattctggggggtaaattatgctggagcttctggtgggtggaccatagtggagcttctgatgggtggaccatgctgaagcttctggtgggtggaccatggtggagcttctgatgggtggaccatggtggagcttctggggggtaaattatgctggagcttctggtgggtggaccatggtggagcttctggggggtaaattatgctggagcttctggtgggtggactatggtggagcttctggtggatggaccatgctggagcttctggtgagtagaccatggtgggagcttctggggggtaaattatgctggagcttctggtgggtggaccatagtggagcttctgatgggtggaccatgctggagcttctggtgggtggaccatagtggagcttctggggggtaaattatgctggagcttctggtgggtggaccatggtggagcttctggtgggtggatcatgctggagcttctggggggtggatcatgctggagcttctggtgggtaaatcattctggagcctctggtgggtggggtatccacacaactgtggatgcccatagatagtgcggacttcaccccatgttccagaaacctgcaaagaggcaaggaggccacgcgccccat

SEQ ID NO: 41828 - DNA, 1015 bp, Artificial sequence
  DNA replication origin
gcggaggtgcagatgtcactgcagggacagggacagggggaggtacagatgtcactgcaggtacagggacaggtggaggtgcagatgtcactgcaaggacagggacggggaggtgcagatgtcactgcagggacagggacaggtggaggtgcagatgtcactgcagggacagggacaggtggaggtgcagatgtcactgcagggacagggacaggtgtgggtgcagatgtcactgcagggacagggacaggtgtgggtgcagatgtcactgcagggacagggacaggtgtgggtgcagatgtcactgcagggacagggacaggtgtgggtgcagatgtcactgcagggacagggacaggtgtgggtgcagatgtcactgcagggacagggacagggggaggtgcagatgtcactgcaggtacagggacagatggaggtgcagatgtcactgcagggacagggacagggggaggtgcagatgtcactgcaggtacagggacagggggaggtgcagatgtcactgcagggacagggacaggtggaggtgcagatgtcactgcagggacagggacaggtgtgggtgcagatgtcactgcagggacagggacagggggaggtgcagatgtcactgcagggacagggacagggggaggtgcagatgtcactgcaggtacagggacagggggaggtgcagatgtcactgcagggacagggacaggtgtgggtgcagatgtcactgcaggtacagggacagatggaggtgcagatgtcactgcagggacagggacaggtgggggtgcagatgtcactgcagggacagggacagggggaggtgcagatgtcactgcagggacagggacaggtgtgggtgcagatgtcactgcaggtacagggacagatggaggtgcagatgtcactgcagggacagggacagggggaggtgcagatgtcactgcaggtacagggacagggggaggtgcagatgtcactgcagggacagggacaggtgtgggtg

SEQ ID NO: 41829 - DNA, 1866 bp, Artificial sequence
  DNA replication origin
aaaaaatacaaaaaaatttagctgggcgtggtggcgggtgcctgtagtctcagctactcgggaggctggggcaggagaatcgcttgaacccgggaggcggaggttgcagtgagccgagatggtgccactgccctccaacctcggagacagagcgagactcgtctcaaaaaaataaaaagaaaaaagaaaaatcccattttgtcgtaattttgtaattaagatgcgagacttcctaccaagcctcctgaaagcagaaaatcacgtttcttggaatgtctgatatgcattttgcaccttaaatttttgagttatataaaaagtctaatttgtagatgacgacaagcatttatgggggacctggtctctgccgggtgtcataccaggggctgaaggatgatccgctggggggtccctactgctcagcctgggtccctgtgtttaccagactgacgggttccccatatcctataccagggggtccagaaagatggatatttgtgtggtatgcattatatgtgtgtgtttgtgtcagtgtgtggtgtgtgtgtatctatgggtgtagtgtctgtggtgtgtctagtacctgtgtgagttatgcataatttgcattagtgagcgtgtggaataagtgtgtgctgtgtgtgagtgtggtgtgtatacatgtctgtgcagtgtatgtgtgtatggtgtgtagtggtgtgtatttgtgtgtggtatgatatgtgtgtttgtgtgagtgtgtggtatgtgtgtagtcatgtatgcattatctgtgactttgcattagtgtgtctggtgtgtattcgtgtgcggtgtgatacgtgtgtttctgtgtttgtgttagtgtgtggtatgtgtgtagttatgtgtgagttatgtgtgacttcgcattagtgtgtggtatatgtgtggtgtgtgtgactgtggtgtgtatacttgtgtgtgcagtgtaagtctggtgtgtactggtgtgtattcgtgtgtggtgtgatgtgtgtgtgttagtgtgtggtatgtgtgtagttatgtatgtgttatgtgtgactttgcattagtgagtgtgtggtatatatgtgtgtagtgtgtgctgtgtatacatgtgtgtgcagtgtatgtctgtatggtgtgtactggtgtgtattcgtgtgtggtgtgatatgtgtgtttgtgtgtttgtgttagtgagtggtatgtgtgtggtgtatgtgagtgtgtggtgtatatacacatgtgtgcagtgtgtgtgcatgctgtgtaatggtgtgtattcatgtgtgactgcattaacgagtgtgtggaatatttgtgtggtgtgtgcgagtgcatggtgtatatacatatgtgtgcattgcatgtatgttgtgcatcggtgtgtatacatgtgtgtgcaatgtatgtgtgtatagtgtgtatacatgtgtggtgtgatgtgtgtgcttgtgtgtttgtgtcagtgagtgcgtggtgtatgtgcagtatctgtataagttacgtgtcactttgcattagtgagtgtgtggtatacgtgtgtggtgtgtatatatatgtgtgcactgcatgtgtgtatggtgtgtattggtgtgtattcgtgtgtggtgtgatgtgtgtgtttgtgttagcgactgtgtggtgtgtaccccatttccacccttccccgggagttggggaaggcatttgcagctgtcttcccacctctggctgaatcctcctctcgtgtcattttctttccaatgaaatggttcttacagacaacctgtggagaaggcgaaggcatggacctgagtgtgcaaacgtggaggaggtatatgcttacccacacctgtccctgtccctgcagtgacatctgcacccacacctgtccctgtc

SEQ ID NO: 41830 - DNA, 2331 bp, Artificial sequence
  DNA replication origin
aattttatactatctcttcccttctcatttgctcagaaaaatttgcaatgctgatgtcatccgtgtcctgtttagatacacttttccattaccaatcttttattaccaggataccacgaggctataaataatctctcaagcaggtataatccaccctaataaagacgggaaggacggccaagctatcctgtgatattgtatttcaattacttcactaacctaattatctctgctgctctgggcccaaacagcctccgaggactcatttcctgtgtgttgtatatgtttacgatacttaaaaatggagaaaattcctgtcgctttaatgaaaaatcccctgcgcacctgtttgtctttgtagctggagtctccccagtgccttggagacgatgcggttttctgttttttttttgtttgtttttttttttgttttttttttttgagtaggagtctcgctctgtggcccaggggtgctggaacatggtaaatagtctcagctcctcgggactttacttggtgagtctgtggtcattttgtgtgtgtgtgtgtgtgtgtgtgtgtgtgtgtgtttgagacggagtctcgctctgtggcccaggggtgctggaacatggtaaatagtctcagctcctcgggactttacttggtgagtctgtggtcattttgtgtgtgtgtgtgtgtgtgtgtgtgtgtgtgtgtgagacggagtctcgctctgtggcccaggggtgctggaacatggtaaatagtctcagctcctcgggactttacttggtgagtctatggtcattttgtgtgtgtgtgtgtgtgtgtgtgtgtgtgtgtgtgtgtgtgtgtgtttgagacggagtctcgctctgtggcccaggggtgctggaacatggtaaatactctcagctactcgggactttacttggtgagtctgtggtcattttgtgtgtgtgtgtgtgtgtgtgtgtgtgtgtgtgtgtgtgtgagacggagtctcgctctgtggcccaggggtgctggaacatggtaaatactctcagctcctcgggactttacttggtgagtctgtggtcattttgtgtgtgtgtgtgtgtgtgtgtgtgtgtgtgtgtgtgtgtgtgagacggagtctcgctctgtggcccaggggtgctggaacatggtaaatagtctcagctcctcgggactttacttggtgagtctatggtcattttgtgtgtgtgtgtgtgtgtgtgtgtttgagacggagtctcgctctgtggcccaggggtgctggaacatggtaaatactctcagctactcgggactttacttggtgagtctgtggtcattttgtgtgtgtgtgtgtgtgtgtgtttgagacggagtctcgctctgtggcccaggggtgctggaacatggtaaatagtctcagctcctcgggactttacttggtgagtctatggtcattgtgtgtgtatgtgtgtgtgtgtgtgtgtgtgtgtgtgtgtgtgagacggagtctcgctctgtggcccaggggtgctggaacatggtaaatactctcagctactcgggactttacttggtgagtctatggtcattttgtgtgtgtgtgtgtgtgtgtgtttgagacggagtctcgctctgtggcccaggggtgctggaacatggtaaatagtctcagctcctcgggactttacttggtgagtctatggtcattgtgtgtgtgtgtgtgtgtgtgtgtgtgtgtgtgtgtgtgtgtttgagacggagtctcgctctgtggcccaggggtgctggaacatggtaaatagtctcagctactcgggaggcggaggtgggagaatcaattgagtctagggcgtggaggctgcagtgagtcatgattgtgccactggactccagcctgtgggtgagacagtgagatctcgtctcttacatacacacacaaacacacacgctcaacaattatccaccaaccaagccctatatacctgatttgagctatttaggaatcacaaactctgaatcacacactttacttggtgagtctatggtcattttgtgtgtgtgtgtgtgtgtgtgtgtgtgtgtgtgtgtgtgtttgagacggagtctcgctctgtggcccaggggtgctggaacatggtaaatagtctcagctacttgggaggcggaggtgggagaatcaattgagtctagggggtggaggctgcagtgagtcatgattgtgccactggactccagcctgggtgagacagtgagtcccggtctcttacatacacacacaaacacacacactcaacaattatccaccaaccaagccctatatgcttgatttgagcaatttaggagtca

SEQ ID NO: 41831 - DNA, 1263 bp, Artificial sequence
  DNA replication origin
ggcggggggctgacccccccacctccctcccggacggggcggctggccggggagggggctgtcccccccacctccctccccgacggggcggctggccgggcagggggctgtcccccccacctccctccccgacggggcggctggccgggcgggggctgacccccccccacctccctcccggacggggcggctggccgggcggggggctgacccccccacctccctcccggacggggcgactggccgggcgggggctgacccccccacctccctcccggacggggcgactggccgggcgggggctgacccccccccacctccctccccgacggggcggctggccgggcagggggctgacccccccacctccctcccggacggggcgactggccgggcgggggctgacccccccacctccctcccggacggggtggctggccgggcggggggctgaccccccacctccctcccggacggggtggctgccgggcggagacgctcctcacttcccagatggggtggctgccgggcggagaggctcctcacttctcagatggggtggttgccaggcagagggtctcctcacttctcagacggggcggccgggcagagacgctcctcacatcccagacggggtctcggccgggcagaggcgctcctctcatcccagatggggcggcggggcagaggcgctccccacatctcagacgatgggcggccgggcagagacgctcctcacttcctagatgtgatggcggccgggaagaggcgctcctcacttcctagatgggatggcagccgggcggagacgctcctcactttccagactgggcagccaggcagaggggctcctcacatcccagacgatgggcggccaggcagagacactcctcacttcccagatggggtggcagccgggcagaggctgcaatctcagcactttgggaggccaaggcaggcggctgggaggtggaggttgtagcgagccgagatcatgccactgcactccagcctgggcaccattgagcactgagtgaacgagactcccaagctattttcttaaaggaaaaatatggccgggcggggtggctcacacctgtaatcccagcactttgggaggccgaggcagacggatcacttgaggtcaggagttcgacaccagcctggccagcatggtgaaaccccatctcttctaaaaatacaaaaattagccaggtgtggtggcgggggcctatcattccagctactagggaggctggggca

SEQ ID NO: 41832 - DNA, 939 bp, Artificial sequence
  DNA replication origin
gcccggccagccgccccgtcggggagggaggtgggggggacagccccctccccggccagccgccccgtccgggagggaggtgggggggtcagccccccgcccggccagccgccccgtccgggaggtgaggggcgcctctgcccggccgcccctactgggaagtgaggagcccctctgcccggccagccgccccgtccgggagggaggtggggggggtcagtcccccgcccggccagccgccccgtccgggaagtgaggggcgcctctgcccggccgcccctactgggaagtgaggagcccctctgcccggccagccgccctgtccgggagggaggtggggggggtcagtcccccgcccggccagccgccccgtccgggaagtgaggggcgcctctgcccggccgcccctactgggaagtgaggcgcccctctgcccggccagccgccccgtccgggaggtgaggggcgcctctgcccggccgcccctactgggaagtgagcccctctgccctctgggcccgtctgggaggtgtgcccaacagctcattgagaacgggccatgatgacgatggcggttttgtggaatagaaaggggggaaagggggaaaagattgagaaatcagatggttgtcgtgtctgtgtagaaagaggtagacatgggagacttttcattttgttctgcactaagaaaaattcttctgccttgggatcctgttgatctgtgaccttaccccccaaccctgtgctctctgaaacatgtgctgtgtccactcagggttgaatggattgagggtggtgcaagatgtgctttgttaaacagatgcttgaaggcagcatgctcgttaagagtcatcaccaatccctaatctcaagtacccagggacacaaacactgcggaaggccgcagggtcctctgcctaggaaaaccagagacctttg

SEQ ID NO: 41833 - DNA, 1178 bp, Artificial sequence
  DNA replication origin
ggagaagtggctcacgcctgtcatcccagcacgttgggaggccgaggcgggtggatcacctgaggtcaggagttcgagaccagcctgaccaacacagtgaaaccccatctctactaaaaatacaaaaatcagccgggcgtgctggcatgtgcctgtaatcccagctactcgggaggctgaggcagaagaatcgcttgaacctggaaggtggaggttacagtgagccaagattacaccactgcactccagcctggtgacaaagcgagactccatctcaaaaaaaaaagaaaagaaaaagaaaagacaagacaagacatccataaagatccctgaattgcctaggaccactgaacagtcggccacggccccatcccagaggatcacggccccagcctcgcggagttcgccggctgagtggggtctctggagcatggtggagatttggggtgagtgaaggcctctgcaggaggggtgatttggggtgagtggggggtctctctctgagggatggagatttggggtgagcaggggtctctgtgagcgatagagatttggggtgagtggggtctctctctgagggatggagatttggggtgagtgtggatctctctgagggatggagatttggggtaagtgggggggtccctgagggatagagatttggggtgaatgggggtctctctgagggatggagatttggggtgagcgggggtctctgtgagggatagagatttggggtgagtggggtctctctctgagggatggagatttggggtgagcgggggtctctgtgagggatagagatttggggtgagtggggtctctctctgagggatggagatttggggtaagtgggggggtccctgagggatagagatttggggtgaatgggggtctctctgagggatggagatttggggtgagtgttggtctctctctgagggatggagatttggggtgagtgggggtctctctctgagggatggagatttggggtgaagaccatccatggggtgacgatcagaaatgcagtaacctcatcacattttctctcctgcattttttcctggaactgtgggccgggcgcggtgtctcatgcccgtaatcccgacagtttgggaggccaagacaggcggatcacttgaggtcaggagtttgagaccagcctggctaacacg

SEQ ID NO: 41834 - DNA, 904 bp, Artificial sequence
  DNA replication origin
tactacccacccgttgagttgaggggtgaagagaagagaagagaggagaggggaggggagaggaggggagaggaggggaggggaggggaggataggggaggggaggataggggaggggaagataggggaggggaggataggggaggggaggggaggataggggaggggaggataggggaggggaggataggggaggggaggggaggggaggggaggggagaagagaagagaggagaagagaggacaagagcctgtactacccacccgttgacttgagggggaaagggaggggaggggaatggaggggagaggaggagaggggaggggaggggaatggaggggggagaagaaaagaaaagagaagaggacagcctgtattacccactcgtagagttgaggggggaggggaggggaggggaggggagactagacgagaggaggggagaggagaggagacgagaggagaggagaggagacagcctgtactacccaccccttgagttgaggggtgccggaaaaccccggacttttcttgtggaggtggaggggagggattccagggttagtcacagctgtcacttttctgcttcttgtttctggcagggttcactgtcctgggtgcttgattcgttactagcgatccggagaagaaagggttaaaggaatccctcccccacccctggaatccctcccccacccctggaattccaaaggcgcagccaggctcggatttccacgcgggcggtactgaattaacggctgggccccggcgcctttcttttaactaattacatctgcaagggccttaattccaaacgaggcgtcattcccggagaccagaggcgtttggaactcaacgtatatactttggggccgcgatcgaggcgcgtctcccgtcttctgc

SEQ ID NO: 41835 - DNA, 998 bp, Artificial sequence
  DNA replication origin
ggtggtacagggtctcctcctgtctacactgggtccaagtggaggtggggcagctaccatgtacaggagagatacccactggggcaggggttccagggtgggaggtggggatgggcttggtgggcaggagtcacacttctgtgagagtcctaagcctgaagaggctgggaacgtccaacgggatgaaggagtccacgggtgggatgcggtgggcttgggaagaggagagcgtgtgggcatatgggactggctccaagaggccagccaggagcagggcactgggacacgaagaggtgctggtgaggaagaaatgaagaaaaagaggaaggaaggaggaaatgagtgaaggagaaggaaggagaggaagaaggaaggaatgaagaagggagggagagagggagggagggaaggaagaagggagggaaggaggaaggaaggaaggaaaggagggagggagggaaggaaggaaggaaggaagaaaaaagaagaaaggcagaaaggcagggaggaaggaaagaaggaaggaggtaaagagggaggtcaggtgcagtggctgacgcctgtaatcccagcactttgggaggctgaggcaggtggatcatctgaggtcaggagttcgagactagcccggccaagatggtgaaacactgcctctactaaaaatacaaaaattagccgagcgtggtggtgtgcacctgtaatccaagctactaaggagactaagacagaagaatcgcttgaacctgggaggcagaggttgcagtgagctgagattgcaccactgcactccagcctgggtgacagagcgagactctatctcaaaaaaaggaaagttaaatcagctcagttctaatttgttacagcaccaaagttacacagatttttgtttgtttgtttttgagacagagtcttgctctgtcgctcaagctggagtgcagtggcacaatctcacctcattgcaacgtccgcctcctaggtttgagtgattctcctcagcc

SEQ ID NO: 41836 - DNA, 3892 bp, Artificial sequence
  DNA replication origin
taatctccttagacagtcactagaatatattcttaacccacgtagaggaaagaggaataaaatgggaaaatcagtagaacaggctgagcataaatattccaaccattgggacacgaaggttgaggccaagagcagaccctgcccagtgagaactatgagggggccctcacccgtgtgagatctgcatcctctggttcaggatccaccgtgtccacccctgggccacactggcactaagagtcccataaaccaagactgtagggttcgtggagactgtagggtgacgctagggttgtgagtggttcaactgtatgtcgggcagagtattctcctgtctacactggatccaggtagacgtggggcaggctctccttcttgtctacactgggtctagggggaggtgaggtggggtctcctcctgatcacactgggtctaggcagacataggtcgtgggtaggggactatagggttacactgggggtcatgtggggttacactaggggtcgtgagtaggggactgtagggttccaccagaggtcatgggtaggagagtgtaggggtcgtgagtaggggactgtagggttccaccaggggtcatgggtaggagagtgtaggggtcgtgagtaggggactgtagggttccaccagaggtcatgggtaggggactgtagggttccaccgggggttgtgagtaggggattgtagggtcacactacggctcctgaataggggactgtagggttactccaggggtcatgagtaggagactgtaggggtcgtgagtaggggactgtagggttctgccaggggtcatgggtaggagagtgtaggggtcgtgagtaggggactgtagggttctgccaggggtcatgggtaggagactgtaggggtcgtgagtaggggactgtagggttccgccaggggtcatgggtaggagagtgtaggggtcgtgagtaggggactgtagggttccaccagaggtcatgggtaggagagtgtaggggtcgtgagtaggggactgtagggttccaccaggggtcatgggtaggagagtgtaggggtcgtgagtaggggactgtagggttccaccagaggtcatgggtaggggactgtagggttccaccgggggttgtgagtaggggattgtagggtcacactacggctcctgaataggggactgtagggttactccaggggtcatgagtaggagactgtaggggtcgtgagtaggggactgtagggttctgccaggggtcatgggtaggagagtgtaggggtcgtgagtaggggactgtagggttctgccaggggtcatgggtaggagactgtaggggtcgtgagtaggggactgtagggttccgccaggggtcatgggtaggagagtgtaggggtcgtgagtaggggactgtagggttccaccaggggtcatgggtaggggactgtagggttccaccgggggttgtgagtaggggattgtagggtcacactacggctcctgaataggggactgtagggttactccaggggtcatgagtaggagactgtaggggtcgtgagtaggggactgtagggttactccaggggtcatgagtaggagactgtaggggtcgtgagtaggggactgtagggttcctccaggggtcatgggtaggagactgtaggggtcgtgagtaggggactgtagggttccgccaggggtcatgggtaggagactgtaggggtcgtgagtaggggactgtacggttccgccaggggttatgggtaggagagtgtaggggtcgtgagtaggggactgtagggttctgccaggggtcatgggtaggagactgtacgggtcgtgagtaggggactgtagggttccgccaggggtcatgggtaggagactgtaggggtcgtgagtaggggactgtacagttccgccaggggtcatgggtaggagactgtaggggtcgtgagtaggggactgtagggttcctccaggggtcatgggtaggagactgtaggggtcgtgagtaggggactgtagggttccgccaggggtcatgtgtaggagactgtaggggtcgtgagtaggggactgtagggttccgccaggggtcatgggtaggagagtgtaggggtcgtgagtaggggactgtagggttccgccaggggtcatgggtaggaaagtgtaggggtcgtgagtaggggactgtagggttccgccaggggtcttgggtaggagagtgtaggggtcgtgagtaggggactgtacggttccgccaggggtcatgggtaggagactgtaggggtcgtgagtaggggactgtacggttccgccaggggtcatgggtaggagagtgtaggggtcgtgagtaggggactgtagggttctgccaggggtcatgggtaggagactgtacgggtcgtgagtaggggactgtagggttccgccaggggtcatgggtaggagactgtaggggtcgtgagtaggggactgtacagttccgccaggggtcatgggtaggagactgtaggggtcgtgagtaggggactgtagggttcctccaggggtcatgggtaggagactgtaggggtcgtgagtaggggactgtagggttccgccaggggtcatgggtaggagagtgtaggggtcgtgagtaggggactgtacagttccgccaggggtcatgggtaggagactgtaggggtcgtgagtaggggactgtacagttccgccaggggtcatgggtaggagactgtaggggtcgtgagtaggggactgtacggttctgccaggggtcatgggtaggagagtgtaggggtcgtgagtaggggactgtagggttctgccaggggtcatgggtaggagactgtacgggtcgtgagtaggggactgtagggttccgccaggggtcatgggtaggagagtgtaggggtcgtgagtaggggactgtacagttccgccaggggtcatgggtaggagactgtagggttacactaggggttgtgagtaggggagtgtagggttccgccagaggtcatggatagggaactgtatggttagttacactaggtgtagtgactaggggactgtagggttactccaggggtcatgggtaggggactgtaggtttatgctaggtgtggtgagtaggggattgtagggttatgccagggctcatgggtaggggactgtatggttacgctaggggtcatgaatagggaactgtaggcgtcgtgagtaggagactgtaggattactccgggggtcgtgagtaggggactgtagagttacactagatgtggtgagtaggggactgtagggttacgctggaggtcatcggtaggggactgtaggggtcatgagtaggggactgtagagttacattaggtgtggtgagtaggggactgtaggattaagctaggtggacgtggggcagggtctcttcctgtctacacggggtccaggtggttgtgggacaagagctcctcctgtctatactgggtctctgtggaggtggggcagggtctcctcctccttacactaggtgtggtgagtaggggactgtagggttacgctggaggtcgtcagtaggggactgtaggggtcatgagtaggggactgtagagttacactaggtgtggtgagtaggggaccgtagggttacgctggaggtcgtcggtaggggactgtaggggtcatgagtaggggactgtagagttacactaggtgtggtgagtaggggaccgtagggttacgctgagggttgtcagtagggtctgtggtttcacttaccagtaggttttccgtgccaggctgggtattctagaaacaaaacaaaacacaacacaaggctcactgtttccatttctaaaacactgtagatggttcacacagtgtctcccctg

SEQ ID NO: 41837 - DNA, 1037 bp, Artificial sequence
  DNA replication origin
ccctgatctcacgcaggtgaccgatgaccctcccccccacagtgtgactcccacctgcatgcatcttataaacagtcttctccagtttaggcatgcaaaggattgaatgtctgcattgctcttcctttggtgcagtgtggttgggcaggtgcagtggggttgggcaggtgcagtgcgattgggcaggcacagtggggttgggcaggcacagaggggttgggcaagtgcagtgcggttgggcaggtgaagtggggttgagcaggttcagtgtggttgggcaggtgcagtgcggttgggcaggtgcagtgggattgggcaggtgcagtgcggttgggcaggcacagtggggttgggcaggtgcagtgggattgggcaggtgcagtgggattgggcaggtgcagtgggattgggcaggtgcagtgggattgggcaggtgcagtgcgattgggcaggcacagtggggttgggcaggcacagaggggttgggcaagtgcagtgcagttgggcaggtgaagtggggttgagcaggttcagtgtggttgggcaggtgcagtggggttgggcaggtgcagtggggttgggcaggtgcagtgggattgggcaggtgcagtgggattgggcaggtgcagtgggattgggcaggtgcagtgcggttgggcaggcacagtggggttgggtaggtgcattggggttgggcaggtgcagtgcaattgggcaagtgcagtgcggttgggcaggtgcagtacggttaggcaggtgcagtgtggttgggcaggcacagagtggttgggcagatgcagtggggttgggcaggcgcagtggggttgggcaggtgcagtgtggttgggcaggcacagagtggttgggcagatgcagtggggttgggcaggcgcagtggggttgggcaggtgcagtggggttgggcaggtgcagtggggttgggcaggtgcagtgcggttctgcaaaagctccctctcagccaatattgacagcctctgcccacccattccttggagagggtccgtaggtgccaaaga

SEQ ID NO: 41838 - DNA, 1022 bp, Artificial sequence
  DNA replication origin
agaaggagcgggaggagaggaggaggaggaggaggagaatgggcagggaggaggagagggaagaaaaggagggggaggaggaaggagggggaggagggtggagggggaggagggtggagggggaggagggtggagggggaggaggaaggagggagaaggaggggagaggatggaggaagaggagcaggagggggaggaaaaaggaggaggggcaggaggggaggaggagaaaggagagtggaggaggagggtgacaaggagaatggggaggagagaggagtggtagaaaaaggagagagaggaagagtaggagcggagggggaggaggggaggggaggggaggggagaaagaccaggagggtaggaggagggggaggaggaggagggggccagggctggacttccttccaggggcccaggggagacccagccaggcagccggacacacagggctgggctggtagtcgggtcacacctgaggatgtggaagtgcctggggttcccgggaagtggaggatgtcctgggccactgggagaggcggcacatcccctggggggcggaggtgggggaggtgagaagccaggcaggggccaggaagtggaagcttcaggaggatgtgtgcaggtcaaagtgtaggagtctgcatcttgaatgatgcagagagggcctccaaggctccagtgtgctgcaggtgggcagagggggcatgggaagtaggggttggccctgggcaggggtggggagtgggccaggctgcccagcggggctgagcctagagatggaaggggcagggacaaagatgtgcagctgccagtccttggaaaagctgaacgcctggtacttcagagaacaaaagggtggttctgaaggctgctcccaggacagtggggctccgagggtgcaaccccaaggctcactcctcccagtgcccccaacgcggctcagtcctgtgtctctgcctgtagagtttctttgttccctcttccttcctggtgtttttctctcccgctctccaaatgca

SEQ ID NO: 41839 - DNA, 2503 bp, Artificial sequence
  DNA replication origin
gggaccacaggcgcctgccaccaccacgtctgggtaattttttttatttttagtagagctaggtttcaccatgttggccaggctggtcttgaactcctgacctcgtggtccacccacctcgtcctcccaaggtgctgtgattacaggcatgagtcactgcgcccggcgactgtctcattctgtcttgcccgctgacatgtaagacatgcctttcctcctccttcaccttctgccgtgatcgtgaggcctccccagccacatggaactgtgagtccaggaaccctcttttgtttataaattacccagtcttgggtatatgtttatcagcagtgtgacaatggactaatacagggggacagacagacagaggcagagaaagaaagagacaatcacagagaaataatgggagagagaaagggagagacatagagacaggggaatggagagagagagaggggaagggagagagagacagagaaggaaagggagagagagacagagaggggaagggagagagagacagagaggggaagggagagagagacagagaggggaagggagagagagacagagaggggaagggagagagagacagagaggggaagggagagagagacagaggggaagggagagagagacagagaggggaagggagagagagacagagaggggaagggagagagagacagaggggaagggagagagagacagagaggggaagggagagagagacagagaggggaagggagagagagacagagaggggaagggagagagagacagggagagagctagaaagataaagagaggggccgggcacggtggctcacacctgtaattccagcactttgagaggatgaggcaggtggatcgcctgaggtcaggagttcgagaccagcctggcccactagtgaaaccctgtctctactaaaaatacaaaaaaaaaaaaaagttagttgggcatggtggcgagtgcctgtaatcccagctacttgggaggctgagggagtagattcgcttgaacctgggaggcggaggttgcagtgagccgagatcgtgccatcgcactccagcctgggcaacaagagaaaaactccgtttcaaaaagaaagatgaagagagggaaggagaaagggagagagatacagagatacagagagactgggagagggggagatatagacaaggagagagatagagaaagagagggagaatgaaagagggagagacagagacacagatttggacagtgggagatagaggcagagagagagagagagataaagagagggagggagaaagggagagagatacagagacagacacagagagacagggagagggggagatagagaccaggagagagagagaaagatggagggagaaagggagagagatacagagacagacacagagaaagagatggggagggaggaaatagagaccgggagagagagagaaagatggagggagggagaaagggagagagacacagagacagacacggagaaagagacggggagagggggagatagagaccgggagagagagagaaagatggagggagaaagggagagagatacagagacagacagagagagagagatggggagaagggaagatagagaccgggggagagagagaaagatggagggagaaagggagagagatacagagacagacacggagaaacagacagggacagtgggagatagacacagggagagacagagagatggagggagaaatggagaaggttacagagacagacacagagaaagagatggggaggggggagacagagaccaggagagagagagagagagagaaagagagggagggagaataaaagagggagggagaatgagagagggagagacagagacacagagagagagatgggaacggggagagagagacagggagagagagatggagggagaaagggagaaagatagagacagacacggagcgggagatagagacagggagagaaagatagagagagggaaggagaatgagagagggagggaaagagacacagagagagatggggacagggagagatagacacagggagagagccagaaagatagagggagggaaaaagggagggagatacagagagggggagggagatagagacgagagagagagaaagagagggagggagaaaggcagagagattcagagacagagaaagagatacggggaaagagatggacagagagagaggggacagagaatgctgtggtccggctgtctgttcctgcagatcccaggcaggggctgggggagggtcctctgtctgaggtctgggccacctgtctgaatgcttgtctctgctgggtggagctatggtttggtagcttgttcctgctggactggggctgcctggcccagggtaaggaatctggggcaaatgggtggacctcgtttggacagcacctggccagccatagcatctggctctcacaccttgggaggtgtcatccctgactct

SEQ ID NO: 41840 - DNA, 1058 bp, Artificial sequence
  DNA replication origin
gggtgcgcggggtgcgcggggtgagccgggtgcgcggggtgagcggggtgagccgggtgagcggggtgcgcggggtgagccgggtgcgcggggtgagcggggtgcgcggggtgagccgggtgcgcggggtgcgcggggtgagccgggtgcgcggggtgagcggggtgcgcggggtgagcggggtgcgcggggtgagccgggtgcgcggggtgagccgggtgcgcggggtgcgcggggtgcgcggcgtgagccgggtgcgcggggtgcgccgggtgcgcggggtgagcggggtgagccgggtgcgcggggtgagcggggtgcgcggggtgagcggggtgcgccgggtgagccgggtgcgcggggtgagccgggtgcgcggggtgagcggggtgcgcggggtgagccgggtgcgcggggtgagcggggtgcgccgggtgagcggggtgcgcggggtgagcggggtgcgccgggtgagcggggtgcgcgggctgagcggggtgcgccgggtgagcggggtgcgcggggtgagcggggtgcgccatcctgggtcacggaaacactcctctcctgcaaaggagaggagattcactcccccagtttctgtgaccccaaaaaggaccctgaacccgacggtgaactcacagcttgctcttactcacgagaggagacgtggaggggaaacaaggtcgtcccactgacagacaccccctgggccttgtaataaagaccgaggcgggcggatcacaaggtcaggagatcgagaccatcccggctaacacggtgaaacccggtctctacaaaaaatgtaacaaattagccaggcgtggtgatgggcgcctgtagtcccagctactcgggaggctgaggcaggagaatggcgtgaacccgggaggcggaggttgcagtgagccgagatcgcgccactgtgctccatccagcctgggcgacaagagcgagactccatctcaacaacaaaacaaaaggatcgcctcagagtagaacttctggccgggcacggtgactcatgcctgccatcccagcactttgggaggctgagg

SEQ ID NO: 41841 - DNA, 845 bp, Artificial sequence
  DNA replication origin
gagccaccatgaccagccaggccctgtttccttcctgctgggcatcagagcttcacaatctgtcaaatgggtgccatggtgacttctgtctcccgggggaagggggaaaaggggagggggagggggaaggggaagaggggggaggaggggggaagggaggagggggaagggaggggggaaaggagggggaagggaggagggggaagggaagagggggaggagggggaaggggaggaggaggagggggaggagaggcgagggggagggtgggggagggggaagggggaggaggagaggggaggatgagtggggagggggaaggagggagagggggagggggagagggaggggtaggggggaaggggtggaggagggaggaaaagggggaggaagagggggacgaggcccttcctgcaagctgtctcaggtcgtaaactcagtgacctgaggcaccaggggtctgtctttgcagctgcacccctgggtggctccggtaccagcgccctactcctttaattagacaccagcgcctgcctatgatgatggtcgggggcgtgtcagggcctcaggggccgggaaaatagagacccctcgagtagatgacttgagtcttttgctctgtcctggcactgtctgtcctggacacgctgtgtcccagatgatgagctggtcggttttgggttcagagctgggccatttctctttcctccgaggtatctggtgatgcagagactctttccccgcatccctcacatgaaagaccccatcggtgacagcttccaaaacgacaagctggtatgttgttttttctgccttgggacgggtctggaggcgtggtggccact

SEQ ID NO: 41842 - DNA, 1434 bp, Artificial sequence
  DNA replication origin
gtcggcgtcttagcggctgcgcggtggctgctccgtcctttcggtccaggcggcggcagggctgagccagcgacgccctccattcactctccgcgcccgttctccggctgtcctcccgttccgctgcccgccctgccaccatgacggaacaggccatctccttcgccaaagacttcttggccggaggcatcgccgccgccatctccaagacggccgtggctccgatcgagcgggtcaagctgctgctgcaggtggggacgcgggcgcggccgctccggggactaggggacgggaaccgagtggccgggtcgggcggggacgtgggcagcagagccttgcaggcgggcgccggaagtggaaggccgcgatcgctttgtccacgcgccgccggcttccgggggccgcgtcacgtgaccgctgctgcagggcgtggcgacgtccacgcgtgcgcactgggcccggcgggcggggggaaatgcggcacggattggagggcgcatgcgcgctgagcagggcccatggacggaccctgcggctggcgggccttgaccttgagctcaatcctgcgggtcccccggctgggaccaacccttccggtggatgcctggcaggtgtctgctcttgctccctccaccgtgaagggtaattctaaggccaatagggcaacgagcctgcccgcaggtgtcctggaataaccaggatatggttattggtggttcttacccccttcttagctcatttgtgcaattctgatccagagcaatgcattttttgtcttttgggagaggcttatagaaagtagcatgatgcctaggaacattgccgccaggacgtccttgctaacgttgtactccgagtgacagctcggtgatgggaatgaataggcttggctgcaaggacaggtcacgcccgcgatcccagcgcttttgagaggcccggggagtattgcttgaggccaggagtttgagagcagccggggccacacagcaagacctcacctcaaaaaaaattattttaacttaacgaagcaggacgtcccagtgcattgagaggcccggagaggatcgcgtgagctcaggagtttgagaccagcctgggcaacagagcaagaccgcatctctaagataattttttaaacctagtacagggtggcgtgtcccgggagtttgagaccagccaggacaacatagcaagaccccatctctaagaaaatttttaaaacttagcaggcggggtgtccccgcactttgagaggcccagggaggatcgcctgagctcaggagtttgagaccagccagggcaacatagcaagaccccgtctctaagaaaaagttttaaacttagcagggcggggtgtcccagcactcggagaggcccagggaggatcgtttgagcccaggagtttgagaccagccagggcaacgtagcaagacc

SEQ ID NO: 41843 - DNA, 1382 bp, Artificial sequence
  DNA replication origin
gagagacagggaaaggcaggaaacgcaaggaagcaatgggaagggaaagaagtgaaaaggaaggcggggagggagggacgggagaaagggaggaaaagagcaaaggagacagggagacaggaaagaaaaaggggagggaggcaaacggggaacgggagaaaaagaaaggaagggagagggaatgatggagaaaaacaggagggagggaggagagaagaaaaaggaaaaggagggaggagagaggaaagaggcagggaggtaggatagaaaaagacggaggagagaagaaaaaagaaaaggaggcgggacgcagtggcgcacgactgtaatccagcactttgggaggccgaggtgggcggatcacctgaggtcaggagttcaagaccagcctggccaacatggtgaaacgccatctgtccttaaaaaaaaaaatagccgggtggggtggctggcacctgtaatcccagctacttgggaagttgaggcacaagaatctctagaacctgagaggcagaggttgcagtgagctgagatcacgccactgcactccagcctcggtgacagaacaagtctccatctcaaaaaaaaaaaaggaaaacagggagaaagggagaaacagagaggaaggaaagaacaagacaggaaagaataaaaggaagaagaaaaagagaggcaaagggagagaggaaaaatgaaaaaaaaattaaaaaatggaaaagagacagctaggcgtggtggctcacacacctgtcatcccagcactttgggaagccgaagtgggcggatcccctgaagtccggagttcgagaccagcctgaccaacatggcgaaaccccgtctctactaaaaatataaaattagctgggcgcggtggcgcatgcctgtcattccagctacttgggaggctgaggcaggagaatcgcttgaacccgggaggcggagcttgcactccagcttgggcaacaagagcgaaactctgtctcaaaagaaaaaaaaaacggaaaagagagaggggagaaagggacgagaggaagggagacaggaaataaagaggaaaaggaaaagagagggaaggagggaaaggcagaaaagggaggaagggaaggaaagaggaaaagggaaggagagacggaaagagggagaaaaaagagggagggagcaaagaaaaaacagaggaagggcggagggagaaaagcagaaaaaggaaggaaaaaaatgaaaaagagggaagaaacgtagcaagaaaggaaggagaaagggagagagaaatgaaagaaaaagggagggagggaaacgaaggcagagacggaaagacggagaaaaaggagggaggcgggaaagcagcaaaaagcaaaggcaagcagggaaggaagagacgggga

SEQ ID NO: 41844 - DNA, 1159 bp, Artificial sequence
  DNA replication origin
ctgaaaaccagcaccagggccccgtccagcccggcctcgctgaggctgggaaacaaacacaggtctgtaaggcgcagctccccagcaaactccccacccctgcccagcacccacagcgctcctggcctctgtcctctattccaggacccctgtagcgagcctggcttggtcctgggtcctcaggggacactgtccacccccgctgccctggcagagcctcaggaatgtgcttggtctccacagccctccccacagcaatgtcccaaggttagacctacccatgcctcagtgacttctgagacacccgtcccgccgcccagcagccactccagcctccagagctggccccaacctccagccccaggctgagccgccctccccagaggtcaggaaaagcctcaggcagggctcacagctgcacccaggagtcacccagggtgaccccgctctctggggcgggtcactcctgcccacccacagccggggactgtcattttctcagtacacaaaggagagaaaggaaaaacaagagcgagaaagacacagggagagaaaaggaagagagaaggaaagaaaaaagaaagacacagggaaagaagaggaaagaaaagaagggaggaaggagggagagtgggaggagagggaaagaaagggagagacagggaaaggcaggaaagggagagatggggaaaggcaggaaagagagaggcagggaaaggcaggaaagaaagggagagacagggaaaggcaggaaacgcaaggaagcaatgggaagggaaagaagtgaaaaggaaggcggggagggagggacgggagaaagggaggaaaagagcaaaggagacagggagacaggaaagaaaaaggggagggaggcaaacggggaacgggagaaaaagaaaggaagggagagggaatgatggagaaaaacaggagggagggaggagagaagaaaaaggaaaaggagggaggagagaggaaagaggcagggaggtaggatagaaaaagacggaggagagaagaaaaaagaaaaggaggcgggacgcagtggcgcacgactgtaatccagcactttgggaggccgaggtgggcggatcacctgaggtcaggagttcaagaccagcctggccaacatggtgaaacgccatctgtccttaaaaaa

SEQ ID NO: 41845 - DNA, 1049 bp, Artificial sequence
  DNA replication origin
tgtggcatgcacagaacatcccgaggattgtgatgatttaaaaaccagtggggtgacaaggctggaattctgtgcagggcagcctggcgggccgggttcacccactaactcctcctctactcagcgagcactgcactatgagtgtctggtgcataccaggagtgtccgtctggctctaaaacagcctctggattcatctgggggccggggcaggggaagcgggaggacaacagatcctaaggatgatgtcgagtacacagctcctccctacctgcccagctcgaaggcgcacgtccagggaagctttgcagagagcccttttccagggtaaaagtcttagggggctcttctagggggagaggtcttggggagccctcttccagggggcaggtcttggggggcaccttcacgggggaagtcttcgggggcctccttcagagggcagtcttggggggaccccgttcggggggccttttgaggagcccttttcaggggggtgaccctgggagtcccttttcagggatgaggtcttggggagccctcttcaggggcaatgccttttgggggccctcttctggggaaaggggtctgtcaagccccctcatcctgcagcctcatcagccctccccggaccacacttcgtacaggcagagcctcggcaatgattaattacaaaagatgtgctgctgcccccacccgacacagagcctggcaccccaccccaccccgcacaaagccaacctcacccctgctctgattccttcccggccgtccgatgaagcctgaagtcttcccgttaaaacacctctgcttctgggcggggcgcggtggctcacagctgtcatcccggcactttgggaggccgaggtgggcggatcacttgaggtcaggagtttgagaccagcctgcttgggcctggcacccaggatgtgcttgccaaatgcttctggaatggatggatggaaccccatctctactaaaaatacaaaaatcaggcgtggtggtgcacacttgctatcccagctacttgggaggctgaggcagaagac

SEQ ID NO: 41846 - DNA, 1546 bp, Artificial sequence
  DNA replication origin
cttgctggagctgcacggcttccaccaggtgcaggtggtgcacttggggggtgtcctggatgccatcttggccaccaaagtggccccctgaagcccaggcagcatgttcattatagggatgtcctcccccaggctgcaggtggaccgcccggtccccaagtaccataggacagtcacataggagcgtgtagtcgtgactgaataaagaaagcaaaagcctgtctctgcctcctccataggggttttgatgagggagacggctgcatttagggaggaggagacagaggctgcatttggggagtgggggaaggaggctgcttttgggaaggaggagacagaggctgcatttggggaggaggggaaggagacggcatttggggagggggggacagaggctgcatttggggaggacaggaggctgcattcggggaggagaggatggaggctgcattcggggaggaggggaaggaggctgcattcggggaggaggggaaggaggctgcattcggggaggaggggaaggaggctgcattcggggaggaggggaagaggctgcatttggggaggggggaaggaggtggcatttggggagggggacagaggctgcatttggggaggaggggaaggaggctgcatttggggagtggggacagaggctgcattttgggagggggaaggaagctgcattggggaggagcgaggagaaagaggctgcatttggggaggaggggaaggaggctgcatttggggagtggggacagaggctgcattttgggagggggaaggaggctgcatttggggaggaggagggaaaggaggctgcttttgggaaggaagctgtattgggggaggaagggaaagaggctgtatttggggagtggggacagaggctgaattttgggaggggggaaggaggctgcattcagggaggaggggacggaggctgaattgggggaggaggggatggaggctgcatttttagaggaggagatggaggctgcattcggggaggaggggacggagggacagccaggaataactgttcagcccacggatgttctgggaaccagcagccttccagagtagccagtggggactcccggggagggcggtggggacagggctttctcctacctcctagcaggcagacggctgctgtgacggtgccgtctaccaggcagggtctcagtccttctccgcactccagcctgcatcttcccatcttctgcacgatttccagtgtgtttcctccatggggcgccatcgctgccgctcacccctggatgcccacaggctatggagtggcagttctctgggcggcttccatctctcctgccttggtgcagagactgtcacgagcgggacctccccagcccctgctgcggggctgaaatgcgtctgtaaacaccccccaccccgagcccaggcaggccagactcacacccaccccgtgaggccctcctgggcacatgctcactgcggttgtagggagctcagcgcatccacgtttcccccgtgctccgctcccagctgctgttcccggcct

SEQ ID NO: 41847 - DNA, 1126 bp, Artificial sequence
  DNA replication origin
agagcgaaactccatctcaaaaaaaaaaaaaaaaattaacgattagccaggtatgattaggcagctactttgggaggcccaggtgggtgggaagatcacttgaacctgggaggtcaaggctgcagtgtaagccgtgatggtgctgctgcactccagcccgggtgacagaacaagactctgtctgaaaaatagaaataggaaggagttggacaggctgccttaaatgaatgccctgtttcttctttgcttcaatggaactgacacttgcttatctgaggccgctgtttgcaaagcgctccctgcatcctctcgcccctccttcccctttccccgcccagaaccttcctgaggtggacgtgtgagatatggtggggtccgtggggcctgtgcagatgggtgggtctcggtctgcagggctgtgccagccaggcgtggggagtctgctgtgggctcggctggccgtggcctcatgcctccttggcagcgctggccgagcttctgtggcagtgagcacggagtcagggtgtgtgtgtgtgatgcagagatgagccccagggagccgggggcttcctgcagatgttggggagagacatacagacagggagacacagagagagagataggcagacagaaagatagagggagacagagacagacagagatggaggcagacagagacagggagatagagggagacagaaacagggagacagaaagacagagacagagatagagtgagacagacacggagatgggagacagatagtgagatagggagagagatggagagacagggagacttgagagacagagggaggcggagacagagatagggagacagaaacaaagatggagacagacagacacatagagggagatgggagacagagacagggaggcttggagagacagagatagaggcagatagagacagaaacaggagacagacatagagacagagacagagggagatagaaagaaacagagacaggagacagaaacagagagagagaaagaggaagacagagacacacagacggagacagagacagacagacagagaccaagggagaaagagtcagagagagaagccagtggtggagaagccgagaggcacggacagggg

SEQ ID NO: 41848 - DNA, 2037 bp, Artificial sequence
  DNA replication origin
acctccttatgggctctagtctcaaaggggctgtatcagtccatgttctcctgagaaacagaacccaatacggtgtacacagacattgatttagttgcttatttatttttatagacaaataacgtagatggatgggtagacagatacatagatagatgataaatgcatagatacattgatatagattgacgatagagagatgacagatacatagatgatgggtagagttgatatataaatggatggatggatagatggatggatggatggtaggtggatagatgggaggaaggatggatggatggatggatggatggtaggtggatagatggatgggaggagggatggatggatggatggatggacagatggattgatcaatggatggatagatacatggatgggaaggtggatggattggtggatcagtggatgggtggatggatgggtgggtgggtggatggatagatggatggatggagaggtggatggataaatggaagggtgggtagatgggtgggtaagtggatggatgggtggatggatgagtgggtgagtggatagatggatggatgtgtgaatggaaggatgtgtggatggatgggtggatgactggatggataaaggtgggtagatggatggatggatcgatgaatcggtggatgagtgcatagatgggtgggtaagtggatggatgggtggatggataagtgggtgagtggatgggtggctggatggatggatggacggacagatggatggatggatggatgtgtggatggatgggtgagtggatagatgtgtggatagatggatgagtgggcgtgtggatgggtgggcgtgtgaatggatggatgagtggatggatgggtgcacggctgggtggatgattgggagtgtgggtgaatagacggatgggtgggtggacagatggatgggagggtggatgaacagatatatcagtggatcggtggttgggtagctgggtgggggaatggatggatgaatgggtaggtgggtggttggatgggtggatggatgagtgggcatgtggatgagtgcatgaatggatggacgggtgcatggctgggtggatgatggggagggtgggtgaacagatgggtgggtgggtgggtggatggatggatggatgagtgattggatgggtgggggaatgaatggataaatggatgtggatggatggatgcatgcatgggtggatggatcagtggatccatcagtggatgggtggatggatgggtaggtgggtgggtggatggatggatggatggacagatggatggatgagtgattggatgggtgggggaatgaatggataaatggatgtggatgtatggatgcatgcatgggtgcatggatcagtggatccatcagtggatgggtgaatagatggatgggtaggtggatggatggatgagtgggcatgtggatgggtgggcgtgtgaatggatggatgagtggatggatgggtgcatggctgggtggatgattgggagggtgggtgaatagatggatgggtgggtggacggatggatgggaggatggatggatagatgtatcagtggattgctggatgggtagctgggtgggggaatggatggatgagtgggtagatgggtggatcggtggattggatgggtgggggaatgcatagatgagtgatgaatgggtggatcagcagatgggtgggtggatgactagatgggtgggtgagtggataactggatgggtgggtgagtgggtggatggatggatggatgacaatgtgttttctgaattgaacagaactcttcagcatggtgctagaatagagagcacatgaccaagtccttgagtagcctgggaagggcaggacaacagatgacacctgggcagaggtggctgtgcttctgtgattaggagacaaagcatgccctggttgaggctccaaaggctgtgcccttaccacagagacatgtgactatatccttagaggctggaacatagaagccagaacatcttccccagccagagcag

SEQ ID NO: 41849 - DNA, 1158 bp, Artificial sequence
  DNA replication origin
aataataaaagaaacagatgtttggtctgtgcctcagggtccggacacagagcccctgaatcccggggaatctgttgagtgacaggagcgaaagcaggcgttttgctatgtggtgacaagcccctttcatccgcaggggaccttatgttaatgaggggccttttggaaagggcaggctttggttgtcatgggaacagggggagggggctggagatggagtttgctccccagtggcggatgatgtcgttaatcctggccttttaagagacccagaagggaccgcgcgcggtggctcacgcctgtcatcccagcactttgggaggccgaggcgggcggatcacaaggtcaggagatcgagaccctcctggctaccacggtgaaaccccgtctctactaaaaaaaaaaaaaaaaaaaaaatagaaaaaattagccgggcgtggtggcgggcccgtcgtcccagctactcgggaggctgaggcaggagaagggcgtgaacccgggaggcggagcttgcagtgagccgagatggcgcaagtgcactctagcctgggcgataaagcgagactctgtcacaaaaaagaaaaaaaaaagagacccagaaggacagggttcagggagcttctggtgggtgaacacatcagggtgttggcagagctgtgccacggcgggcatggaggctccatacatcctgcacccagcaccctgcgctgtgcctggcttctgtctggcacttcctgacctgctccttcataacaaaaccccaagctgggaaggaaagtgctgtcccgagttctgtgagcccctcgagcaaatgacccaacctgagcaggtgcttgcaggagccagcagtgagcggcaggtgggtgagaaaactacaggtgtgaccagggatatggggctgggattgtgcgtggaggtcccatgggacccggcccttcacctgtgggatctgcgctaactccgacggctactgtcagaactgactgaattctacgatgcctcctggtgtccgccaacaagctgggaatgggttggtgcaggaagaacccagcaatatggtgatacaactgcctgggccgggcaccgtggtgcacacctgcagtcccagcaatatggtgaacacctgcagtcccagcactttgggaggctgagatggga

SEQ ID NO: 41850 - DNA, 3606 bp, Artificial sequence
  DNA replication origin
aggaatggggagggcagagtgacccgggacccatagggatgggggagggcagagtgacccgggacccctagggatgggggaggggagagtgatccagtaccgcctagggatgtgggtggggaaagtaacctgggacccctagggttgggggaggggagagtaacccgggaaccctagggatgggggaggggagagtaacccagaacccctagggatggggttggggagtgtgacccggaaccccctagggatgggggaggggagagtgacccagaacccctagggatgggggaggggagagtgacccagaacccctagggatgggggaggggagagtgacccagagcccctagggatgggggaggggagagtgacccaggatgccctagtgatgggggaggggagtgtgatccaggacctcctagggataagggaggggagagtaatccaagacccctaggaatgggggaggggagagtaacccgggaccccctaggggtgggggaggggagtgacctgggacccctagggattggggaggtgagtgactcaggacttctagggatggagtgggccctgtgactgatggttggactttgtagctggggtatgggaagtgtttcctggtgcccccatgaggatcttattccgggtggtaggacgcctaggtagtgggtgtctgcctctctctggagccctaatcacatggaggagacggtctagtgatgaagggatagttacttgtgatggggggtagttactggtgacaggcggatagttataggtgatgtgggatagttactggtaatggggtgatagttactggtgatgggatagttactggtgatgggggcatagttactggtgatggaaggatagttactggtgatgggggatagttactggtgatgggagatagttactggtgatggggcgtagttaccggtgatgagggatagttactggtgatgatggggcatatttactggtggtgggggttagttactggtgatggtgggatagttactgggtttgatgatggggcatagttattggtgatgggggtagttactggtgatgtggggatagttactggtgatgggaggatagttactgttgatgggagatagttactggtgatggggggatagttactggtgatgatggggcatagttactggtgatgggggatagttactggtgatggtggatagttactggtgatggggggtagttactgggtttgatgatggggcatagttactggtgatggggggtagttactggtgatgtgaggtagttactggtgatggcagagaagttactggtgatggtagggtagttactggttgcctatggatggtgcagtggggcaggagtctactcttggggactacggactggaggtctggtaccctgggaggggggacaccacatgcctggtcctagtgacggggatgagagtggtcagggtgcctcacagaaggcatgggtctccatgattgggggtgacagggcatagggcaggggtctatatgatctggggttgagatctgcagggcaggtccagggcttggtgactggtgccctgaagaccaggatgggcgtcagggccaggatctgggggcaccttcaagaggtgaggagcgctgaggagtgtagaagagtggaagaaagacgaaaaaagaaaagcagcttcacagtcaaagacgggtttattttggagaacaagcctgagcggggcttctggctgagttaggtcaggagtgttctctcttacagactaagggtatttaagggtttaggaaggggaatcttatcgcaggctcggaatgtttccctgtgaggcaaagttgactgaggtgttagaatgtctctggtctgaaggaggttatcttgggcttgggatgtttctggtcagaggcggtttatttcaggctttgactgtttctggtcatgctgacattagccattaggctgatgttttggggctggttttaggcagtttttaatcacgggaacttaaaatggcaatgcttgtccaagatggcggtgtgtgtccaagatggtggtgtgtgtcaaagatgaccatgcatgtccaagatggcagtgcttgtccaagatggtggtgcttatccaagatggcggtgtgtgtccaagatggtggtgcttatccaagatggtggtgtgtgtcccagatggtgtgtgtccaagatggtggtgcttctccaagatggcagtgtgtgtccaagatggtgtgtctccaagatggtggtgcttatccaagatggcggtgtgtgtccaagatggtggtgcttatccaagatggccgtgtgtgtccaagatggtgtgtgtccaagatggtggtgcttatccaagatggcagtgtgtgtccaagatggcggcatgtgtccaagatggtggtgcttatccaagatggcagtgtgtgtccaagatgttgtgtgtccaagatggtggtgcttttccaagatggtggtgtgtatccaagatggtggcgtgtccaagatggcggtgtgtccaagatggtggtgcttgtccaagatggtgttatgggtccaagatggcagtgtgtgtcccagatggtgtgtgtccaagatggtggtgcttatccaagatggcggtgtgtgtccaagatgttgtgtgtccaagatggtggtgcttatccaagatggcagtgtgtgtccaagatggtgtgtgtccaagatggtggtgcttatccaagatggcggtgtgtgtccaagatggtggtgcttatccaagatggcggtgtgtgtccaagatggtgtgtgtccaagatggtggtgcttatccaagatggctgtgtgtgtccaagatggtgtgtgtccaagatggtggttcttatccaagatggcggtgtgtgtccaagatggtgtgtgtccaagatggtggttcttatccaagatggcggtgtgtgtccaagatggtggtgcttttccaagatggtgttgtgtatccaagatggcggtgtgtccaagatggcggtgcttgtccaagatggtgttatgggtccaagatggcagtgtgtgtcccagatggtgtgtgtccaagatggtagtgcttatccaagatagctgtgtgtgtccaagatggtggtgcttatccaagatggcggtgtgtgtccaagatggtggtgtgtgtcaaagatggccatgcatgtccaagatggcagtgcttgtccaagatggtgtgtgtccaagatggtggtgcttctccaagatggcggtgtgtgtccaagatggtgtgtctccaagatggtggtgcttatccaagatggcggtgtgtgtccaagatggtgtgtctccaagatggtggtgcttatccaagatggccgtgtgtgtccaagatggtgtgtgtccaagatggtggtgcttctcccagatggcggtgtgtgtccaagatggtggtgcttctccaacatggccgtgtgtgtccaagatggtgtgtgtccaagatggtggtgcttatccaagatggcagtgtgtgtccaagatggtggtgcttctccaagatggccatgtgtgtccaagatgttgtgtgtccaagatggtggtgcttatccaagat

SEQ ID NO: 41851 - DNA, 1537 bp, Artificial sequence
  DNA replication origin
ggcgtgacatgggcgtggcctggcggagagggcaatggaggtgtggcctgggcgtggcctgacggagagggcaatggaggcgtggtctgggcgtggtctcaggggagatcaatggggcgtgacatgggcgtggcctggtggagagggcaatggaggtgtggcctgggcgaggcctgacggagtgttcaatggaggcgtggcctgggcgcggtctcgcggggaggccactgaaggcgcggactgggcgtggcctcgcggaggcgggcgggggcgtggcctcgcggaggcgggactctggccgcctgttttttttgcagccgcgctgcgcgcaccgcgggctccgggctcagaagtgcggacgcccggctcccggcgtggacgccatggtgctgtgcccggtgattgggaagctgctgcacaagcgcgtggtgctggccagcgcctccccacgccgtcaggagatcctcagcaacgcggtacggcctgggcctgggcggggcaggggaccggggacggaggggctgaaccccggagggcccagcgactcaggaactctagggatagggatgggagagtgacccgagacccttagggatgggggaggggagagtgtcccgggacctccagggatagggttggggagagtgacccggaacctctagggatgggggaggggagagtaacccggaaccccctaggcatgggggtggggagtgacctgggtccccatagggatgggggaggggatcgtaacccgggacccctaggaatggggagggtagagtgacccaggaccgctagggatggggacagcagagtgaccccggagccccatggatggggatgaggagagtaacccgggacccccaggcatggggatggggagagtaacccgggacctccagggttggggatggggagagtaagccgagaccccccctagggatgggggtgggggagtaacccgggacccctagggatgggggagaggagagtaacccgggacccccaggcatggggatggggagagtaagccgagacccccaggaatggggttggggagaataacccgggacccctagggatggggttggggagagtgacccaggaccccctagggatgggggaggggagagtaacccgggacccccctaggggtgggggaggggagagaaacccgggacaccttagggatggggttggagagagtaacctgtaacctgggaccccctagcgatgggggtggggagagtaacccaggacgccctaggcatgtggttggggagagtgacccgggaccccctagggatggggagggaggagtgacccaggaccgctagggatggggacagcagagtgaccccggagccccatggatggggatggggagagtaacccgggacccccaggcatggggatggggagagtaacccgggacctccagggttggggatagggagagtaagccgagacccccctagggatgggggtggggagagtaacccgggacccctagggatgggggagaggagagtaa

SEQ ID NO: 41852 - DNA, 865 bp, Artificial sequence
  DNA replication origin
ggacacccccatctccacgcccctcccaccaggcccgtggacacccccatctccacgcccctcccaccaggcccgtggacacccccatctccactcccctcccaccaggcacgaggacatccccatccccacgccactcgcaccgggtccgcggggaaccccctatctctaccttccccgacgcggctcccacaagacccccatctctgcgccgggcccctccacgtgcgggtaagaaccccccacccccacaactgcccacaaccgcagctgcggaaacccagcatttccactccccacgccgcgcctgcaaggaaccccaagtatccacgccagcctttcctccccgggaccccgcagctgcctgcgccattgcaggtcttggcgccgcaggcggggtggggaggggcggggcgagcgccgggggcggggacggggcccgggaggcggagctgggggcggtgcttcaccaagcggccggggcggtgcccgggggggaggcgggcgggggtgtggcctgggcgtggcctcacggggagctcaatggcggcgtggcatgggcgtggcctggcggagagggcaaggaggtgtggcctgggcgtggcctggcggagcggtcaatggcggcgtgacatgggcgtggcctggcggagagggcaatggaggtgtggcctgggcgtggcctgacggagagggcaatggaggcgtggtctgggcgtggtctcaggggagatcaatggggcgtgacatgggcgtggcctggtggagagggcaatggaggtgtggcctgggcgaggcctgacggagtgttcaatggaggcgtggcctgggcgcggtctcgcggggaggccactgaaggcgcgga

SEQ ID NO: 41853 - DNA, 1541 bp, Artificial sequence
  DNA replication origin
gccccattgatctcccctgagaccacgcccagaccacgcctccattgccctctccgtcaggccacgcccaggccacacctccattgccctctccgccaggccacgcccatgtcacgccgccattgaccgctccgccaggccacgcccaggccacacctccttgccctctccgccaggccacgcccatgccacgccgccattgagctccccgtgaggccacgcccaggccacacccccgcccgcctcccccccgggcaccgccccggccgcttggtgaagcaccgcccccagctccgcctcccgggccccgtccccgcccccggcgctcgccccgcccctccccaccccgcctgcggcgccaagacctgcaatggcgcaggcagctgcggggtcccggggaggaaaggctggcgtggatacttggggttccttgcaggcgcggcgtggggagtggaaatgctgggtttccgcagctgcggttgtgggcagttgtgggggtggggggttcttacccgcacgtggaggggcccggcgcagagatgggggtcttgtgggagccgcgtcggggaaggtagagatagggggttccccgcggacccggtgcgagtggcgtggggatggggatgtcctcgtgcctggtgggaggggagtggagatgggggtgtccacgggcctggtgggaggggcgtggagatgggggtgtccacgggcctggtgggaggggcgtggagatgggggtgtccacgggcctggtgggaggggcgtggagatgggggtgtccacgggcctggtgggaggggcgtggagatgggggtgtccacgggcctggtgggaggggcgtggagatgggggtgtccacgggcctggtgggaggggcgtggagatggggatccccgcggggatggtgggaggggtttggagatgagggtccccgcgagaatgctcggaggggtatggatatgggggtccccgcgggccgggtgggaagggcggggagatgggtggggggggggtccccgcgtgcctggtgggaggggcgtggagaaggtgggggtccttgtgggaggggcgtggacactggggatccgcgcgggcgtggtgatgggcgcggcgtggggaccccctgggggcgcggtgctgggggcgcagggatgggaccagggcgggcgctgtgaggtgggggacgcccggctgtgccttccctccctaaacggagcccacctccagggcagcgggtcccttgcgcgccgcaggctgcagggggcgcgcgtgagctgtgcgaggatttttcttaaaccccagagcccagccgcacctgctccacataaacccagcgtggcgtggagactccgggcactgtttccccagcctttgtgactcaaaagattttaaaataaaatgtcaaaaataataatatacccagagcctatgccagtgatgtgtagatgcagaaaatggaatcctacagttaattttgttaactgtggaatgacatccgagggtgtccaacacattacggagaaaacgaaaaactgtagtca

SEQ ID NO: 41854 - DNA, 915 bp, Artificial sequence
  DNA replication origin
tctgtatctacaaaaaataaaaatattagctgggcgtggttgtactctcacctgtagtcccaactactcaggaggctgaggcaggaggattgcttgaggccaggcgttggaggctgcagtgagttacgtttgcactactgccctccagcctgggcaacaaggcaagaccccatatctataaaacaaacaaacaaaagaacaattccagggcacccctgtttccagctctgtccactttacattctcaaaataaaagtagtgtccctttgacagacactttttcatcaccagctcatggataaagcgtctctccttccagacgtcccccacggccacaccaagcggaacccaaagaaggaagggtctgcttttcctcctgaagccataggtggctggaggtgcccagctggccgtggggagcggtgctgactcgtgcataactgtaggtttcacacctgggcacggaccggcgggtcagaaaacttctccctgaaactgaaacgaaaactccgggccattttaaagccagcttgaggaagctgtttgtagagcagttggtaagaagtcgcaggtctcctctggaggaagaaagagcagggaggagccgtgggttgacgcgggtgttaaaagctggaaagactttggaggctgcgggttggtctcctggcactcggagtgtgtgttttctgctgatagacactttgtgggtggatgcccctgagatgagaggactcatacccagactaatactgccagggtgtcaagaattcccattaagaccaccctgggggctgacggtggctttgtggtttccgtccacgggggacactgagtcttgaggtttgtatgacaatgcattcaacctgcccaggggagccacagccccactgtggatcatctaagagtctcagcctc

SEQ ID NO: 41855 - DNA, 1251 bp, Artificial sequence
  DNA replication origin
cgttactggtaaaacagggatgattgtaacagcacctgtctcacgaagtttcgaaaatcccagagatcaggccaggcgcactttgggaggccgaagcgggtggatcatgaggtcgggagttcgagatcagcctggtcaacatagtgagaccccatctctactaaaaaatacaaaaaattagccgggcgttggggtgggcgcctgtaatcccagctacgtgggaggctgaggcaggagaatcacttgaacccgggaggcggaggttgcagtgagcagaggtcacgccactgcactccagcctgggcaacagtgcgagacaagaaaggaaagaaaggagaggagaagagaggacaggagaggaggggaggggaggggaggggaggggaggggaggggaggggagggggagggaggaaggaggaaggagggagggagggaaggaggaaggaggaggaaggaggaaggaggagggagggaaggaggaggaaggaggaaggagggaggagggagggagggaaggaaggaaagatcgcagagataaagcccttgtaaaagtggctgctgcttcctcctcactcagtcgacgtgaactatttttattagcgaaaaaccaagaacaacgtctcctccccacaaaacaaaagcaaaataaaagccaaagacaggtgtgaagaagatttctgggagagcgcattttaaagaaggtgggactttcttcatccgagagccacccaacccagcatctcggcgtgggccggcctgtacccctcgtcaaaggaacaattggcttgcaaactgggaatctccgttaaaacggacaagacgattttgctcttttcttgcggcaacgtctgaagatgtgcaagaagggggtctgttttaggccaacctcagccctctctgcgaccctcgagagcttgtgcaaatggcacagctcctgcctggaggctgtgtgtccttttgcagcactctggtgagcccgggttaaaaatcacacaccccaaagggaggctgagctgagggctttctctggcattcagcagcgtctctggcctggatatgccctgctagctggggtatttctgcagagcagcctctcctacccgaacactcccaggtccccgtgacttacaacggtggctgcagggagggcagacgtcctgggtgatgctggtctggtggtgcttgtctgagcagccgtcaagctaggcagggggtcctgggggaccctcctcctgggccagaggcggct

SEQ ID NO: 41856 - DNA, 1006 bp, Artificial sequence
  DNA replication origin
aatcccagctattcaggagactgaggcaggagaatcacttcaacccgggaggtggaggttgcagtgagctgagatcgcgccactgcactccagcctgggggacagagtgggactccgtctcaaaaaaaaaaaaaaagaaaagaaaaagaaaaaaaagaaactcaaacatcacagagagagatcaatgtttttttttttaaatagcatgttaattagggttttctctttttttttttcaagacaaggtctcactctgtggcccaagctggagtgtaggccgggcacggtggctcacacctgtaatcccagcattttgggaggccgaggtgggcagatcgcctgaggttgggagtttgagaccagcctggccaagacggtgaaaccctgtgtctactaaagatacacaaattagccgggcatggtggcgggtgcctgtaatcccagctactcaggaggccgaggcaggagaatcgcttgaacccgggaggcggaggttgcggtgagccgagaccgtgccacggcactccagcctgggtgacgagtaaactctgtctcaaaataaataaataaataaatagtatgctgacaagcaaatatggccttttctgtttgttattacgcctggcatctccaagaaggtaccggacttgctgaggtgtggagtagcatccaggctggtgagagatggttggtttggggtgcagtggggcggcgaggggcttgttgggaccggcttggaggcctgtgggtgtcagacctgcagcctagcgggtccttgccatccaggaagctgtgagtatttggtttggggcagctgaacccaggaagcaggactgaggaggtaagaagcagagagggatgagcagtacactcccgccgggtgccagccaacagacacggagagcatgaaggataaaaataaaagaccaactgctccctgcgagctgattcctggtttgccctggagactcaagctgctcctgaactttaaacagcacccacagtg

SEQ ID NO: 41857 - DNA, 958 bp, Artificial sequence
  DNA replication origin
ggaaaggaaaggaagggaagggaaggaaaaggaagggaggggaggaaaggaaagggaagggaagggaaggaagggaaggaagggaaggaagggaagggaagggaaggaagggaaggaagggaaggaagggaagggaagggaaaggaagggaagggaagggaggggaggaaagggaagggaagggaaaggaaaaggaagggaagggaggggaggaaagggaagggaagggaaaggaaaaggaagggaagggagggaagggaagggaagagaagggaaaggaagggaagggaagggaggggaggaaagggaagggaagggagggaagggaaaggaaaaggaaaaggaaaggaaaaggaggggaagggagggaagggaagggaagagaagggaaaggaagggaagggaagggaggggaggaaagggaagggaagggagggaagggaaaggaaaaggaaaaggaaaataaaagggaagggaaggaaaggaaagaaatggaaaggaaaggaaaaggaaaggaaaggggcgggtgtccataccaagcacagaacccagctgtggtaggcagagagaagagccagcctgagcagacatcaagattaaacagaattgtacttacctgtgcaggtgttggatgtggggagataatccatcttggtttgccctggatttataaggtattttcaggacacaagaacctcagggctaaaagtgggacaattaaaggaaaacgggcacaagttgttaacgctatgtgtagtgggttcaatggtgcgtacctgcaaaagataggaccatgccctaaccccctggaacctggaaacaggactttgtttgctgaaaaagtctttgaagatgtgatttaagggtttgggatgagatcatcctggattagggtgggcccaaaatccaatgacaggttcacttctgagagacagaagaggagacacagacacagagg

SEQ ID NO: 41858 - DNA, 1469 bp, Artificial sequence
  DNA replication origin
acaatgatacaagcaaaaatgaaagtttgagagtattttggtaagcatgctttcattcaagccaggaaagtagaattactccccaaaaagtctggttttgataaaaaaaaatttaaaagttaaagtaatgctctgaattttcatatacccgtgtatccttgtaatattttccaaccattttaatgttctggaaaaaaacacatgaaatatgtccagaggggcatgaatttttccttttccatatgttttgcttcaggctccaatcaaaaatatcagagcactgctgaatcctgtatttgttcacagtattgatgatttattcatggttgtttatttgaattaattttgattttaaaatattgagtgaatttgattttataatatggattataggggttatggatagagggtggataaatagatggatgagtgggttaatggatggtagatgctggaaggatagatggattaatggatacagaatatatggagggatggatgaatggatggatgggtgggtggttaaatgggtgggttaatgaatggagggtggatagatgatggatagatagataggttaatggattgagggtagatggatggatgagtgaatgagtgaataggtcgatgagtaggttaatggatggatgggttggtggtcggttgagtgggtgcatgggtggagagatgaaaggatgaatgaacagatgatggatggatatatggatatatgggttaatggatgaagggttggctggctggctggctggatggctggataggtggatggatacatgggttaatgaatagaggatgaatgaatggactaatgaatggatgggttaatggatgaagatttggctggctggagggatggatggctgaataggtggatggatatatggattaatgaatagaggattaatgaatggattaatgaatggatgggttaatggatgaaggcttggctgactgaatggatggatggctggataggtggatggatacatgggttaatgaatagaggataaattaatggattaatgagtggatgggtaagtagaaagtgggtgggttgatagctgggttaataaacagagggtggatagaggatggatagatagatacacgggtagatggtttaatggatggagggtggatggatgggtagatggatggatagatgggtgaatgaatgaatgagtaggtagatggatacatgactgggtggatggatgaatagattgacagattaatgactggctgaatgggtgggtgggtgcatagatgcatgaacagaagaatcgactgatggaagcatggatggatggatgggtggatggatggatggatatgataaacgcgggagaattaagatctctgacactggattctagtttagtgaactggtccctgggattctcaatctttgcaaaaccctccacctcctacctcaaggtgcagctcta

SEQ ID NO: 41859 - DNA, 1820 bp, Artificial sequence
  DNA replication origin
ggactcgcgcacgcgcagtgcaaaaggtcgggctcccggaagtccctcctcccgggggcggagccagggcaagaaggagaaacccggtgctgccgcgcggcctcttccgcgagcccgcgcgccggaagtggaaatgcgtcatagagggcgggcggcgacggcggtggcggcgtcggaggcgcctccgggggacggtggcggctcccggcggtgaggccgcgcctgtccggggatcgtcgagggacggcgggagcttgggccagcggcggcggcggcctgggacgcaggcggagccccgcgcaggtgagtgccgcccccgtgcctcccgggcctggctgcagccggcgaacgcttcgctcctagggccgggcccggggggccggggcttgggaggcggcgcctaggggcctcggaggtgacggggctggggttggggggcgtggggtgccaccggggggctgggagcgcctgaaactgtacgggggaatcgggggctggggaggtctgcggtcggggtccgggggtccctggaagtaggggtaggggctggagcggttcctgggactgcaccgaaggagctgaggcctggagcggtgtcggagggctgggagctcgggggatcggatgggcgggagactaggaggcctgggactaggggacgtggcgctgcggtcgctcctaggtctacagtgggaagcaaggggctgtccggggttttcggaggctggggcggtgctgtgtaggttggggtattggggctcatccaggagggtggtggggagcggggaactgaggagctgagggtaccgagtggccaagggcctgagaatgtgtggggccctgccaggggtgccagcggcagcctgaggccatgctggggggctgcggtaggtgggaataccaggggcaatgccgcgtactggggattgggcagccaggtgtaccggggtggtcggagggcgctggaggccagagtggggagggttcctcggtggtgaagttgctggggccgcttgggttctgggggagggttcactggtctctgtccagactggagcccctccctggtgccccactgaccttttctggtcgcttctccaccctccctcccttctttcgcacctcccacctcgggcttgggcgaggaggccgtctcctgggcctggcaggaagcctccaggttgatggggtgggcggccgggccggaggcggtcacctgagatggttgggtttctgcgagtgaagcttcctctacttggacttggccgtcaggaagtggctgcccgtcagctcagcagggaagaggtgggttaatgaaggtgggcggagaaagaaggcgcagacgggggactccggcccctaacttgtggaaagttcgttgtactttttggctttgagtgggttaaagctgggatacgtttggccttcgtggagattactagggttcatggttctggattgttgttgcagcccgagacttcctgttttatcagggcaagtacagggccgccgccccctccacaaaacctttccagatgcctgcagctgtgctctccctggccccttcccttccccagtgtctctctgccccttcccgtggagctaggcgtttgtagcgtccccgttcctacttgacctgtgtgaggggcctggtcgtgctcagcttcctattctgcaggccttgggagctgctggctgctggatgtagggtgtcgggcagtgctgaccgaggctttgacactaacctgttctttatcagctcggctctttcccctttggtgtactcttaatgatttcaaaaagtaaagaactccgttgag

SEQ ID NO: 41860 - DNA, 1474 bp, Artificial sequence
  DNA replication origin
ggggttttgtggccttaagatgtgccctgtgggtgtgggcaggcggcctgctcagtgactgtggccacagggaatggtggagccgggtagcggaaggggagctgtgtctcgcagcggtggcgtgtcacttgtgttcagtaagtggcgagggctagttggtgttcctcgctgagtcgtaactccgtgggatgagctaagtcttgagccactgatggtgacttgaagggattggtttggcttctgggctccactgtctgggtctgcaccggacatgagtggtgagcggtgagcggtgagcgggcgctcaggctctgaggccactcggccctacggcccaggagagggcgcctggccgtgtgtctggggggttttgggggaaggccatctgacactgtttttgcttttaaaggtttcttttgattcgaccaaacacctgagtgatgcctcaattaagaagcggcagctggagaggcagaagcttcaggaactggagcagcaaagagaagaacaaaagcgcagagagaaggaagcggaggagaggcagcgagcggaggaaaggtaccttctgcgggagcgggccctcggcgctggtgtccggcacctgggagtgtgcgcagacccgtgtgcgtgtgtctgcatgtattcctgtgcgtgtgtgtgtgcatgcatgcttgtgagcttgtgtgtgtacctgtgtgcatggacgcacgtgtgcctgtgaaccggtgtgtgtactttgtatgtccctatgtgcgcccgagtgtgtgcctgagcatctgtgtgcacgtgtgcctgtgtgtgcgtgcatgtgtgtgagctcgtgtgtgtacctgtgtgtgtatgtgcacgtgtgcccacatgtgtgtgcttctgtatcggcacatagcacacatgtgcctgtgtgcatgcgtgtgtgcctgtgaacccgtgtgtgtacttgtgtgtgcacgtatgggtgtgtgtgcaggcctgtgggtgctcagctgtgcacgtgaggacctgcgtgagtggctgtttgagacgcagcagaatatgaatgtttctctttttcttgtcacacgtcgtggtctgacacgatctctgccggctcccaggaccgcgccttgcccgaagagccacctcttctccctccacatgctgttcacacctcccgctgaaacaagcagaatgccttggctgtttgcaagtttgcatttaggttgaggctacatttacaaaatgaagtagagggttgatggtgatggccagatttaaaaaaaaaaaaaaaaacaaaaaaccaatgataggacaaaaacccggtttcacataagaggcctttaaagcaattgcctgggtcgttcactgtggttggggtaccagagacaacctcaggtcactctttgtagccccttttatcttcttagcattgcaggagggaaccaacaactttctgtgaatcccctgaggcggaatcctcctcctcctcctcctcctc

SEQ ID NO: 41861 - DNA, 1125 bp, Artificial sequence
  DNA replication origin
cttttctcccggcctgctcctccttgtccccgtgtctcctctccccttggtgtctgcgtgggtctgtgtcaccccggcgggctttgtggcctcactaggcggttggcggcgcccacccgggcttcagaagtctccgcctccgtgtcgtgttccataggaacagctgcgacttgttcccatgtccggtgttggttgaaatgcatttgagagctgcggggcgggggaggctgagctagggaactccccactgtctcttgtggactctctctggggaccgcgcccctccccggccgcattcatcctcacttcctggacacccctctccacaggaaaagtgcaaggagctgagtggcgtggctgtggttggatttgtttagagagaggtccccccgtgccagtgctgtgtggtgccctcacaggagtcctgcacaacaaggagtcacccagcgcggttcctggtgggcagaaccggcgtcctccgcgccgctgtgcatcccggggccttgttgggcctgctggggttcctctttcacccgtccgtctgcccatccgtctttcccctgactgggggcgtggcttttgatgtggtcggtccagtggtcgttttcttcgtggtttcagggttgggtcacacttagcaggacggtgtgttggaaggtcacggaggtcctcgcccggctcactccttccacctctcgggctgctttgagtcaaccgaggtccaccttgggataaagagttaaatgcttaatcgttggaccgtggcctgttccgccgtgtttggaaagccgcttgtatggtgtgtggtgtgttggctgcggcgctctctgtgaccacccccggtgtgttccacacaggaaacaaaaggagctggaagagctggagcgagagaggaaaagagaagagaagcttcgcaagagggagcagaagcagagggaccgtgagctgcgccggaatcagaagaagctggagaagctgcaggcggaggagcagaagcagctgcaggagaagatcaagctggaggagcgcaagctgctgctggcccagaggaacctgcagtccatccggctcatcgccgagctgctcagcagagccaaggtacccgggggctccctctgcagccgc

SEQ ID NO: 41862 - DNA, 1235 bp, Artificial sequence
  DNA replication origin
cacctctcgggctgctttgagtcaaccgaggtccaccttgggataaagagttaaatgcttaatcgttggaccgtggcctgttccgccgtgtttggaaagccgcttgtatggtgtgtggtgtgttggctgcggcgctctctgtgaccacccccggtgtgttccacacaggaaacaaaaggagctggaagagctggagcgagagaggaaaagagaagagaagcttcgcaagagggagcagaagcagagggaccgtgagctgcgccggaatcagaagaagctggagaagctgcaggcggaggagcagaagcagctgcaggagaagatcaagctggaggagcgcaagctgctgctggcccagaggaacctgcagtccatccggctcatcgccgagctgctcagcagagccaaggtacccgggggctccctctgcagccgccagccgcgcccgggctgccctcagtgccctcccctgaaatgcgggcggcgtcacggcgccgtttccccgccggctgcagctgtagctacgaaaccagctttaatgccgaggatgacggctccttcccgggagggtgtagcgctcgtctgtcgttcccgatgatttcagagctgtgacggtttccttttgcaaagctggtgcattcaggttccccgagcaggctggcagcctcccgggggccagggcagaggctctctgtttcctttgggtcggggcagtggcagagagtgcagggggccgctccctctggcccgcgcctctgtgtgtggtcagctggcctggctgtgacctcaccagtggcccagagcagaggggcaaggtgggctggggggagggctgagcgcacagagggggcctgccgtgggcccgggtccctcctccgcagcgtgaacctgacaggtctcaccagcgccggtactgacgaccccctcagcaccaagagcctccctgctcctcctgcaggcgcgactggtaactcccatgagcccggggccagggcccacagacagacagacctccccaggacagacgtccccggcacgctccttgtcctcaggagggctgcgtccccctggagtccaacgcggggcgaccccataacctgttgtctgattacagttgtgataagtccccgggaaggagcatgacaagaggctgagacatgtggcagcccagtccttacctcatggtgaatattgaagacactaacccaggctaggccaggctcgccccgcagcta

SEQ ID NO: 41863 - DNA, 1256 bp, Artificial sequence
  DNA replication origin
aggaggccccatgcaaggaggttcagagctcctgtcgtgtggtccccgaggatggctctccagagaagaggtgcccgggcggcgtcctctcctgcattcctgacaacaaccaacagcccaagggcatccctgcctgcgagcagaatgtctccagaaaggacacccggtcagaacaggacaagtgcaaccgggagcccagcaagggccggggccgggccaccggagacgggcttgctgaccggcacaagcgggagaggagccgggccaggcgggccagcagcagggaggacgggaggccacgcaaggagcggcggccccacaagaagcacgcctacaaggatgacagcccccgccggcgcagcacgagcccggaccacacccggtcccggaggtcccacagcaaagacaggcaccggagggagcggagccgggagcggaggggcagcgccagcaggaagcacagccgccaccgccgccgaagcgagcggtcgcgctcccggtccccgagcaggcaccgcagtacctggaacaggtaatgacgggcacggcctccccacggcctgtccgggaaagaccaggacctgctcgagcctcctggccgctccttggccgctctccgtccacccctgcaaagccaagacccttctgcagccacgaatgtccacggagcccgccggcaggaaggaagacaccatgctttagagatccatctttctccactcaccgcagcgtacttggcacttcagtttcaaacacgtagtcctttaaaacttgatccgatagctttaatgcggccggtcctctctcagtcaggaaaattgcacagaccgacagtcgtgaggatggcagagctgctgcattcccccacacggggatttctgtgtctgcttggcgacctccctgcgtgcacggcctaggaggtgcacgggccaccatagtcacactggcactgaaaagaaagcgttgccctggtgattctttcccccccgtttgtaatgttaactgatcaggaagtgcagtttgggtgggatgccgaatcgtcgtgctgacattgagtcacggatgaggaaggtacaagtcctttaagatcaaaactcaaacgggccgttctttctaaggtgtcggtatgtggggagtggtacaaaatggtctgatgctccttcaaaaacattcactttttacaacgtcaaggaattaagcataaaaaagattggttaaaagctttggtttctagtaaaggttagtgtgtgtggttt

SEQ ID NO: 41864 - DNA, 1402 bp, Artificial sequence
  DNA replication origin
aggagcttttgtataacttgggtgagtgggacgggctgaagttttggctggagtagggtcaggggtggcctggagtcttagctggagtaggggcaggggaggcctggaggtttggctggagcagggtcagaggcggcctggaggcttggctggagtcggggtggggagagaggccatttattttactatctcctgtctctgaagagaaggaggaagtaaaagttgaaaaacaacaggaatgaagtcagtggcaagaccagccggcacccctgaccaggcctgaggttaaaacattaacccccgactctaaccacacgtgctctcaatctatcagaaccctttcacgtggaaccccttagagttgtaagcctttcaaagggccaggagctctgtcttcggagagcccggttctcgagacgtgagtccgccaacgcttccggccgaataaagccaaaaccttcctaaacctggtgtctgaggggttttatccgcggctagtcctgctacaggggcaggagtggcctggaggtttggctggagtaggaacgggggcgacctggacgcttggctggaacaggggcaggggcggcctggagggttggctggagcaggggcggggcggcctggagctttggctggagcaggggacaggggtggcctggaggcttggctggaggaggagcaggggcggcctggaggcttggtttgagtaggggacagcggcggcctggaggtttggctgcagtagggacaggggtggcctggaggcttggctggagtaaaggaaggactggcctggaggcttggctggagtaggtgacagggcctcctggaggcttgggtggagtaggggacaggggtggcctggagctttggctggagtaggggcaggggcggcctggagctttggctggagtaggggacacgggcagcctggaggcttggctggagtagaggacaggggcggcctggaggcttggctggagtagaggacaggggcggtctggaggcttggtttgagtaggggacaggggcggcctggagatttggctgcagtaggaacaggggtggcctggaggcttgggtggagtaggggaagggctgtactggaggctcaggcacctgaagcttcctacaggcctcggagtctcaccgcggcagcggcagcaggagaggaggggcccgagagagattgagaagagcctgggaccctaccgaccagcgtggtgtccccatgtccccagaatgcagaagacccagggctggggtttggcggggatgtgtggagtctgagatgcctgtggggtgactggccctggatggtccagtgtgcaggtcctgccctggggcaactgtaaacagccgccccctccgttctcccaggggaacatactgttgcttt

SEQ ID NO: 41865 - DNA, 1684 bp, Artificial sequence
  DNA replication origin
ttttttttttttgagatggagtctcgctctgtcaccaggctggagtgcagtggctcgatctcagctcactgcaagctccgcctcccgggttcgtgtcattctcctgcctcagcctccagagtagctggaactacaggcaccagccaccacagccagctaattttttgtattttcagtagagacagggtttcaccgtgttagccaggatggtctcgatctcttgacctcgtgatccacccgcctcggcctcccaaagtgctgggatgacaggagtgagccaccgcgcccggccaacagacacttctcaaaaagaagacacacgcgtggctgacaagcatattgtattagtccattttcatgttgctgataaatacatatcacactcatggcaggaaagccaaggagaagcaaaggcatgtcttacctggtgacaggccagagggcgtgtgcaacaggggacctcccatttataaaaccatcagatctgggccaggtgtggtggctcacatgtgtcatctgggcagtttgggaggcgaagacagctggatcatttgaggtcagcagtttgagaccagcctaccaacatggtgaaaccccatctcttctacaaatacaaaaaattagctgggcgtggcagtgcatgcctgttatcctagcaacttgggaggctgaggcaggagaatcgcttgaacccgggaggtggcggttgcagtgagccgagatcgcgccgctgcactccagcctgggcgacagaaggagactccatctcaaaacaaagaaaaaaaaagatgaagatgttagaaggtgatttgggggtgtggacagaaggggaggggagggagagctggattttggggtgaaggtggttttggaagtctttgaaatccgaggcaggagggaccgggtgggtgctcccaggaaagaccgtctctgccagagggaacagcaggtgcggaggccgtggggtagcggcagtgcgtccgggctgttcaaagaagagacaacaaccctgcatgggtggagcatctggaaagacagagggagaggaggggagggggccgatggacaggagacagggtggctttaaaagccctcagggacattgcacggaacccctcaccaccttgagacagcgtctggcaggacggtttcaggagaggcctgcatggtctggacacagtcagaagctgccattttggggatgggatgtttgggacacagagttggccggaaagcccaggagcttttgtataacttgggtgagtgggacgggctgaagttttggctggagtagggtcaggggtggcctggagtcttagctggagtaggggcaggggaggcctggaggtttggctggagcagggtcagaggcggcctggaggcttggctggagtcggggtggggagagaggccatttattttactatctcctgtctctgaagagaaggaggaagtaaaagttgaaaaacaacaggaatgaagtcagtggcaagaccagccggcacccctgaccaggcctgaggttaaaacattaacccccgactctaaccacacgtgctctcaatctatcagaaccctttcacgtggaaccccttagagttgtaagcctttcaaagggccaggagctctgtcttcggagagcccggttctcgagacgtgagtccgccaacgcttccggccgaat

SEQ ID NO: 41866 - DNA, 1031 bp, Artificial sequence
  DNA replication origin
ggctgggtgcaggggctcacacctgtcatcccagcactttgggaggccaaggcgggtggatcacctgaggtcaggggttcgagaccagcctgaccaacatggtgaaactgcatctctactaaaaatacaaaaaaaaaaaaaattagccggctgtggtggcggacacctgtaatcacagctactcgggaggctgaggcagaattatcacttgaacctaggaggcagaggttgcagtgagctgagattgcaccactgcagtccagtctgggcgacagagcaagacaagaggaaggacgaaaggaaggaaggagggagggagggagggagggaaggaagaagggagggaaggagggagggagggaaagaagggagggagggaagggaaagaaggaaggaaggaagcaaagaaggaaagaaggaaggaaggaagagagagggagggagggagggagggaaagaaggaagggaaagaaggaaagaaggaaggaagggaaagaaggaaggaaggaagagagggagggagggaaagaaggactccacaagggaatgaacacttgcaatgcgtgattccaggtaaacaggaatgaaagcaactctagactctcctgacttctgggaccaggatgccccaccaaggaggctgcttttgaggtccggtgatgtcgtgctgcagaggggatgcctgtgacatttttcagcaatgcaacctaacagcccacttgcttgttttttgtcattcagaggctattgaggcaagaatggcatcaggatggccaagccccacctcctcctggacccctcctggtaccctgcgtggccctgaaaaggaccattctctgatggtagatcaaagtccaggcaggcaaaggggaggaagagatactggtgttttttaaaattcccccgcccaacttaggagtcacccagctggaatgcagtctcctgatagcttctgagatacctcctcttcctccactctcatctctgaaacccaaggccaccagcatgaaggaggaaataattagggaatg

SEQ ID NO: 41867 - DNA, 3956 bp, Artificial sequence
  DNA replication origin
agaaaacagagtggcttaaataacagaagtgtagattcacccagttctggagtccagacgtctgagattaaggtgtctgcagacctgcgtttcctctgagggatccagggaggaatccttccttgccttttctggcatctgttacttccttgacttggggcagcatcactgcaaagttcccatagcttctcgccattcacatcccatttcccccttttcataaggacaccagttgctaaggactaaatatctgtggccaggcgcggtggctgatatagtcggcatgtttgtcttctccaaatctcatgctgaaatctgatccctgatgttggaggtgaggccaggtggaggtgtttgggaatcatgctgaaatctggtctccactgttacaggtgaggccaggtggaagtgtttgggtatcatgctgaaatctcgccccagtgttggaggtgaggccaggtggaagtgtttgggtatcatgctgaaatctcgccccagtgttggaggtgaagccggctgcatggaggtgtttgagtctcatgcagaaatctggtccccagtattggtggtgaggctggatggaggtgtttcgctctcatgctgaaatctggtccccagtgttgggggggtgctgggtgagggtgtctgggtctcacgctgaaatctggtccccaatgttggaggtgaggccggccggatggaggtgtttgggtctcatgctgaaatctggccccaactgttggaggtgaggccagtcggatggaggtgtttggatctcatgatgaaatctggtccccaaagttggaggtgagtctggatggaggtgtttgggtctcatgctgaattctggtccccagtgttaggggtggggctgggtgcgggtgtttgggtctcatgctgaaatctggtcaccaatgttggagggggtgctgggtgagggtgttcgggtctcatgctgaaatctggtcccaagtgttaggggtggggctgggtgagggtgtttgggtctcatgctaaaatctggtccccagtgttggtggtgaggctggatggaggtgtttgggtctcatgctgaaatccggtccccagtgttggaggtgggtctgggtgagggtatttgggcctcatgctgaaatctggtccccagtgttggtggtgaagctggatggaggtgttcgggtctcatgctgaaatctggtcccaggtgaggtgaggctggatggaggtgtttgggtctcatgctgaaatctggtccccaagtgttaggggtggggctgggtgagggtgtttgggtctcatgctgaaatcttgtccccagtgttggaggtggggctgggtgagggtgtttgggtctcatgctgaaatctggcccccagtgttaggggtggtgctgggtgaaggtgtttgggtctcatgctgaaatctggtccccagtgttaggggtggtgctgggtgaaggtgtttgggtctcatgctgaaatctggtccccagtgtttgaggtgggtcttggggagggtgtttgtgtctcatgctgaaatctgttccccagtgttgcagttggggctgggttgaagcgtttgggtctcatgatgaaatccggtacccattattggagatggggctgggtgagggtgtttgggcttcatgctgaaatctggtctccagtattggatgtgaggctgggtggaggtgtttgggtctcatgttgaaatctggtctccagtattggtgttgaggccgggtggaggtgtttgggtctcatgttgaaatctggtctccagtattggtgttgaggctgggtggaggtgtttgggtctcatgctgaaatctggtccccagttttggaggtgggtctgcgtgagggtgtttgggcctcatgctgaaatctcgtccccagtgttggaggtgggtctgggtgagggtatttgggcctcatgctgaaatctggtccccagtgttggtggtgaggctggatggaggtgtttgggtctcatgctgaaaactggtccccagcgttaggggtggggctctgtgagggtgtttgggtctcatgctgaaatctcatccccagtgttggagggggtgctgggtgagggtgtttgggtctcatgctgaaatctggtcccaagtgttaggggtggggctgggtgaggatgtttgggtctcatgctgaaatctcgtccgcagtgttggaggtggggctggctgagggtgtttgggtctcatgctgaaatctggtccccagtgctggtggtgaagctggatggaggtgtctgggtctcaggcagaaatctgtttcccagtgttgtaggtaggtctgggtggaggtgtttgggtctcatgctgtaatctggtccctgaagttggaggtgaggccaggtggaggtgtttgcgtctcatgttgaaatctggtccccagtgttggggatgaggccaggtggaggtgtttgggtctcatgctgaaatctggtccccattgttggaggtggggctgggtgagggtgtttgggtctcatgctgatatcttgttcccagtgttaggggtggggctgggtgagcgtgtttgggtctcatgctgaaatcttttcaccgatgttggaggtgggtctggatgagcgtgtttgggtgccatgcggaaatctggtccccagtgttggaggtgggtctgggtgagggtgttttcgcctcatgcttaaatctggtccccattgttggaggtggggctgggtggacgtgtttgggtctcatgctgatatcttgttcccagtgtttgatgtgggtctgggtggaggtgtttgtgtcttatgctgaaatctggtccctgaagttggaggtgaggccaggtggaggtgtttgggtctcattctgaaatctgctccccaatgttggaggtggggctgggtggaagtgtttgggtctcattctgaaatctggttcccagtgttggaggtggggctgggtcgagatgtttgcatgtcatgctgaaatctgtctccagtgttggaggtgggtctgtgtgagggtgtttaggcgtcatgctgaaatctggtccccagtgttggtggtgaggctggatagagttgtttgggtctcatgctgaaatcttgtccccagtgttaggggtggggctgggtgagggtgtttggttctgatgctgaaatctggtcaccaatgttggagttgggtctggatgagggtgtttgggtctcctgctgaaatctggtccccagtgttggcggtggggctgggtggaagtgtttgggtctcatgctgtaatctggtccccattgttggaggtgggtctggatgagggtgtttgggtctcatgctgaaatctggtctccagtgttgggggtgaggccgggtggaggtgtgtgtgtctcatgctgaaatctggtccccagtgttggagttggggctgcgtgagtgtgtttgggtctcatgctgaaatctggtccccagtttggaggtggggctgggtgagggtgtttgggtctattgctgaaatctggtccccattgttggaggtgagtctgtgtgagggtgtttggtctcatgctggaatcttgttcccagtgtgggaggtggggctgggtgagggtgtttgggtctcatgctgaaatctggtcccccgtattagtggtgaggctggatggaggtgtttgtttctcatgttgaaatctggtccctagtgttggaggtggggctcggtgagggtgtttggtctcgtgctgaaatctggtccccattgttggaggtgagtctgtgtgagggtgtttggtctcatgctgaaatcttgttcccagtgatggaggtggggctgggtgaggggtttgggtctcatgctgaaatctggttcccagtgatggaggtgggactgggtggaggtgtttgggtctcatgctgaaatctgttccctgttggcggaggcggtaccatgtaagggcatagtgag

SEQ ID NO: 41868 - DNA, 828 bp, Artificial sequence
  DNA replication origin
gagaggaagggagagagagagaggaagaaaggcagagagggaggaagaaagagagagagggaggaggagagacagaaagccaggaagagagagaggcagaggactgagagagaggaagactaggaggagagagagaagagggatagaggaaatcagagagagtgggagaaagagagagtgggagaaagagggaggaagagagaggcagagagagaaagagacaggaagacacacacacacacacacacacaggtgcattccacaagctacttagtggaaaagcagattcctaacttgtgtccagtcctgcacatttaggggctatgaaaggctatttccggctgtcgtgctatgtctgtgctctcttcgtcttgggcgtcctgcaacagagaatcaactgaggtcccttcttcaaatgccctcgcctgagtctacataaggctgaggcccaggagggagggggctgcacttgggaccactgggaggccatttgctcctgagccagggatgcaagcggagcaggtgagtcggtgcggggaccctttgctgagcgtgaagcctcagggaattgcaaatgaaagtcagtcccccgtgagaaaaggaagcaatagttctagcagtggctttagtaatgaggtagttgacgagctgtagtaagagcattaattgcagaagtagcacagtagaactggtagtagcaatagtcctggcagtggtggtagtactaattgttgaagtaatagtaactatagcaatggctgtattagtggtggtagcagtcccaacagtcccgtatatagtccttggcgagcatctggagctgctgta

SEQ ID NO: 41869 - DNA, 2928 bp, Artificial sequence
  DNA replication origin
caagcgattctcatgcctcagcctcctgagtagctgggactacaggcgcccgccaccacgcctggctaatttttgtatttttagtagagacggggtttcaccatgttggccaggctggtctcaaactcccgaactaaggtgatccgcccgcctcagcctcccaaagtgctgggatgacaggcgtgatccactgtgcccggccaggaaactactttctaagtaagtgaatgaattttgagtggaatggtctaatcctctaaatcaaaccgtttttgtcatggttgatttctgccttcagagtggttaggaaagtgtaaagagggctgattgtcaacaggcacttcaacatgcctgaaacacggaaagtcaaacaggttatgattgttaaaagtcttgcaaaactcagagcatagctagctcagccctctcgtcggctctatcaagccacacaacaggaacaaaatatctttaataggattttctaaatacgtccaaatcacgtgcatattcctctctgagagatgaaacctctatgagtttaatttgtttgatatttttcctacgtagactacggccctctaattaggaagaacgtcttttgccacattgcagtttaaactgggagactttataaataattaaaatattttctaaaatttccccagtggatatatgctaccaagagtaacgtccagttgggaaggagacctacctaagaagagatatttggagaattattttatgtatctgctgaaatgtttatcacttatattttgttccggttagttcctatcagtagttggctactcagtattgctgtgtcatttcttgtggttggaatgaagtcaaaacggtataggttctgtcgttgctgctggtgttgtttttaaatctcagcataaacacttctttatttctttcttgtttgacattctatcagaatatgtctggaattgattctgttttaaaaagcatgggtgaatacagtcctggggagtgtgtgtgtgtgtgtgtgtgtctgtgtgtgtgtgagagagagagagagaaggagagagaggaagagagaggagggaggagagagagacagaggaagagaggaagaaaggaagagaggaagggagaaagaaagataaaggaagagagggaggaagacagacaagaagacagtaaggggaagagagggaagaagagaatgagagagagagggacggagaaagagaggaagagggagagagagagaggaagaaaggcagagagggaaggagagagagggaggaagagagacaggaaggggaagagagagaagagaatgagagagagacagagaaggagaaagaaagagaataagggggagacagagacagagagaggaagaaagacagagaaggaggaagagagaggaagagaggcaggaaggggggagagagaagaagagaatgagagagagacagagagggaagaaggaagagagggaggaagagagaggaagagaggcaggaagagggggagagagaagaagagaatgagagagagacagagagggaagaaggaagagagggaggaagagagaggaagagaggcaggaagagggggagagagaagaagagaatgagagagagacagagagggaagaaggaagagagggaggaagagagaggaagagaggcaggaaggggggagagagaagaagagaatgagagagagacagagagggaagaaggaagagagggaggaagagagaggaagagaggcaggaagagggggagagagaagaagagaatgagagagagacagagagggaagaaggaagagagggaggaagagagaggaagagaggcaggaaggggggagagagaagaagagaatgagagagagacagagagggaagaaggaagagagggaggaagagagaggaagagaggcaggaagagggggagagagaagaagagaatgagagagagacagagagggaggaaggaagagagagaggaagagggagagacagacagaggaagagaggaagaaagacagagaaggaggaagagagaggaagagagggaggaagagggaggaagagagaggaagagaggcaggaagagggaggaagagaggaagagaggcaggaagagggggagagagaagaagagaaagagagacagggaggaaggaagagaggaagagggagagacagacagaggaagagaggaagaaagagagggaaggagagggagagaggaagagagagggaggaagagacagaggaagagagaaaagaagggcaaaagagagaagaagagaatgagagagacagagagggagggagaaagtgaggaagggggagagagagacagagagaggaagagaggaagaaagagaaggaaagagacgaagagacagaggaagaaaaggaaggagagagagaggaagagacggaggaagagagagggaggaagagaaacaggaagagggagagagaagagagtgagagagagacagagagggagggaggaagagagagaggaagggagagagagagaggaagaaaggcagagagggaggaagaaagagagagagggaggaggagagacagaaagccaggaagagagagaggcagaggactgagagagaggaagactaggaggagagagagaagagggatagaggaaatcagagagagtgggagaaagagagagtgggagaaagagggaggaagagagaggcagagagagaaagagacaggaagacacacacacacacacacacacaggtgcattccacaagctacttagtggaaaagcagattcctaacttgtgtccagtcctgcacatttaggggctatgaaaggctatttccggctgtcgtgctatgtctgtgctctcttcgtcttgggcgtcctgcaacagagaatcaactgaggtcccttcttc

SEQ ID NO: 41870 - DNA, 1023 bp, Artificial sequence
  DNA replication origin
aaggaaggaagggaggaaggaaggaaaaaagggaggcaaaaggaaggactggaggaaaaaagagaagataagaggaaggaagggagggaggaatttattcctcagagcctttgctgcatttaccaattctggttctgcccctatttgaccaaatatctgtggtgactctgagaattctgatttctaagataaggcagatattgtgaatttgaaatagcaaatcccttttgtgtcattcaaaccacgatttcctttttgttagagctcctgttctccagatagcacccagggcacacagagatatttgcctgtgactcttcaaagagcttcagaaagctgttccctctgaactccacacttaacttgtattagacatgctgggctttgcagaagagacacacacagggcttccctttgtccttgggacggatcccctgtgctgtctgcaaggaaactacctaacgctccactgccaggagcagagggcagcaggaatggcatcacccgggatgtctcctagggaggaggctagcagggcttgggcggcaaacgctcagctctctgcaaggcacgcagaggctcgttcgccttctggaaatgttgctatttgaatgcagacgctgttagtagatccttgagttgtgctgagagagatctgagggcacatgtatttattttagcaccgtccacatcttagggcagaaactcacactcagggaagtggctggcaagtaaagagactcctagctgagcttcccaaggagagtttccacgccccaaagttgtggaagaggggacggagtaatgctgtggtcaaagagaaattcagagacttctgcccaggctcagctgccttcctggaagaatgttctgaacattctacaaaggcaacacttcctctccatacctctgctccagccacccagggatcctgctgcttctgccacgatgtcccctgcctcttgcctctctgtacctgctgcttgctccttctggaatgttctggaaaataggtttcggggc

SEQ ID NO: 41871 - DNA, 1787 bp, Artificial sequence
  DNA replication origin
cggggagagagagggagggcaaacgagagagggagagagaaggaggagagggaggaaataggggaaagagagagaaagagagatggagagggaacggggagagagagggagggcaaacgagagggagagagaaggaagaggaggaaatgggggaaagagagagagagatggagagggaacggggagagagagggagggcaaacgagagagggagagagaaggaggaggaggaaatgggggaaagagagagaaagagagatggagagggaacggggagagagagggagggcaaacgagagggagagagaaggaggaggaggaaatgggggaaagagagagaaagagagatggagagggaacggggagagagagggagggcaaacgagagggagagagaaggaagaggaggaaatgggggaaagagagagaaagagagatggagagggaacggggagagagagggagggcaaacgagagggagagagaaggaagaggaggaaatgggggaaagagagagagagatggagagggaacagggagagagagggagggcaaacgagaaaggaagagagaaggagagggaggaaataaggggagagacagagaaagagacagagagaaagagagaaagggggagagaaggaaggcaaaggagagaggaggagagatgggggaaggaggaaagagagagaagtgggacacagaggaagacaaaggagatagagagacaaggggagagacaggaagagaaaggagatagggagaagagggagggtgtgcgagagggaaacagaaagggagagagagaagaaagaggggagagagaagaaagaggggagggagagaagaagggaaagggagggagagagggagagagagaatgggagaaaaggagagagagaagaggggagaaagagggagagagggaaggaaggagagagggagggagggagagggagaatgggagagagagaagaggggagaaagcgagggagggagggggagagagagaagaaagagagaagagagaaagagagagagggagagagagggagaaagggagagagagaagggagaaggggagagagagggggagagagggagggaggagggagaagggaggtcgagagcaaaatagtagaagcggggatggggtagactgaggagagagagagacagagagaaaaagcaaaagagaggaaaagtgagacagtgaagaggtggaaagagagaatgacagagagacggggagaaggaggagagagagacagagagttacagaaagagagagagagaggagaaaagcatttgagtaactgaaaaaccactgcttctcaacccacttcctagaatctcgggagggcggtgggaaggatggagccagtccagggaggctatgggacggacgccctgaacatctagccttctctggcagggaacagcctgccgcagagtcacaacagaccacatcccatgctgctgccaacaccaacactaaaagaacatccaaatgcctcctgttcagagaaggcgccatcgggagaggcagaggaaaccactacggaacagaaagctactctatccacaggagagcagctctggaagagaagcaaacagaaggcacgcagaataaatggtctacacctgtgcagactcaaggatccgctgacgaatgcatgcgccgcgatgcaacactttccgtcttcccgggagggagaccagatgactgtggagcccgagtcacatagaaaatgccaggcgcccacaaagacaggagatggctgctc

SEQ ID NO: 41872 - DNA, 2232 bp, Artificial sequence
  DNA replication origin
gtgggtggatgggtgggtggatggatggatggatggatgggtggatgggtggatgggtggatgggtggatggatggatggatggataaatggatggatggatggatggatggatgggtgggtgggtggatcgatggattgatggatggatacatgagaggatgggtgagtggatggatggatgaattgatggatggacggatggatgaactgatggatggatggatggatggatggatggatggatggatgggtggatggatggatgggtgggtgggtggattgatggatggatagatggatggatggataaatggatggatggatgaatggatggatggatggatggatggatgaactgatggatggatggatggatggatggatggataaatggatggatggatggatggatggatggatggatggataaatggatggatggatgggtgggtgggtggatggatgggtgggtgggtgggtggatggatggatggatgaatggatggatggatggatggatgaactgatggatggatggatggatggatagatggatggatgaattgatagatgggtagtgatatggtttggatctgtgtcctcattcaaatctcaagttgaattggaatccccagtgctggaggtggacccttgtagggggagattgggtcacgggggtggatgtctcaggaatagtttagtgccatcccctgggtgctgtgcttgcaatagtgaatgagttctcgtggcatctggttgttgaaaagtgtgtagcatctccccagcccaccccaactgcacctctgtctctccttctcttgctagggccatgtaagacacctgctttccttcactttccactatgattatgcatttcctcatgcctccctagaagcagaagctgctctgcttcccgtacagcctgcagatccatgagccaattaaacttcttttctttataaattacccagtctcagtgtagcaattcctcaaagacctagaaccagaaacaccatttgacccagcaatcccattactaggtatatatccaaataaatagaaatcattctattataaagatacaggcacacatatgttcattgcagcactattcacaatagcaaggatgtggaatcaactcaaatgcccaagaatgatagactggattaaaaaaaatggtacatatacaccgtggaatactatgcagccataaaaaggaacgagatcatgtcctttgcagggacatggatggagctagaagccattattcttggcaaactaatgcaggaacagaaaaccaaacactgtacactctcactcataagtgggtgcttaacaatgagaacacatggatacagggaggggaacaacacacactggggcgtgttgtgggtgggggtcagggagggggagagcatcaggaaaaatagctaatgcctgctcagtagtgaagtacaaatcaaaaccacaatgagataccacctcacatcagttagaagggcgatcattaaaaaatcaggaaacaacagatgctggagaggatgtggagaaacaggaatgcttttacactgttggtgagagtggaagttagttcaaccattgtggaagacactgtggcgattcctcaaggatctagaaccagaaataccatttgacccagcaatcccatgactgggtatatacccaaaggattataaatcatcctactataaagacacatgcacatgtgtgtttactgcagcactgttcacaatattaaagacttggaaccaacgcaaatgcccgtcattgatagactgaataaagaaaatgtggcacatagacaccatggactactatgcagacattaaaaaggatgagttcatgtgctttgcagggacacggatgaatctggaaaccatcattctcagcaaactaacacaagaacagaaaactaaacaccacatgttctcactcttaagtgggagttgagcaatgagaacacagggacacagggaggggaacatcacacactggggcctgttggggggtggggggcaaggggagagatagctttaaaagaaatacctaatgtagataacgagttgatgggtgcagcaaaccaccatggcacgtctatacctatataacaaacctgcatgttctgcacatgtaccccagaacttaaagtacaataataaaaagaatagctaactcatgctgggctttaatacttaagtgatgggttgat

SEQ ID NO: 41873 - DNA, 1027 bp, Artificial sequence
  DNA replication origin
gagggagagagagagagagagagagacagagagaaaggaaggaggaggaggagaaaggaaggaggaggaggtgaaagaggaggaggagaagcaggaggagggggaagaggaggtgaaggagaagggaaaaaaaaagtagaaggggccaggtgcggtgtctcatgcctgtaatcctagcactttgggaggctgaggcaggtggatcacgaggtcaggagactgagatcatcctggccaacatggtgaaaccccatctctactaaaaatacaaaaattagctgggcagggtggtgcatgcctgtaatcccagctactcaggaggctgaggcagaagaatcgcttgaaccggggaggcagaggttgcagtgagctgagatcgcgccacggcactccagcctggcaacagagtgagactccgtgaaagaaaaaaaaaaagaaaagaaaagggaagggaagggaggggaggggagggaaggggaggggaagagaggggaagggaaggaaagggagaaggagaaggaggaggagagaaagggaaggagaagaaacgaaagaagatgaaggagaagaaggagaaggaggaggagaagtaggaggagatgaggggcaggagaaggaggggaaggaagaagtaggaggggaagaggagggaagagaagaggaaagaagacagggagagagaataagagaatgagaaagagagaatgaaggagagaataaatgaaagaagagagagatgagaaaacctacttgtgaaagaggcctcagtagaagaaaagagaatgagcaaagagcctggtccaggccactctaaatgtctctcaaatgttaaagactgatgaaggaggagcaggaagacttatcacacgtccaaggagacaatgttgagcgacccgcaaacttagcagaagggagaacaggctctggagatgtccagtaatggggtagagcccagactcccacacttggtagttgtacccttcaacctggagaggcctcagttttctcatcagtgaaatgggcccaa

SEQ ID NO: 41874 - DNA, 1484 bp, Artificial sequence
  DNA replication origin
tcaccttagtaagtagccctgggagtttgtagcaaagaaagaagaaacccgagcctcaagaaaatttctccgacgatggtgcccagaacaggggtcaggggtcacgtgtgatgcgcgaaaattaaataagtgataattaagggaaaagaaaaactcagtgcctcattgcactaactgtctggcaagcgcccagtgtccagctgtggacagcacagttgtctggggcagggaagatatggactttcctgcagagagtgctactctgcagcagtgaggtacacctttcagggatgtcccatgatggtgacagagacaccagatacacaggtagcaacagtttcatttgaaaagatcattcccacagatgggagcttttgcaataagaggaggagggactactgtaatgggaggaggaggggctgtgataatgggaggaggaggggctgtgataatgggaggaggaggggcggtgataatgggaggaggagggactatggtaaggggaggagtgtggactatggtaacgggaggaggaaggactggtaacagaaggagggactctgctaatgggaggaggtactatggtaatggaaggagggactatggtaacagaaggacggactatggtaacggaggaggggctgtggtaacggggagggtctacggtaacgggaggaggagggtctatggtaacgaggagggactatagtaacgaaaggagggtctgtggtaacagaaggagggactatggtaatgtgagaaggggggactgtggtaacggagggtctatagtaatgggaggagggactatggtaacggaaggagggactatagtaacgggaggagggtctatggtaatggaggagggactatggtaacagaagtagaagggtctatggtaatggaggagggactatggtaatggggagggactacggtaacgggagaagggactgtggtaacggaggagggtctatggtaacggaaggagggactacggtaatggaggaggggggactatggtaatggcggggagggattatggtaataggggaggaactattgtaacaagaggaggagggactaatgcaaccactggtggacgctgcctatagcaccatgaagcacacccgagcagtgacatctgggagcctcttggagcgcaggcagcataccattttcttttctagggacaggcacgtgatgctcggaacaaccgtgattggggtcgttcgatgtggggttcagtcatggataaaagctgccaaaccctgtggctgcatagctaattttgagcaggtcctaaggaagcgttgcttgatcctctgacgtttgctccaggtgaggctggcccaacatcccggggcctgataggaggagagaaacccaaccaaaatgtgatcacgttagatgggaattttgttcaggtcaaggaagacgaggaattcagtccatccctgaaggggcaaataaagaatgtgaat

SEQ ID NO: 41875 - DNA, 1357 bp, Artificial sequence
  DNA replication origin
tagaattactcctaatgggaaaaacgtgtaaacatgtcccacttaaatgaacatcacgatgcaaatgcttagttatgaggactgaaaatgaacccctttcaacccaaaacgtgcaagaaagagaaatttcggcattttaatgatgcccaaggacaggcagtcaaccaacagcacttggaaagggcaagtctgggcagaggtgcacatcccggccttcctgtgtttcttgggggccattgttttctcaggagggaggaaaagagggagggaggaaggaaaaagggatggaaggaaaacgaaagaggaagggagggagggagaaaagggagggagggacagagggagggaggaaaggaaggaaggaggaagggagggagacagggagggacagagggaaggaaggagggagggaggagagggaaggagggagggagggatgggggaaggagggaggggaggaaagggaggcagagagggaggggagggagggaacggagagaaggaagggagaaaagggagagaagggagggaaggaagggagagaaggaaggaagggagaaaagggagagaagggagagaaggaaggaagggagagaaggaaggaagggagagaaggaaggaagggagagaaagaaagaagggaagggagggaaggaagggagagaagaagagacaaggatgggagggaaggaaggaaggaaagaaggaagaaaggaaggatttgttggctgaagaagagagggagggttggacggaaggaggagggaaggaagagaccatgtgagaggaggtgaggaagacaggaagagaggggtgataaggaggctggggggagagggaaggcgctgatgccatccggatccatccaggctgcctcgtccatggggcctccgtttatacaactatccactaagtgaaggaaccggcaaaaatctctgctcccggggaacactttcaccagctgccggctttattcactcagaaattttgatgccaaaacacccgaaagtacatcataacttgaggatttacagacaagaaagaggagcacagaactgaccgtgggtgccctggaaaaagttgctttcaacaaggaccacaacaaaaataaaaataataataatgataaacctccctccactcccaggatcaaggggttcagacaaactgcagtccagacggacacgcggcagacaaatgaatgaggagctaatgcattgctctggtttattgaacaacagtccaactttacagcattaaataaggggcaaccgttcaggaggggaacgatggcttaaaaataaaaatgaagacagagccgggacagttcacatttccacgtgagtgaggaaaagcg

SEQ ID NO: 41876 - DNA, 1280 bp, Artificial sequence
  DNA replication origin
acccccgctacaagaggctgcccttcctctccgccttcgagcggcagcaggtggagaatcgcgtggtggaagaggccaagggcctgctggacaaggtcaaagacggcggctaccggccggctgaggacaagatcttcccggtgcccgaggagcctcccgtcaagaagctcatgcggacatccacgccgccgcccgccagcgtcatcaacaacatgctggccgagatcttctgccagacaggcggcgtggaggaccaggaagagtggcatgcccaggtggtggaggagctgagcaacttcaagtcccagaaggtgcttggcctcaacgaagaccccctcaagtggtggtcagaccgcctggccctcttccccctgctgcccaaggtgctgcagaagtactggtgcgtgacggccacgcgcgtcgcccctgagcgtctcttcggatccgccgccaacgtggtcagcgccaagaggaaccggctggctcccgcgcacgtggacgagcaggtgtttctgtatgagaacgcccggagtggggcagaggcggaacccgaggaccaggacgagggggagtggggcctggaccaggagcaggtgttctccttgggggatggcgtcagcggcggtttctttggcattagggacagcagcttcctgtagcgaggaagcgtgttgtcttacaagtcatccccgcagcagcccattggatgctttgctgtaaatacttacccggtcagcttggttttgaacctcagagaccatccactgtctttgacacctagaaggtggaaaaaggaaagagatttgagaagtgagagagggtcgggggcggtggctcctgtctataatcgcagcactttgggaggccgaggtgggcagatcagctgaggtcaggagatcgagaccagcctggccaacatggcgaaaccccgtctctactaaaaatacaaaaattagccaggactgatggcatgtgcctgtaatcccagcttctggaggctgaggccagagaatcgcttgaacctgggaggtggaggttgcagtaagctgagatcgctgcactccagcctgggcgacaagagcgagactctctcaaaaagaaaaaagaagacacaagagaggtggctttgagtgggtttcctttcctcccctattcccggggcccggacgacttctgcttgggaactgccaacgcttctgcttgggaattgcgtgcagcagagcctagaggagctgttccttccttcacagatacttaagacctccaccatgtctgattcg

SEQ ID NO: 41877 - DNA, 2309 bp, Artificial sequence
  DNA replication origin
atcccatctctattaaaaatacgaaaattatttgggtgtgctggtgcatgcctgtaatcccagctaccagggaggctgagagaggagactctcttgaatctgggaggtggaggttgcagtgagctgaggttgcgccactgcactccagcctaggccacagagccagactctgtctcaaaaaaaaaaaaaaagaaaaagaaagaaagaaaaaaaaagaaactgttttgtcatagaggtgtaacaccttgtgtttgttttaaagcttccttctataggggtctgtcttatctatgtaaaagctaggttatgtctgacggcgtgacatttattccttagttgatttagagagagccatcctttgcattttcgcgcccaagcacgtccatgcatgactgtaattatctttaacagcatatgtggttacgcgatatggcgacatccagacattccgctgtcgtctgtgtttgtccttggaggcattattaagtcatttcttcagccgtaaacatcttatgaccatgggccgtgaccggcaaggaatgtgtcttcctggtttttaagatggagttgatgattaaaatggtgtcaccccagctctcccaggctcctgtctcccaaacacagcgggtgttaggatctgtgtggagtcccggatgccaggtctggggtcccctgggggaccaggtgtgggactgggagggttgtggtggggtgaaggtctgagtgtctgggtggggggttccatgaagaattccagtaggagtctgctggggggtccatgtgggatttcagccttggccctggtaagggtctgggtgggggttctgtgctggtctggggttccctgagggagcccaggtaactctgtggttgtctggggttcccaaccaaggtctgagtaggggtctgctgtcccagtagggatcagggtggggagggggctcgtggtccctgaagtagtctggagttctctgcaggggccgggaagggggtctgtgatccctgcagggttgttgggggcagggaagtggaggggtaggtttggtgggtggtgtctgtggcctggcaggaattggggtggggtctgtggtctcagtaggaactggggtgtggggtccgtgcttggggcaggttctgtggtgtcagcaggaactggggtgtggggtccgtgcttggggcaggttctgtggtgtcagtacgaattagggtgtggggtccatggtccttacagctgttcagagtcctctgtgggagtcctggtccataatcctggcatggctctgggtggttgtctggggttccctatggggtccaagtccttgtggtccctgctgaggtctgcgtggggttacatgattctggctaagatggggagggtggttcccgtggtggtcctggtcccctgcagggtctgggtaggggatctgtgatcccatggtgggggtcctggctggggcttgaatggggttccatggtcttggctggagtgtggggtcttggagaggcagtccagctggggtctgtagtcctggggggcgtcctggcaggggtctgtggtcttgtggggtgctggctggggcctgtggtccggggggtggttgtgatggaggtggaggtcctagaagggggccccagtaggggtctgtgatcctggagaggggtcctggtggtgggggtcccagtggaggtctgtggtcctggggggccctgggaggatctgtggtactggggagtcctggtggaggtctgtagtcctggtggggttcttggtggggtgtctgggcgtgccccagtgggggggcctgtggtcttgggggtcccagcaggggtctggggtcctggggggtgttcttgggaggagtctatggatctgacttgggtgctggctggggtctgtagtcctgggggcgtcctggctggggctgttggtcttgtggtggtggggatccctgctggggtctgcagtcctgccgggagggggaagggtccctgctggggtctgtggtcctggaggaggtgtggagggtccctgctggggtctgtggtcctgggggggattcctggctggggtctgtggtcctggctgggggtgtgtgtggggggtccctgctggggtctgtggtcctgaagggggggtcctgactggggtcagtggtcctgggggcgtcctggctggggtctgtggtcctgggggggggggtcctggctgaagtctatggtccttgcaggggggggttcctggctggagtctgtggtcctggggggggtgtcctggctggggtcggttgtccgctcggggtccccagtcc

SEQ ID NO: 41878 - DNA, 854 bp, Artificial sequence
  DNA replication origin
ccctgggaagccgaagccttgggggtggggggagtaggtgtcctccaaagtcctctggcccctgctccagaggggagagggacagatgtgacaaggatgaggctttgccctacaccaagtgtgccgggcaagtttgggaaggtgaagcaatctgtgacttaaataaatatcttcttagccagaaaaatgcctgcctttgaatatttctctgggaaaaaaaaaaaactgtgaggaagaacacccagtttaaatagactgccaatttatgcgtgggcatggcttcctttggtaatcagggcagacagaagctgtttgggggctcacttcggatcagacggagctcggcttggtgttatttatgttcattcctctctgattaacagtttccagccacttgagggttaaggaaactaaaaatcctaggacttttttttttctggtcccaggataatctatagattgcttgtccggggaatctttggaaatcccgtgggactgcaaatgtctgatttgggatggttagggtgtgagtgtcagtgtgactgtgactgtgtgtgtgttttccgtagttaatactgtagttgacacagtgagtggtactgcagcacctaactcatgtccacagatgccagtgtctgcaaagggttggggagggagcgggggggcgttagggggaacagacaccactttcaggataacagatatgatttgagaaaatgaaaacatttgcaaagtccctccacattctccattaaaatacattctcctgggactctgtggctgggtgcgtgtattacatctcccaagatgccaagtttgtctctggaatttgttgcttctcctcagcctggccc

SEQ ID NO: 41879 - DNA, 900 bp, Artificial sequence
  DNA replication origin
gtgatcctctggtacatctgccgcgatgtggactgtgaccacggcatctgagcgccgcggacccccggggtcgccaggcggggggcgcccccagcgccagggccatggggactgagccgtcccgcggtgccccccagctcggcgcccgcgccccctactccgggccccaccgcccgccctgcacctccaccgcctcctggccttgaccttcagggacgcaccggggagagcgggtgagtgcgctcgtgcgggcgctttggggggccacggttggggagccccaacttcggggaggacgcggaatccggacgcgggactgaacccgaggattcacggagcccggggctcccctatggggcacgggaagcggcagatgcgcgtgcagagaggtgggcgcaggccccccctgtaccccctccaggtccgtcccacccaccccctgggcgccttgggtccaaggcgcataggcgctcccgcctgtggccgccaccggtgcagcagaacgcgggctctcgggtgggtccaatgcgctatggcacaccaggcgctatcgggtccctagccctctgctccggcggtggggaccccgcactcaagttccctataacctccatggacaaacacggtgagcgcgaggctaggaacagagtgagcgttatccacggccaagggacacctctagggagcaatgggaaacaaaatttcaaccaggtcggaaggcggtttgcctttctcacactgccaagccccccctgggaagccgaagccttgggggtggggggagtaggtgtcctccaaagtcctctggcccctgctccagaggggagagggacagatgtgacaaggatgaggctttgccctacaccaagtgtgccgggcaagtttgggaaggtgaagcaa

SEQ ID NO: 41880 - DNA, 1533 bp, Artificial sequence
  DNA replication origin
gcgcgggagggcggggggcgcgcgggggcgcggggcgcggcgctcacgacccccgagcgcgcccggagccccgcgccggccccgcgccgcatccgcaatgctccgtgcccgggacagacgctgcctgggtggctgctcggcggcggcggtggtggcagtggtggctgctcggaggccggcgcgctcgggtgcaggcggctgcgcgcggggctcccaccgcccgggtccccccagctgctggcgctcaccgggcccggcggccgctgggctgggctgggggcacggggggccctgggggcggccgggaggagggggcggcggccatgggggagagctggaggaaggcggcgcgccgggcaagtcccccgaaaacttggggcggaggcggcgcggtgacaggtggaaacgccagccccgcgggcagcagcgcgcagccgtccactggcggcggggggcgcgggggcgcgggagggaggcgcgggggcgagcgcgcggggaggggctgcggcactgggcggggggcctccctttgcagatggggagggtcgggggagagcaggcgtccccgactgcgcgcctttccatcacctctcccacctctctgcttttcccggccccctctctccagcgcagcggtggatatctctctcgtccaggtcttgcatctcaccccttctttgggagtccccttcctttcctcttttcctcactctcaccctgcaccccggtatgggtgagctgcgatattctcatcaaagaatgaaggtgctcatggagagaagctgccccttctctctttctctctctctctctgtgtctcttgtacagggaagggggtttcaagttgcaactaactcattgctgataccaagcaggatgggcccaggcaggaaaaaagtacacacccttgcccagagtcacagcttctataaggggaagggggagactgggttctgtgatgaaggggtgaggcagacgtcttggtgtgagactcagtcccgtgataaaggggcgatgcacacagacgccttagtgtaaggatccaggtttctgccctcgcatcacagaaagccctccaccccacgtttgtcccttactctctggggcttagccctggggaatggagagacaggcatggtggcacgtgggtgcacacacatttttcctgaagtgtgagctgtgtttagggctgatgtctggtggagacacgaacaggtcagggcacagcacagaaggccgaaggagcccaaattcttgggaaaggaggtagttcctccctagctgggcatcctgaatactctctttaagggagggagggagctggggctgttggacaggggcatagggcttgcaccaggaatccatgacatggtaagaacagggaccacccagtttcccagcaaatacacaattcaggcctttcatgccctgatttttgtctccgctccctgtggcccctaacaccggtgagcaggagctgttccacgatgcctggtagaagtcttcgcctgcctgcagtgacacactactgag

SEQ ID NO: 41881 - DNA, 1274 bp, Artificial sequence
  DNA replication origin
gccccaggaagagcgctggggagaaagtgggcgcctcctccggacctgggtccccgtgggcacagcgcgtcccgccgggcacggaagaggggccgggtgtccccgcggggcgccccgcccctgcaccccacatccccaggcggatccccaggcccagcccgcgccaccccccgcgtcctcccacccggatcccgccgctcgctcaccggggcggccaccagacggcggagcaggccgaggagccgcagcgccagcacggccccgcgcgccacggcgcgcccaaggcgagcagagatcgtccgcgagtgcagcgcgcgggcgaaggcggcgggacggaacctcccccacgggccgggtggggcggagcccgcggaggactcgaaggggttgggtgaggggagcagccctgcaaactcagcccaggctgcgcctgccccgccccgccccaccccggcctccactggcgcacggaaggggagggaacgccgggcccggggaggggacagaggagggggcgggcggaggtggctcgggccgcgccgaggggaccacgggacgccctccttcccttctcaggaaactgtgagtgccccccgcccacaagcccgtcgccaggatgccgccaactagagcaaagtgaaacccccaacattctcgggaaagtgcgggtccctccctctctacagccccttaaatgcacgccccagggcggcccctacctggagccaagagaaaccgctgcccttcttggagaggtgtgggcctctccgcgcccgcccttgctgtcccctctctgttcctaacaggcaccccccccaggcagccccaacggggaggaaatgaaactcttcctgctcctctgctcggaaaactatggggcccccttccagctgctcacggggcgctcagggcgatccccaaggggtgcaaagtgcaatcccctccctgcttagaaaggcgtaggccttgacaggcagccacggcccctggtcctttctggagcgtccgagctgggggcgctcagtggtgaaagatggcgggggtggggggctttgagacacactgcggatacccgctctgcgcgggaccaaggacgttctgccgcaagctcagagacagggttgggagtgaggacttgtggtcgtggtttggggttgggggtaagacccctatctgggtcgcctggctgagtcctggtccttggcgactcaccccagcaggctgcgtcaggggcccttcggtaacactggtcttgtgctgtctcaggcctgcgg

SEQ ID NO: 41882 - DNA, 1644 bp, Artificial sequence
  DNA replication origin
ccgccccctcctctgtcccctccccgggcccggcgttccctccccttccgtgcgccagtggaggccggggtggggcggggcggggcaggcgcagcctgggctgagtttgcagggctgctcccctcacccaaccccttcgagtcctccgcgggctccgccccacccggcccgtgggggaggttccgtcccgccgccttcgcccgcgcgctgcactcgcggacgatctctgctcgccttgggcgcgccgtggcgcgcggggccgtgctggcgctgcggctcctcggcctgctccgccgtctggtggccgccccggtgagcgagcggcgggatccgggtgggaggacgcggggggtggcgcgggctgggcctggggatccgcctggggatgtggggtgcaggggcggggcgccccgcggggacacccggcccctcttccgtgcccggcgggacgcgctgtgcccacggggacccaggtccggaggaggcgcccactttctccccagcgctcttcctggggccaggtgggagccgtttcagaggaaaaagccagcgtttctttcgtaaaccaaaaagtatctgggacaagtcccaatccttttgagttgattcggcgaagatcaggaaggagcccgggagacgggtctatgcctttctccaaagatactattgagagcttcggtatttaaagggggaaagcacgctggaggggaaagaaggaggaaggctcattttaccgaattcacctgttgcaaaagaaaagcagcaggtagaatagtcaattatgtatttgtcttgcgctcactaaattggcactttactaagataaggtcaacagagagttattgcactgtctgcttgggaacagaaggaaagacagcttcctgcctgactcagcttccagctttattattattattattaattattttggcagagtgaactggggttccaagttttaattttccttctacagtttgcagaatcgcaaactcttaaatttaggggaacctggggaagaggtggcatccgattcccccccaaccctggtgacgttcttatggatcttatggatactgcagtctctcttctctttctgtctctcctctcttctctttcctttctctctctcctcttctctccctcttcctctctctctcctctcctctctctctcttctctcctgttccctctctctcttctctctcttctttctctcgcttttctctctcctcactctcctctctccctctctctcccctctttcctctttctctcgcctctctctcacctctctcctctctccccttttctctctctccccctcttctctctctccccctcttctttctctccttttctctctcgtctctctctcctctcctctctcctctctctctcctctcctctctctcctcttttctctctcccatctctctctctcctgtctccttctctcttgtctctcgcctttctcctctctctatctcctcactctctccttctctctcctctctctcttgtctctctcccgcctctctcatctatctcctctctctctcccccctctcctccctctcctctttctctcctctatctcctctctccccctctttctctctcctctctctctcttactccctcttt

SEQ ID NO: 41883 - DNA, 1463 bp, Artificial sequence
  DNA replication origin
aatggcagaatatatggagcaaaggtgccagggtggctggtgacactgcaagacagctgtgccaggcccagaccaactctcctgacctcattacaggacagaagagtacgtttttaatcttaccatttaaaaagtcaggtttgtttcagtgttatttaaatcactttttatttctggtctccactgccaggggctgagcccaatttatagcagagacctcctgtgaggtacttgtgggcagccaaggcagttaagaggtgtctgagccacacgcaatgtcggctgtacagatgctcaaatgaagtttcctgagtcagtgggaggatggaagtacacatgggtggatgggtgggggttgtggatgtgtggataaatggacagacatctggatgcatggattgactgagagataaatgggtagatgaataaataaatgggtggatgaatgaatgcatggacaaatgggtgggtgagtggatggatgggtgggtggatggatgaatgggtgaatagatggagggttggatgaatgggtaggtggatatgtgggtggatgaatgaatggatggataaacacatgggtgcgtgggtgaatggatgcatgaacgggtgggtatataaatggctggctggctggatggatgatagataaggtttcagtaaatgggtggctgaatgtatggatggatgaataaatggatggatggatgaatgggtagatgggtgggtgggtagatggatggatggacagatggatgggtagatgggtgggtgaatggatgagtggatggatcgacgagtgggtgtatgcagggatggatggatggatagatgaatagtttggtgaatgggtgggtgggtggatgtgtacatgaatggttgtatccatgaatggatggatagatgaatagtttggtgaatgggtgggtgggtggatgtgtagatgaacggttgtatccatgaatggatggatgggtgggtgtgtggatggatatgtggatagatggatggataactggatggatggataaataggtgcatggatagatggatggacgggtggctagaaaaatagatggatgaatagatggaagggtgagtggatggatggattgacagacttacaaacaagtaaatttctacctgatatttttgtattgttgtataactttctaggtgttcattcattgaggaacaactgtgaaacaggggatctggattcattagcccacctctgctgatgaggaaacatcctggggccgttgagcttgtcagcggtgggctgggattaaaatcaagagccctttgcttctgagtccaggccgtatgcagcacattgccttgtgactgcctcaaaaccaccggaattttcctcagagcgttcacagcaggcaaagataaagagtgtcttgtagcccagagttcatacattggaaattttacggtgtgtgcccatcagtgct

SEQ ID NO: 41884 - DNA, 1134 bp, Artificial sequence
  DNA replication origin
ccaggcgtgagccaccgcgcccggcctagtttgactcttttcgtggacagtttgaagtgtggaatgcaagaatattcagggttatttgtcaggctgcaaagttgttccactaccctgcgggaaaatggatacaattttaggcttaggtgttaacagataacattgttaagtgtgggaagggcgacaactgcactgcagctgtggccagtggcgcgggagggtgtctaaactcaaagcccactggaaggcgagtcgcccatgaccaggactagggcccaggtgccccagatagaaggcacctcgttccctattgcccctcactaactcccgtgaccaggagtccccactcccaaccttgtcctggggattctggggagaaactgccccagcgcagaggctactccaagggttgtccttggtccggcgcaaagggttcgtccgccaccctcccggctgcgcaccccgcgctcggacgctctagaaaggacttgggacgggggttgcctgtggagcgggggcctaggcttcctgagcagggagaggattgcactttgctccccttggggaactccctgaggtgagcagcggggaggggcccccatacttttcccagcaggggagccgggagtttcctctgctcccactgcagagcaggggagggtccctgctaggggcggagaaggggctgcaggggcgagtggggaggggggctacacgtttccaagaagggcggcagtttcgtgtcgctacagttgcaggcgtgcatttaggaggctgtagacagggagggacccgcactttcccgagcaggggagctgctgggaaagtttgtttttttgctcccactggagaccagggggtgaggggcggagaagtggctgcaggggcgagtggggagagggggctctatgtttccaagaagggcggcagttttgtgccactacagttaagggccgccctcgggcgtgcattcagagggctgtaaaccgggagggacccgcactttcccgagaacgttgtagttcactttgcttcgggtcggcgccgccctggctacggccctgtgggtgggtgagggggcgtgggcagtttcctgagaaggggcggggcgtgtaccgtactcccctcggcgct

SEQ ID NO: 41885 - DNA, 1486 bp, Artificial sequence
  DNA replication origin
atctgcactcctcagcagtggcaacagaggttgcccaccatctggcccctgcagctcctctagtctgagatgaactgcagctgccccatcatcactcttactgcttgtctaccaggctgagaagaggcccttcctcttccttacacctggtttcctctgctcattcttggaagctcagtgtccagggagggcccctcctgggagaactctctctgaccccctgaacaagtgtagtccctgctctgtgcctccagacatccaggccttccatccacaatggtgcttttatgcccaaattgatgccctggttgttacctccaaagcagagaacaaaaaacagggaccacagcaaatagcaccaatagtacatttaacttcaacctatgctggctgaaggaatacatgaaagagccatggactgggagggtggatggacaggcaggtaagtggatggatgggtgggtgggtaaatgggtgggtggatggatggatggatggatgcatgcgtgggtgagtggataaattagtgagtgggtggatggttgggtggacagctgggtggatggatgggtagttggatgggatgagtggaaagatgggcagtaaggggatggatggaggtaagggtggataggtggatggatggttgagtggatagatgagtttaggtgggtgagtaggtaggtggatggatggatgaatgcatggataagtggatggatgggtagttaagtggatgagtgggtgggtagacggatggaggtatggatggatggttgggtggatggatggttgggtgggtggatggatgggtgggtgggtgagtaggtggatggatggatagatgaatggatggatggatgaacagataggtggatggatggacagatggatagatgaatgggtgaacggataaatggatggatggtagatgggtaaattgatgaaaggatgggtgaatggatggatagatgagtggatggtggacagatggatgtatcaattgatgagtggctggatgaactaaaaggatggatgcatggatgatgcatggatggaaagatgaatggagaatggatggatggatggacaggtgcattaacggatggataaaggaatgggacgacggatggatggatggatggatggataaatggatggatggatgcacgcatggatggatggatgcatggatgaatggatggatgggtaaatgaatgggaggatgggttgatggatggatggatggacgaacggatggatgggtaaatgaatgggaggatgggttgatggatggatggataaaaggaggatgcatggctggatggatgcatggatgcataaatggatggataaatggatggaaggacacatggatacctagaacacggagaccctgaggagctggagaggcctcagtgactggtctaagttcaccaccaggattcaagggagttctcttccatatcaaaatgcccatcactga

SEQ ID NO: 41886 - DNA, 1052 bp, Artificial sequence
  DNA replication origin
aaaggaggggggaaggaaagaaagaaaaataggagaagaaaggaagaaagaaaaagaataagggaaggacggagggaaggaaggagagagggagaggagaaaggttggaggggaggaaggaagaaaggagggtggggaggaaggaaagaagaagggggaaaaggagagagggaaggaaggaaggaaggagagaaggaaggaaggagagaaggaaggaaggagagaaggaaggaaggagagaaggaaggaaggagagaaggaaggaaggagagaaggaaggaaggagagaaggaaggaaggagagaaggaaggaaggagagaaggaaggaaggagcgaaggaaggaaggagagaaggaaggaaggagagaaggaaggaaggagagaaggaaggaaggagagaaggaaggaaggagagaaggaaggaaggagagaaggaaggaaggagcgaaggaaggaaggagcgaaggaaggaaggagagaaggaaggaaggagagaaggaaggaaggagagaaggaaggaaggagagaaggaaggaaggaagaagggagggcaggaagggagagggaggtggcaggaaggagaaaaggtgatgagaaaccttctattaaaatacaggacatgcgaaaccatatgccccgtttggaggttcaagctctccttcttgcagtctctgcatccccagtgaatgtccgcaccacacacaaacccgtgttccagccgcctcctaccaaggcaatgctaggctgttatgtaaaccatgctttcaaatacggtgtttcctctgtttggaagaagtctggccattgcacagccctgaagctccaattttcccagccatggccgactccacctcctttgagccatcttcctcaaacctcctcctgccctcgtctgcccatccacactgcacacccaggttcactaagcagggcagtcacaggctgcaccctgagcactcctgacctgatatccacatccatgcaatacatatttgctgaatgaataaatgaatgaatgaaagaaagtgagataagccatcattctggaagc

SEQ ID NO: 41887 - DNA, 1291 bp, Artificial sequence
  DNA replication origin
tctctgtgtcactcaggctggaatgcagtggtgtgatcatagctaactgcagcctccagttcctgggctcaagtgatcctcctggcagatgggactacaggcgcacaccaccaagcccagataattttttgtatttttttgtagagacagggggtctcactatgttgcccagactggtctccaactcctggcctcaagcaatcctcccgcctccacctcccaaagtgctgggttgcacccggcttgcatttcacacgtttaataaactcaatcagcatgtttcctaccccctagagtgacaatggtgcacattagcatggatttcttatagatcgagaccaaagacctaattacttatctatagaccaatcttggagaggaaaggcagactccaagggttaattcggggtccaggaaccacagaaggaaggtctccttggatctcgtttgagcctgaagtagctcagtctatgacagacaccatcagagggcagaggcacaggtgaacgcagcagtcggaactttgtcagagcagcaaaggacatcttaggaaatgaggcttgcaaagcagccttgggttattgagaaagctctctcagcgtggattctcagggctctgggatcttctctgccttgcaggtgcctctttgttttttgggaggaagcaggtgggtctcatgtgtcagggcagtaaggagcaggaatgaatggatgaaacaaatctgttggggtgggtagcggctgtgctctggggagccaagagagagacagggggatggtgctggtttcagacaagatagttgagcaggaacttgaaagagaaaaggagagtggatcgtggggacctgagaagctggaattctccctggggaatcggccactgccaacgtgagggctggggttaggagcatgcctatggtgatggagaagcctgggggaggtgcctggttgatggggcaagaggagccatctggagagaaggaaaagcctggagtctccttccgggcttgcttaaggactagggaggggcaggacatgagatgatgttggaggattctgagcaggggatgggcctaggtgggaggtggggcagaaggagagctggacgaggacatggtgagaggtgatgttggctcatccaggaaggacggccaggaggaagcagagggaaaggggcatgcaaaggtccagaggcaggagcaacggggaacatccagggaaggagggaagggcaggggatttggagatggggcaccctgagagagggatccaggcagcaggcagacacgac

SEQ ID NO: 41888 - DNA, 2164 bp, Artificial sequence
  DNA replication origin
gcgcgctggccttgggcccagggccttaagtcatcgcaaacgtttactttggggctggctgattaaaggttaaatgtccaaacctagaaaccgccgactgccgaaggggccgcggcgggcgaggggcggggcgcgggcgtggatcgcagcccccggcggttcccgggtctctcttcccggcagccggggctgggcaccaggcggcgcgcgggcttgcgggcaggggctgcagggaggaggagaggacccgcgcccgcgggggctggcggaggcggggccgggcttccggacagaggccaatcgctgccctcggggcctccagcgccggctctgggccgaggcagccagagcgcggaagaggtgcggggggctgtagggggctgcaggggaccgtgggcagtggaggaggcctgggcgcggcggggggccggggggcgcagaggctgcccgaacgcctaggaggtctcgagggtgggtggcgtacagcggggcgggggcgcaacccagaggccgaggctgggggctgggggaggggcgccggactggagtgcaaaggaggggcgaggggcgcagggggctggaggtcagaggttgcccaagcgcgaaggaggggaggggtgcggggcgcgggagtaggccaggagcgcttaggggtgagtgcgccgagccagggcaccgagtgctggggaatacaggccgtccaggcgcggcggggcgcggggagacggaggctgccggagtacggaggacagacggggcgcgggcgtagggctgggaggcttggggaggggggcgcgggcccaaggcagaggctgcgggagcgcggggcaagggagaggtgcagagcgtggagggggctcgggggcgcttggggaggatgggcggcaggccgggtcggggaggaggggcggcgagaggcgcaggggtaggccggggggctgcactggagtgacgagggagggggcacctggccggggggcgcgggcagaggcagcccaagctcggaggaggtgcagatactggcgtccgggagcgcaggggtggtccagggagtggagaggggtgaccggggggcgccagctggggtggaggaagaggatgcccagaactccaagcaggtgcgcggggcggcggggcagctgctgacaccgctgaggtcgggtggtgtcccgggggcgttgtcgttgctgggcgcatgggtgttaagacgcagcggggtcgcaggtgactgtggggaggacagggggtcaaggggcccctggccagagggcacgaggctgacctggagcgccaaggaggaagtgcggggcgtggaggtcgcaggggcatcgggggaggcaggggccccgtggggcgcaggtgacatggagtgggtaggaggccgggggtgacactggcggggcctgcagccgagggtgtcgagactgccacgctgtcgcccccaggcctggaaatccacgcggattcccggagacggcgcctctgctctgcgggttcgtggcgaggaagtccacccactgctcccgggcgcaggtctgcaggtccgcgcccactgcccgcggcgccactgaccatgtcgggtgagtagctcaagctgcttcagttcagcctgcctgttcctactggcttgggtgacagattggtctgcactggggagaaccccactttgaccgcaggattgccccaaaccccgagtctcccccttactgcctcgcccaggtctctctggggctggagggaatggagataccagcctcagctgctgggagggggtgatttacagcaagtgaagggggccttgggatttcaccagtttccttttgtaaaatatagtcctgaaactttcaatgggcttgtttcttgggaatagcattgaactgcctgagactgtcactgcctggaaggccgatgggaagaagtctgttctcctgaaatggccctaaagctctgggaagaggctgccttgagttcttagaactcagaccacggttttaatttctgtttccagtacagatacagggatggcccggcttggtggctcaggcctgtaatcccagcactttgggaagctgaggcgggaggattgcttgaggccaggagtttgagaccatcctgggcaacatagggagaccacatctctaggaaaaaaatttaaaaatcagct

SEQ ID NO: 41889 - DNA, 1566 bp, Artificial sequence
  DNA replication origin
ctcaggtgatccacccgtctcggcctcccaaagtgctgggattacaggcatgagccacctcgcctggcgggaaaatcctaactttccatgcctaagtaacaaaaggaccgaaggcttccctttgaccttttctattgggtagatagtagactggctgtctgcaaccaatcggactgatttcgggtctagtcttcgtgtgcaactttgtgacttcaccctagtctctgattagttgggttttgcaaccaatcagatgtttgcacaggagtgtgacctttgtaacttcaccctttggttggctgctgcctgcaaccaatcagactgatcgcgggccaccacttcagttacatgaggtgagcatgaagtggccaatgggaaacttctagggggtatttggacccaagaagattatgtacccgggcccttgagccgctgcttggtcggctcccacactgtgacgtgtccttttgttttcaataaatccctgctttccttcttttgttgcttcattctttctttgctgggcgttttgtccaattctttgttcaaaacgccaagaacctggacaacttgcagtcacgaccctctaccggtggcactggggcgcaaatgaagctgggaatgcaggacccggcgcatctgaggaagtgcagcggggcatggcggtgctagagggtggggacatggaggcggcacaaggccaaggcgccgggggatggccagagggaagtaacggccgcgcttgtggtggagatggggacgggacagagaagtcttggggggtgaccggggtaggcacggcggtgctggggggagggcgcccaatgaagcccacgggggggaaaggggcgtgtcttaccgagcgtgttgggggagtcacagccgtgcttgggaggatggggtctgggggaaggacggggcgcgtcttagtgggatgagggggagggcacagccgtgctgggaaggcaaagggccggggggcgggatggagcatgtcatggtggggccgaagaggcggggggcgggaaggggccttcttagaaatcgggagggcgtcacagctgtgctcgggaggacggggcgttggggagggacagggagcgtcttagtggacccggggaacacggccgtgctggaaggcatcgagctggggggttgggggcgggacggggtgcctcttaggaagtggggcgggcaaggctacgcttcgggggatggagccttggggcgggacggggcgcgtcttagtggggcagagcggggggcgcggttcggggcgggtcttagggagcctttgaaggccgaatccgggcagcggtgtagctgggcgtggaaggcggaggacccagcagggcgtgaccggcccagtttccgctccctccgggtcccggccagccttcctccgccctcccttcccttcctcctttgttctctttccctgcccttccgccttcccttcagttcggtctcctccacccgcccttcgtcccctcagtcgccccccatccctgggctctgctgtctggcgtctttcccgggcacagaacgcgcctccagctacatttt

SEQ ID NO: 41890 - DNA, 865 bp, Artificial sequence
  DNA replication origin
ggaaacgaaggaaggagcgagggagggaaggaaggaaggaacgaaggaaggaaagaaggagcgagggagggaaggtgggaagcagggagggaaggagggaatgaaggaaggaaggaaagaaggaaggaaggagagaacgaaggaaggaaggaaggagaggaggagggaatgaaggaaggagacaaggaaggagtaaaggagggaaggtgggaaccagagaaggaaggagagaaggaaggaaggaaggaaggaaggaaggaaaaaatgaaagaaggaaggtgagaaggagggaaggaaggagagcaggaaggagtaaaggagggaaggtgggaagcagggaaggaaggagagaaggaaggaagcaaggaaaaaagaaggaaggaaggaaggaaaaaagaaggaaggaaggagagaaggaagaaaggaaagaaggagggaaggaaagaaggagggaaggaaggagagaagaaggaaggaaggaaggagagaaaaggaaggaaggagggaaggaaggaaggagggaaggaaggaagatgaaggaaggggagagaaggaaggaaggcagaaaggaatcacaatctactttgttgcaactgcaacacataagtcctggttgttgtcatagctctctagatcaatagtgagaatcgcttccgtgtccgtaaaataatgaccttgtagccactcctctcaccagcctgctcttttccaagcatcctttgtgaatttctcatggaacatggattcacagccccttcccagtcccagtttcccacattaagctgcagtccaaggctggcatgatcctccagatacccattccatggcaacccacatcacctgtatgtaactgattacatgagca

SEQ ID NO: 41891 - DNA, 1049 bp, Artificial sequence
  DNA replication origin
gctttccccgcccctgcctgcgcgcctgacctcggcgctgggctggttccaagggcagccgcgccagtccccagcgtcctgtgcctgcgggcggacttggcccgggcgttccataggactcttcagccccaactccctgtccggcctcccaccccggcaccaacctcccgggagacccaggaaactcgcccccagacaaccctaatcccggggactcggggtcgggtctctccgccgcggagaaagcggcctggcgccagctaggccgccagagacggtctgcgaaccccgccgggaagcaggggtgggggcgtgaggccgtctgctttcgtcttggccctgggcagacaacctggagtggccgggcgggcagccctgagcccctggccggcttccagagtccgctgggtcgcgtcgagctggctgcgggatgaattacgagctttcccggaacgcggctggggtggccctgcgagtccccgccgcccgggactcggacaccaaaccccttttgtctgcgtgatgactgtcccggtttttttgcatggctcggatcactctaggcgttgggctgtcccctttccagggaaagcctgggtaagagtaggaggaaagaggcggggaaggagagggggaagagaggagggagaggagacttgaagtagccacagcctgagcaacttggaaagaggctcctcaagcgtcctttcccccaccgattgcaagagcagagtgggcttcacttaggaattccgttggcagcttcctagaaacgcgggatggcggggttgaaggtctccagagagagccagggatggggagcgctttggggagagggaggaaaggaggcatgggatgtctgggcttaattagacctattcagtgcatcctccttcaagatccggctctcctccctatctgatccttagctacttaaaattgcaggaattcaggtatcctgatttcttagcaacttcaaacagtgctggggaacggtgcaatctgcctgcatgcaggccctttacccccagtgtttcccttgggtgtct

SEQ ID NO: 41892 - DNA, 957 bp, Artificial sequence
  DNA replication origin
gccaaaaagaaaagaaaaggagagaaccttaatttggaaactgccaatgacaacttttatggtccattgccataatccccgctggtaggttcttgaaggcactcttgatatgatacaatgaacgtggcattttacttccgtggttttcctcaccaaaacctgtaagcccagtctgatcatgaaaaaaaaaaaaaaaaactgacagatcctaactgagggatatcctagaaaatacttgccaagtgtcttcaatactgtcaaggtcatcaaaaacaaggaatgtctaagaaaatgtctcatccaagaggagcataaagagatgtcataactaaatgtaacgtaagatcttggaagatgctggaacagaaagaggatattggggaaaaccaaagagacctaaataaagtagaaaatttagatgatgatgatggcgatggtgatggtgatggtgatggtgatgatggtgttggtgatgatagtcatgatgatggtgatgaccatgatggtgacggtgatggtggtgatggtgatggtgatggtggtgatggtgatggtggtggtgatggtgatggtggtgatggtgatggtgatggtggtgatggtgatgatgatggtggtggtggtgatggtgatggtggtggtggtggtgatggtgatggtggtgatggtgatggtgatggtggtgatggtggtggtgatgatggtgatggtgatggtggtggtggtgatggtggtggtggtgatggtggtggtggtgatggtgatggtggtggtggtgatggtggtagtggtgatagtgatggtgatggtggtggtgatggtggtgatggtgatggtggtgatggtggtgatggtgatggtgatggtggtggtgatggtgatggtggtgatggtgatggtgatggtggtgatggtgatggtgatgatggtgttggtgatgatagtcatgatgatggt

SEQ ID NO: 41893 - DNA, 1001 bp, Artificial sequence
  DNA replication origin
ttggaaccaaaccaaatgtccaacaatgatagactggattaagaaaatgtggcacatatacaccatggaatactatgcagccataaaaaatgatgagttcatgtcctttgtagggacatggatgaaactggaaatcatcattctcagtaaactatcgcaagaacaaaaaaccaaacaccgcatattctcattcataggtgggaattgaacaatgagatcacatggacacaggaaggggaatatcacactctggggactgttgtggggtggggggaggggggagggatagcattggggatatacctaatgctagatgacgagttagtgggtgcagtgcaccagcatggcacatgtatacatatgtaactaacctgcacaatgtgcacatgtaccctaaaacttaaagtataataaaaaaaataataaataaaaggtttaaaaaaaaaaagaacacaggctaagggagaaggaggaatggaaggtggaagcttgcccatagtgaaggaggcaagcccagagaaaagagtagagacacggagaaggggtgggggtttcttgccctccagaaaagcagagaaggggtcagggcgcagagatatgaggtcggggcatggaaataagggatcggggcacagagatatgaggttggggtacttgcccctcctccagaaaaacagagaaggggtagagacacggagagaaggggttggggtacttgcccctcccctagaaaagcaggacttgctgctgaggggaaggagaaggggttgaggggttcttgcccttgccccagaaaatcagagaaggggtagagacacggagagaaggggttggggtacttgccccttccccagaaaagtgggacttgccactaagggtgaaggagaaggggttgaggcatacttgcccctccctcagaaaagcagagaaggggtagagacacggagagaaggggttggggtacttgccccttccccagaaaagcgggacttgtcgctaag

SEQ ID NO: 41894 - DNA, 1290 bp, Artificial sequence
  DNA replication origin
catagagatagacagggataggtgtgtgggtgggtgggtgggtggatggatggatggatggaagggtgggtggatggatggatggatgaaggggtgggtggatggatgaagcggtgggtgggcaggtgggtggatggatgaaggggtgggtgggtggatggatgaaggggtaggtgggtggatggatggatggatggatggatgaaggggtgggggggtcggggggtggatggatgaaggggtggggtggtagatggatgaaggggtgggggtggatggatgaaggggtggggtggtagatggatgaaggggtagaggggtgggggggtgggtgcatggatggatgaaggggtgggggtggatggatgaaggggtgggggggtggatggatgaaggggtagggggtgggggagtgggtacatggatggatgaaggagtgggtgggtggatggatgacggggtgggtgggtggatggatgaaggggttggggggtaggtgggtggatggatggaaaagtatataaacatagataaatagacaggtgggtagatggatggatggatgataaacaatacacatggatagctagacaatgaaatacaggtttttacgggttccactctcctcctgcggcatctcaggctccggttttgtggtggaattctttggtagtgcttgttcaacatcgttctgatccctaagctagtgtgggaattaacggattcactttctttataaaagagggcagagataagcacatgggacgatgacccctgtctgctccccaaacaaagtcagcgactgcctggatttcctgaggtggatgttagaatgtcacatgctccacacccccaggaacaagcgctcggtgctccccaccagcaggacctggcttagacacgccttccaggcaggagaatgcctctcttccttccctcctttgtttccaactgaaagggaaggttccccagtaaaactctggtctttaccccctgcagggaatcagagagatgtgagggaggatctggcttttgcgacaatggaggccactcagaggatacgctggtgtctgtctttgagactcaggggcaagcagaagaaagaaggaaacaggaaaagagagaacctaggaggcagagtgtcggctgtggcaaagcgcggcagaggctcccccaaccggtgttctgggccctcgctggctgggcttcctctcgtcttcatcccagagagaagagcctttcgtgcagagccacatggtgcaacagttcctctgacacgtagctcactcc

SEQ ID NO: 41895 - DNA, 1505 bp, Artificial sequence
  DNA replication origin
gccggagccgcctgtgtacagcctgcaggactttgacacgctggccaccgtgggtgagtgagtgcgggcggggactcggcccacaggggcgcgcggcgtggccgggacgttgtagtaggacaaagggccctgggtgccgacctcctggggagggccctgacccgctacttcggctcggagtccccgtgcggggctgcacctgcgccccgggtcttcccgggtggagcgcactccccagccccccagcccaggcaagtacccccgaccggccgggtgcctaacctgaaatgccgacggctcctctcggagaccaccctccacccccagcacacacagcactctggggcctgggccgtccgacgtcacaaaacctcctgcgggtcacctcgcctgggggacctcgtgctccctccctggcagcggccccagggacactggcgcggggtgcgaagacccctgcaggcctcccctaggccagcctccctgtgtgcccagaggcagggaatgtacagatttctccaggggctgcaggagcagctgggctgtgggggacaggtgtcccggggcgctgtggggacgaggacggcagcgctggggacggatcctaacatgtcctgacaccgcctgtgctcttcgtcttgtgcctctgaaatgggtaattcttgtatcggacgctttatccgtttcctttgtcctctgtctttgaacttaaccccgaatgggcagcttgacagagaggtttcgagttctcggtgctcttgcatccggacacgcgctgctttatggagcagccctgagtgggtcagaatatcccaactgaacgtgggcgctggatttaaacagttgtcatcggcccgcctgtgccacttagggactccgtatggctaagtggggtgttggctgtcaagaaaataaatgggagagtagagggggctgtcctgggtgtgttggtgaggcgtcggctctcaggccctctaactcctgtttgtcctcattttggaaaggaggaagctgggctgggaagcccaagggctcgaggccatagcttatgacttaggaagaccagcgggcatagccagtggggcctttagaaccgctgaggaagaggggacttagcttccttcagtgacctctttgccacttagaccttgaggaagggcccacgaggaaagcctgaatttggaaggacagagtgggaggaggccctctctctttctcctctccctccctcctcctctttatctcattctctctctcttttctctgtttctcttctctctccctctttctgtctctgttcaagtctctctgcatttctcctcctctgtctcttggtgtctctctccctgtccccttccggtcttggtttttctgtctccctccctcctctctctctgccttcccccttgtcttggtccccccggaaagctgtcctggtctaatcttagagctgggtgtgttttgcgcggaagaagggtggggcaggaaccctgactggcgcagcc

SEQ ID NO: 41896 - DNA, 1173 bp, Artificial sequence
  DNA replication origin
cccatgcgcgctctcgcctcctggtgcgcggtccggcgcggctgacggagcgacggggacaatggctgggcggcgctcacggcacaagcagcaacggccccgagtgggagcagccgccggcctcggggggcgggcaccgagtgcgggacgactgcggggaaggcgggggccgcggcccgggctggggggggcgaggcgggggccctgcgcattccgggtctcgcgcccgccgcctcctccagctcggtagccgcgtgcgcgctgttggggcgggcggaagccgcctgggcgtgaccgcgcctctccccgccctaacccggccgcggggctgggggcgtcgccttcgcgcgcgctccgcccccgccccgacccagcccaggagccggagacccgggcgtgcggcgctggggaggtgcccacgccccctccgcgcccggggcacccctggggtgggacccaggctgacttctcctcggggacgcactggcgggccacccgcgtcgctgcacccaagcccggaagatggggaggcgagggggcccggggacagggagggcgtagctcagcagaagtgaagttcaaaactaaaaagtgaaactggcgtttggtgaagagaggggctcggattagcccggctaatttttgtattttctcagtagagacagggtttcaccatgttggccaggctggtctggaactcctgagcacaagtgaaccgcctgcctcgttctcccaaagtgctgggactacaggtataagccaccacgcccagcctctgattggctttaagtcatagaaaataggattgctcagctggcaatctgcatacagatcccctctgccctccccccaaaaagttcagtactcctgcgggtgcttgtttgggacctgagagaatttggaatgagggcggatccccaagaggggctgccgggtcttcgggatgagttcagcgtcctggttttgctgtaggactctggtgattctagatttctacttggaaggggcggggaagggcgggctcgaccctgtgcgtttctttgcagcttcctgtggatctagaattctttacaaataaacattcctttaaaaaactagggaaagacagatttgagagatcgcccgaccaaatgtagtgcgtgaaacttgattggtcactgtttcaaacacccc

SEQ ID NO: 41897 - DNA, 1328 bp, Artificial sequence
  DNA replication origin
agggacgctgagaataactacgaccagcaccgcgaaggcgcccctctcgtgggtcagaggtcggcgcccccgctccgcaagcccccatcacctgcccggggacccccggtggcctcaggcctccaggcccaccccggagccccctattggcccctaggcccgccccgaggcctgcggcgcagctttgccgacggggagcgcctgcaggccacaaggctgcacgaatgcccccgcccgccgccccgaccaccgtcctgaggccagcggggcctctcatccggctgcaagggctgtgcggctccgcggctgcgtttcccggccccagcgggaaggcgacggcggagcggactccgagcccagccgagctgtgagggccgacgggaggcgagcccgcccctcgggtgcgcccatggtttaggcgagagccgcggcacccgctgcgggcgctactgaggggcgtctggctgcgggttcggcggcggcgcctctccggcaagagcccttggtccattgtgcgcttctctctttttttttggagacggagtcttgctctgtcgcccaggctggagtgcagtggcgcgatctcggctcactgcaagctctgcctcccgggttcatgccattctcctgcctcaacctcccgagtagctgggaccataggcgcccgccaccatgcccggctaattttttgtagttttagtagagacggggtttcaccgtgttagccaggatggtctcgatctcctgaccttgtgatccgcccgcctgagcctcccaaagtgctgggattacaggcgtgagccaccgcgccctgcctattgtgcgcttctcagggaggcttctgcctccaggacccagcggctgctgcggcggacgtcagccgcgtaacccgttcccgcgcagtggcccgccgtttccgccaccgccattgacccgccccggcctggtgctgtgcatgtcatggtgtcggaaggaagtacgccaatggggtaaaggggtcagacggcattgacagcctctgcgatggccctgaggcgggactaggaggacgttcccggtagcgattggacaggatctttcgtaagggcgcctgcgacactggaagtaacgagcaactggattggctgcctccatcgcaaagtgggtgggtcttgcatcctcgggcctaacgattggtctttccaagtgcgggaagcggcaagcatatggtctggaaacatttggtatcgagacgctgccagccataacgtccgtctcccgggccggagaggcccgtgaccgccgcatacccatggtctcttgcttctcctcgggcatctctggccacg

SEQ ID NO: 41898 - DNA, 1202 bp, Artificial sequence
  DNA replication origin
tgacaatgtccagatcaaatgatcccataaaaacatcgagtgtgattttagcctgagaagggggagggtgagaagatagattgggaggcagctgtgtaggcaggggacttggccactccctaaacctctcccagtctcacctgtaaatggagtgcataggcagcagtgcttctcccccaaggctggggcgatggaatcagttagactattgagggcatctggaagggcatctgtgtcagggttagtcctcagggtatggtggccaatgggtttcttttggttgactgttgacaatgcgtttgttgaatggcagcctgcactaggtgacgctgaagccacagaagacactgcagtgggaaaaccagcatgagccgctgcccccaaggaacctcgaagcccaggcagaggaccagccatcccagcccgcaggtaaagtgtgtcacctgtcaggtgggcttggggtgagtgggtgggggaagtgtgtgtgcaaagggggtgtgagtgtgtatgtgtgtgagcacatgagtgatggctagtgtgactgcatgtcagggagtgtgaacaagcgtgcgagggttgtgtgcaagtgcgtatgcatatgagaatatgtgtctgtggatgagtgcatttgaaagtctgtgtgtgtgtggtcatgagggtaagttagtgactgaatgcgcaggatgtgagtgtgcatggaacactcagtgtgtgtgtggcaagtgtgtaggcgtgtgaggacaggcagaagtgtgtcagtgttgtgatgggagtgtgaatgagtgtgcaaaaaggtgagtgaatgcatggaagtgtgtgtcaactatgaaggcatgtagtgtgtcagtgtgtgcagtgcaagcatgtgtgggaatgagtgcttgttggtgtgtccatatccaacgggtatgtgtgaaagcatgtaaaagtgtgtgtagtgtgatggtgtgtggatgtatcagtgtgtataaatgagagcatgtaaatgtgtatgtatgagtgttgagtgtgcatatgtgaggctgtgcgtgtgagtgtaaccatgagggtgtgaacgtgcttaagtgtatgtgcgtgtgacagtgcaagtgtaggtgtgtgatgcatgtgtgggtttgccagtgtatgagtgtacatggtgtggatctgaatgtgcacagtgtaaagggcatgagtgcaagtgtgtgtgagtgtatgtgaat

SEQ ID NO: 41899 - DNA, 957 bp, Artificial sequence
  DNA replication origin
ggtcctgaagcgggtgacgaaggcgcagctgctgccgccgcggcccatcaggccgccctccagcgggaccctggcgccgagcccccgtgcccgccacgcctgctgccgccccaggtgaggctccgggagcgacgtggggaaactgaggcccggagggggccgaggccccgcggcggggttagctgcttggccggggtggccagtatccggccccagtcaagactcagggtgtcccgaagctgagccccttagggacggcgttcggcccccacctgccaccaccctggcgttttcaccccaggagcctcacttgaggagccgatgctcacgctgggccctctgcctgggacgccgtcgtgccctctctgcctccacagccctgcccggggctcccctgtgctgcctagctcgtctgacacgcctttgaccactcgttcagcctctgtggggcactcagagacggggttgcccgcactcccacctaagtgcaggaggtgcggccttcaacacactcgaagaacgaacatcaggcaggttctgggagggacagggggccgctttagagtgggtgggcccgtaggccagacgctgcccctgagacctgaatgaattaaaaggaaccaactgagcttttcaggtctcaggcacagcaagtgccacggcccagcattttcttctcttcattgctgcttctcagcattttctttctctctctctctctgtctctgtcactgtttttgcatacagatactatgcttttggggtgggtactctcattgtccttccaggggtcctacacggcgtctgtaaaattccatctcatttcattgctggcgctgtaaataaaattagtcttaacccaaaattgccaaaagaagagggctttttccactagaagagatgcgttagagaatagaatcagcgatcttcactcctgagttttttcgacttcactcg

SEQ ID NO: 41900 - DNA, 1185 bp, Artificial sequence
  DNA replication origin
aaagaaacgaaaattagctgggcatggtagcgcatgcctgtagtccgagctactccagaggctgaggtggaaggatcacctgagcccgggaagtcgaggttgtagcgagctgagatggcgccactgcactccagcctgggcaacagagtgagaccctgtctaaaaacaaacaaacaaaaaaaaatgtggtaagatacccatcatatgaaattcaccattaaaaaatagcagggagcatcgtgaatgcgaagtattgatgaggatgatggtgatgttccagaaccttctctgacaccagcctggcgcccccccccccccccagccttacctttcctggcttcatggtgctcatcatactgtactgcaaatgctggtttcctccttctcgccagctagacccgtggtaccccacagggagggaatggcgactcacccaccaggcgcttaataagtgtttgttggccagtggacctcctacgctccctggggagagggactgggactgggactgggactgggacgtgtgtacacacctgcagctacaagactcggtggggagggtgcacagagcctcgaccctgtaagagaggcgatcgggctgaggaagacggggcactggggctggatggatgggacggacatgtggagagggtgggttcgtggatttgttcacccgttcatttattggtttctatgcatccatccatctttcacgccttgagcgtgcgttctgggcagggcctgtaatgggcaccgaatgagtaacatatcgtctctcccttcaaggtacacgcagcctgggtgggtgaggggagagacggtagggtgacatgggaacagtttggggtttgggaagcgctcttgttaaaaattcaaactttgggtcccctctcagatttataaacctaaacgtttgctggtggacctaggactccgcgtatccaggcaggatcctccgctgattggggtgcacgatgacgtcagaacacgtggataacgtgataacttgtgggccaggggctttggaacctcaaagaatgtgataacttttgggtcaggggctttggaacctcaaagacctccgcctgggagatcggggacagctcccggaggaggtgacatctgagtgttaaacacatccgtgacaggcaatgagaaaataaggtgggtccgctgtgctgatcg

SEQ ID NO: 41901 - DNA, 1008 bp, Artificial sequence
  DNA replication origin
ccagctccgaggcgcggtcgccggagccgcctgccaaccgccttcaagacttcgacacgctggtcaccgtgggtgagtgagtgcgcgcggggactcggcccacaggggcgcgcggcgcggccgggacgctgtcgtaggacaaagggccccgggtgcccgcctcctggggagggccctgccccgccgctgcggctcgggatcccagcgcggggctgcccctgcgccctgggtctccctggggggcgctcggagaagtagagcgcaccccccagccccggcgagtcccccgaccgaccgggtgccttccctggaacgccgacggctcctgtcggggaccaccctccacccccagcacacacagcactctggggcctgggccatccgacgtcaccaaacttcctgtggatcacctcgcctggggtaactcgtgcgctctcccaggcagcggccccagggacacgggcgcggggtccctcaggccagcctcccagtgtgcccagcggcagggtcctcggcggggaatgtacagatttctccaggggctgcaggagcagctgggctccggggtacaggtgttccgtggctttgtggggatgaagacggcggagttggggacggatcctaacatgtcctgacaccgcctgtgctcttcgtcttgtgcgtctgaaatgggtaattcttgtattggacgctttatctcgtttcctttgtcctctttgaacttaactcccaatgggcagcttgacagagaggtttcgagttctcggtgcgcttggatccggaccacgcgctggtttatggggcagccctgagtgggtcagaatatcccagccgaacgtgggcgctggatttaaacagttgtcagtggtcagcctgtgccttcttagcggggtgtgttgctgggacaggtcttctcaggctctctaactcctgtttgtcctctcattttggacaggaggaagctaggctgggaagcccaatggctcagggttatagcttctggcttag

SEQ ID NO: 41902 - DNA, 1290 bp, Artificial sequence
  DNA replication origin
cccacccggcccggagcccgcaagacgccaatgcgccttccggtgcgcgcgcggccgggcgcggctgacggagcggcggggacaatggctggccgtcgctcacggcacaagcagcaacggccccaggtagcagcagccgccggcctcgtggggcgggcacggagcgccgggaggcggcggggaaggcgggggccgcggcccgggcttgtagagccaggcgggggccctgcgcattcccagtctcgcgcccgcggcctcctgcagctcggtagcagcgtgcgcgttgaagaggcgggcggaagccgcctgggcgaggcctaggggctgggggcgtcgccttcgcacgcgctccgcccctgccgcgacccagcccaggagccagagacctgggcgtgccccgccaccgtgggcaggcgcggccctggggaggtgctcacgccccctccgcgcccgaggcgcccctcgggtggcacccaggacgacctctcaccccgacctaccgccccgaccctcttaggcgcagaggcgcacaggtccagacccggctactcaggagggaggaaacattttacaacctgttctctcttgtctttgaagcctgctagctaaaagcttcatctgcatagtaaaactttggtctccaccacctcttatcacaacccagacattcccttctgtgatctcaggtcttcagataaactcaaccagctgtcaaccagaaaatgtttaaattcacccacagcctggaaccccctttcctccaccccctcgcccccacccaccacttctacttgtctcttttctggaccaaaccaatgtatttctcaaatgtatttgattgctgtctcatgccttcctaaaatgtataaaaccaaactgcaccccaaccaccttgggcacatgttctcaggacctcctgagggctgtgtaatgggccatggtcagtcgtatttggctcagaataaatttcttcaaatattttacagagtttgactctttttgttgacaccttttcttagacagctactacaagatgttcttcagaaaatggacggcgcaaactgagaacaagtaagaggtggattcagaaagttaggagatccggtggaggagagaagtgtagttggtggccagggtgacagccattcaccaggttccatagacaaacagttcatgttggagatggggttcaagagatgctagacggagccgtccaggaagaaagagcaggaatgaatggacaaaaagtatgggagttagaaaaactgatgaatttaggggcacatggta

SEQ ID NO: 41903 - DNA, 1201 bp, Artificial sequence
  DNA replication origin
gatcaaatgatcccataaaaacatcgagtgtgattttagcctgagaagggggagggtgagaagatagattgggaggcagctgtgtaggcaggggacttggccactccctaaacctctcccagtctcacctgtaaatggagtgcataggcagcagtgcttctcccccaaggctggggcgatggaatcagttagactactgagggcatctggaagggcatctgtgtcagggttagtcctcagggtatggtggccaatgggtttcttttggttgactgttgacaatgcgtttgttgaatggcagcctgcactaggtgacgctgaagccacagaagacactgcagtgggaaaaccagcatgagccgctgcccccaaggaacctcgaagcccaggcagaggaccagccatcccagcctgcaggtaaagtgtgtcacctgtcaggtgggcttggggtgagtgggtgggggaagtgtgtgtgcaaagggggtgtgagtgtgtatgcgtgtgagcatgagtgatggctagtgtgactgcatgtcagggagtgtgaacaagcgtgcgagggtgtgtgtgcaagtgcgtatgcatatgagaatatgtgtctgtggatgagtgcatttgaaagtctgtgtgtgtgtgtgtgtggtcatgagggtaagttagtgactgcgcaggatgtgtgagtgtgcatggaacactcagtgtgtgtggcaagtgtgtaggcgtgtgaggacaggcagaagtgtgtcagtgtgatgggagtgtgaatgagtgtgcaaaaaggtgagtgaatgtgcatggaagtgtgtgtcaactatgaaggcatgtagtgtgtcagtgtgtgcagtgcaagcatgtgtgggaatgagtgcttgtgggtgtgtccatatccaacgggtatgtgtgaaagcatgtaaaagtgtgtgtagtgtgatggtgtgtggatgtatcagtgtgtataaatgagagcatgtaaatgtgtatgtatgagtgttgagtgagtgtgcatatgtgaggctgtgtgtgtgagtgtaaccatgagggtgtgaacgtgcttaagtgtgcatgtgacagtgcaagtgtaggggtgtgatgcatgtgtgggtttgccagtgtatgagtgtacatggtgtggatctgaatgtgcacagtgtaaagggcatgagtgcaagtgtgtgtgagtgtatgtgaatgagtggtagtg

SEQ ID NO: 41904 - DNA, 950 bp, Artificial sequence
  DNA replication origin
gcgttgcacgtgtggccccgctgggccccgagcagctgcggcaggtcctgaagcgggtgacgaaggcgcagctgctgccgccgcggcccatcaggccgccctccagcgggaccctggcgccgagcccccgtgcccgccacgcctgctgccgccccaggtgaggctccgggagcgacgtggggaaactgaggcccggagggggccgaggccccgcggcggggttagctgcttggccggggtggccagtatccggccccagtcaagactcagggtgtcccgaagctgagccccttagggacggcgttcggcccccacctgccaccaccctggcgttttcaccccaggagcctcacttgaggagccgatgctcacgctgggccctctgcctgggacgccgtcgtgccctctctgcctccacagccctgcccggggctcccctgtgctgcctagctcgtctgacacgcctttgaccactcgttcagcctctgtggggcactcagagacggggttgcccgcactcccacctaagtgcaggaggtgcggccttcaacacactcgaagaacgaacatcaggcaggttctgggagggacagggggccgctttagagtgggtgggcccgtaggccagacgctgcccctgagacctgaatgaattaaaaggaaccaactgagcttttcaggtctcaggcacagcaagtgccacggcccagcattttcttctcttcattgctgcttctcagcattttctttctctctctctctctgtctctgtcactgtttttgcatacagatactatgcttttggggtgggtactctcattgtccttccaggggtcctacacggcgtctgtaaaattccatctcatttcattgctggcgctgtaaataaaattagtcttaacccaaaattgccaaaagaagagggctttttccactagaagagatgcgtt

SEQ ID NO: 41905 - DNA, 1172 bp, Artificial sequence
  DNA replication origin
aaagaaacgaaaattagctgggcatggtagcgcatgcctgtagtccgagctactccagaggctgaggtggaaggatcacctgagcccgggaagtcgaggttgtagcgagctgagatggcgccactgcactccagcctgggcaacagagtgagaccctgtctaaaaacaaacaaacaaaaaaaaatgtggtaagatacccatcatatgaaattcaccattaaaaaatagcagggagcatcgtgaatgcgaagtattgatgaggatgatggtgatgttccagaaccttctctgacaccagcctggcgcccccccccccccccccagccttacctttcctggcttcatggtgctcatcatactgtactgcaaatgctggtttcctccttctcgccagctagacccgtggtaccccacagggagggaatggcgactcacccaccaggcgcttaataagtgtttgttggccagtggacctcctacgctccctggggagagggactgggactgggactgggactgggacgtgtgtacacacctgcagctacaagactcggtggggagggtgcacagagcctcgaccctgtaagagaggcgatcgggctgaggaagacggggcactggggctggatggatgggacggacatgtggagagggtgggttcgtggatttgttcacccgttcatttattggtttctatgcatccatccatctttcacgccttgagcgtgcgttctgggcagggcctgtaatgggcaccgaatgagtaacatatcgtctctcccttcaaggtacacgcagcctgggtgggtgaggggagagacggtagggtgacatgggaacagtttgggggttgggaagcgctcttgttaaaaattcaaactttgggtcccctctcagatttataaacctaaacgtttgctggtggacctaggactccgcgtatccaggcaggatcctccgctgattggggtgcacgatgacgtcagaacacgtggataacgtgataacttgtgggccaggggctttggaacctcaaagaatgtgataacttttgggtcaggggctttggaacctcaaagacctccgcctgggagatcggggacagctcccggaggaggtgacatctgagtgttaaacacatccgtgacaggcaatgagaaaataaggtgggt

SEQ ID NO: 41906 - DNA, 887 bp, Artificial sequence
  DNA replication origin
aaccgccttcaagacttcgacacgctggtcaccgtgggtgagtgagtgcgcgcggggactcggcccacaggggcgcgcggcgcggccgggacgctgtcgtaggacaaagggccccgggtgcccgcctcctggggagggccctgccccgccgctgcggctcgggatcccagcgcggggctgcccctgcgccctgggtctccctggggggcgctcggagaagtagagcgcaccccccagccccggcgagtcccccgaccgaccgggtgccttccctggaacgccgacggctcctgtcggggaccaccctccacccccagcacacacagcactctggggcctgggccatccgacgtcaccaaacttcctgtgggtcacctcgcctggggtaaatcgtgcgctctcccaggcagcggccccagggacacgggcgcggggtccctcaggccagcctcccagtgtgcccagcggcagggtcctcggcggggaatgtacagatttctccaggggctgcaggagcagctgggctccggggtacaggtgttccgtggctttgtggggatgaagacggcggagttggggacggatcctaacatgtcctgacaccgcctgtgctcttcgtcttgtgcgtctgaaatgggtaattcttgtattggacgctttatctcgtttcctttgtcctctttgaacttaactcccaatgggcagcttgacagagaggtttcgagttctcggtgcgcttggatccggaccacgcgctggtttatggggcagccctgagtgggtcagaatatcccagccgaacgtgggcgctggatttaaacagttgtcagtggtcagcctgtgccttcttaggggggtgtgttgctgggacaggtcttctcaggctc

SEQ ID NO: 41907 - DNA, 1301 bp, Artificial sequence
  DNA replication origin
ggaggccatcctgcccacccggcccggagcccgcaagacgccaatgcgccttccggtgcgcgcgcggccgggcgcggctgacggagcggcggggacaatggctggccgtcgctcacggcacaagcagcaacggccccaggtagcagcagccgccggcctcgtggggcgggcacggagcgccgggaggcggcggggaaggcgggggccgcggcccgggcttgtagagccaggcgggggccctgcgcattcccagtctcgcgcccgcggcctcctgcagctcggtagcagcgtgcgcgttgaagaggcgggcggaagccgcctgggcgaggcctaggggctgggggcgtcgccttcgcacgcgctccgcccctgccgcgacccagcccaggagccagagacctgggcgtgccccgccaccgtgggcaggcgcggccctggggaggtgctcacgccccctccgcgcccgaggcgcccctcgggtggcacccaggacgacctctcaccgcgacctaccgccccgaccctcttaggcgcagaggcgcacaggtccagacccggctactcaggagggaggaaacattttacaacctgttctctcttgtctttgaagcctgctagctaaaagcttcatctgcatagtaaaactttggtctccaccacctcttatcacaacccagacattcctttctgtgatcccaggtcttcagataaactcaaccagctgtcaaccagaaaatgtttaaattcacccacagcctggaaccccctttcctccaccccctcgcccccacccaccacttctacttgtctcttttctggaccaaaccaatgtatttctcaaatgtatttgattgctgtctcatgccttcctaaaatgtataaaaccaaactgcaccccaaccaccttgggcacatgttctcaggacctcctgagggctgtgtaatgggccatggtcagtcgtatttggctcagaataaatttcttcaaatattttacagagtttgactctttttgttgacaccttttcttagacagctactacaagatgttcttcagaaaatggacggcgcaaactgagaacaagtaagaggtggattcagaaagttaggagatccggtggaggagagaagtgtagttggtggccagggtgacagccattcaccaggttccatagacaaacagttcatgttggagatggggttcaagagatgctagacggagccgtccaggaagaaagagcaggaatgaatggacaaaaagtatgggagttagaaaaactgatgaatttaggggcacatgg

SEQ ID NO: 41908 - DNA, 1209 bp, Artificial sequence
  DNA replication origin
atcaaatgatcccataaaaacatcgagtgtgattttagcctgagaagggggagggtgagaagatagattgggaggcagctgtgtaggcaggggacttggccactccctaaacctctcccagtctcacctgtaaatggagtgcataggcagcagtgcttctcccccaaggctggggcgatggaatcagttagactactgagggcatctggaagggcatctgtgtcagggttagtcctcagggtatggtggccaatgggtttcttttggttgactgttgacaatgcgtttgttgaatggcagcctgcactaggtgacgctgaagccacagaagacactgcagtgggaaaaccagcatgagccgctgcccccaaggaacctcgaagcccaggcagaggaccagccatcccagcctgcaggtaaagtgtgtcacctgtcaggtgggcttggggtgagtgggtgggggaagtgtgtgtgcaaagggggtgtgagtgtgtatgcgtgtgagcatgagtgatggctagtgtgactgcatgtcagggagtgtgaacaagcgtgcgagggtgtgtgtgcaagtgcgtatgcatatgagaatatgtgtctgtggatgagtgcatttgaaagtctgtgtgtgtgtgtgtgtggtcatgagggtaagttagtgactgcgcaggatgtgtgagtgtgcatggaacactcagtgtgtgtggcaagtgtgtaggcgtgtgaggacaggcagaagtgtgtcagtgtgatgggagtgtgaatgagtgtgcaaaaaggtgagtgaatgtgcatggaagtgtgtgtcaactatgaaggcatgtagtgtgtcagtgtgtgcagtgcaagcatgtgtgggaatgagtgcttgtgggtgtgtccatatccaacgggtatgtgtgaaagcatgtaaaagtgtgtgtagtgtgatggtgtgtggatgtatcagtgtgtataaatgagagcatgtaaatgtgtatgtatgagtgttgagtgagtgtgcatatgtgaggctgtgtgtgtgagtgtaaccatgagggtgtgaacgtgcttaagtgtgcatgtgacagtgcaagtgtaggggtgtgatgcatgtgtgggtttgccagtgtatgagtgtacatggtgtggatctgaatgtgcacagtgtaaagggcatgagtgcaagtgtgtgtgagtgtatgtgaatgagtggtagtgtgcatgcat

SEQ ID NO: 41909 - DNA, 1179 bp, Artificial sequence
  DNA replication origin
ccctaggggccgcggcggctgtcccggccgggcagcgtcgccttccgaggtgtcttggcctgcggggcactcgtagcccgccgctttcccaggtgaggcacgtcgtcgcccagcgacccaggttggagtccccgcttcagccgccgcggcggatgcggcggccaggcttctccgggccagggcagcgttgcacgtgtggccccgctgggccccgagcagctgcggcaggtcctgaagcgggtgacgaaggcgcagctgctgccgccgcggcccatcaggccgccctccagcgggaccctggcgccgagcccccgtgcccgccacgcctgctgccgccccaggtgaggctccgggagcgacgtggggaaactgaggcccggagggggccgaggccccgcggcggggttagctgcttggccggggtggccagtatccggccccagtcaagactcagggtgtcccgaagctgagccccttagggacggcgttcggcccccacctgccaccaccctggcgttttcaccccaggagcctcacttgaggagccgatgctcacgctgggccctctgcctgggacgccgtcgtgccctctctgcctccacagccctgcccggggctcccctgtgctgcctagctcgtctgacacgcctttgaccactcgttcagcctctgtggggcactcagagacggggttgcccgcactcccacctaagtgcaggaggtgcggccttcaacacactcgaagaacgaacatcaggcaggttctgggagggacagggggccgctttagagtgggtgggcccgtaggccagacgctgcccctgagacctgaatgaattaaaaggaaccaactgagcttttcaggtctcaggcacagcaagtgccacggcccagcattttcttctcttcattgctgcttctcagcattttctttctctctctctctctgtctctgtcactgtttttgcatacagatactatgcttttggggtgggtactctcattgtccttccaggggtcctacacggcgtctgtaaaattccatctcatttcattgctggcgctgtaaataaaattagtcttaacccaaaattgccaaaagaagagggctttttccactagaagagatgcgttagagaatagaatcagcgatcttcactcctgagttttttcgacttc

SEQ ID NO: 41910 - DNA, 1143 bp, Artificial sequence
  DNA replication origin
aaaattagctgggcatggtagcgcatgcctgtagtccgagctactccagaggctgaggtggaaggatcacctgagcccgggaagtcgaggttgtagcgagctgagatggcgccactgcactccagcctgggcaacagagtgagaccctgtctaaaaacaaacaaacaaaaaaaaatgtggtaagatacccatcatatgaaattcaccattaaaaaatagcagggagcatcgtgaatgcgaagtattgatgaggatgatggtgatgttccagaaccttctctgacaccagcctggcgcccccccccccccccagccttacctttcctggcttcatggtgctcatcatactgtactgcaaatgctggtttcctccttctcgccagctagacccgtggtaccccacagggagggaatggcgactcacctaccaggcgcttaataagtgtttgttggccagtggacctcctacgctccctggggagagggactgggactgggactgggactgggacgtgtgtacacacctgcagctacaagactcggtggggagggtgcacagagcctcgaccctgtaagagaggcgatcgggctgaggaagacggggcactggggctggatggatgggacggacatgtggagagggtgggttcgtggatttgttcacccgttcatttattggtttctatgcatccatccatctttcacgccttgagcgtgcgttctgggcagggcctgtaatgggcaccgaatgagtaacatatcgtctctcccttcaaggtacacgcagcctgggtgggtgaggggagagacggtagggtgacatgggaacagtttgggggttgggaagcgctcttgttaaaaattcaaactttgggtcccctctcagatttataaacctaaacgtttgctggtggacctaggactccgcgtatccaggcaggatcctccgctgattggggtgcacgatgacgtcagaacacgtggataacgtgataacttgtgggccaggggctttggaacctcaaagaatgtgataacttttgggtcaggggctttggaacctcaaagacctccgcctgggagatcggggacagctcccggaggaggtgacatctgagtgttaaacacatccgtgacaggcaa

SEQ ID NO: 41911 - DNA, 955 bp, Artificial sequence
  DNA replication origin
agtcgcggtcgccggagccgcctgccaaccgccttcaagacttcgacacgctggtcaccgtgggtgagtgagtgcgcgcggggactcggcccacaggggcgcgcggcgcggccgggacgctgtcgtaggacaaagggccccgggtgcccgcctcctggggagggccctgccccgccgctgcggctcgggatcccagcgcggggctgcccctgcgccctgggtctccctggggggcgctcggagaagtagagcgcaccccccagccccggcgagtcccccgaccgaccgggtgccttccctggaacgccgacggctcctgtcggggaccaccctccacccccagcacacacagcactctggggcctgggccatccgacgtcaccaaacttcctgtgggtcacctcgcctggggtaaatcgtgcgctctcccaggcagcggccccagggacacgggcgcggggtccctcaggccagcctcccagtgtgcccagcggcagggtcctcggcggggaatgtacagatttctccaggggctgcaggagcagctgggctccggggtacaggtgttccgtggctttgtggggatgaagacggcggagttggggacggatcctaacatgtcctgacaccgcctgtgctcttcgtcttgtgcgtctgaaatgggtaattcttgtattggacgctttatctcgtttcctttgtcctctttgaacttaactcccaatgggcagcttgacagagaggtttcgagttctcggtgcgcttggatccggaccacgcgctggtttatggggcagccctgagtgggtcagaatatcccagccgaacgtgggcgctggatttaaacagttgtcagtggtcagcctgtgccttcttaggggggtgtgttgctgggacaggtcttctcaggctctctaactcctgtttgtcctctcattttggacaggaggaagct

SEQ ID NO: 41912 - DNA, 1306 bp, Artificial sequence
  DNA replication origin
gcggcttgtggaggccatcctgcccacccggcccggagcccgcaagacgccaatgcgccttccggtgcgcgcgcggccgggcgcggctgacggagcggcggggacaatggctggccgtcgctcacggcacaagcagcaacggccccaggtagcagcagccgccggcctcgtggggcgggcacggagcgccgggaggcggcggggaaggcgggggccgcggcccgggcttgtagagccaggcgggggccctgcgcattcccagtctcgcgcccgcggcctcctgcagctcggtagcagcgtgcgcgttgaagaggcgggcggaagccgcctgggcgaggcctaggggctgggggcgtcgccttcgcacgcgctccgcccctgccgcgacccagcccaggagccagagacctgggcgtgccccgccaccgtgggcaggcgcggccctggggaggtgctcacgccccctccgcgcccgaggcgcccctcgggtggcacccaggacgacctctcaccgcgacctaccgccccgaccctcttaggcgcagaggcgcacaggtccagacccggctactcaggagggaggaaacattttacaacctgttctctcttgtctttgaagcctgctagctaaaagcttcatctgcatagtaaaactttggtctccaccacctcttatcacaacccagacattcccttctgtgatctcaggtcttcagataaactcaaccagctgtcaaccagaaaatgtttaaattcacccacagcctggaaccccctttcctccaccccctcgcccccacccaccacttctacttgtctcttttctggaccaaaccaatgtatttctcaaatgtatttgattgctgtctcatgccttcctaaaatgtataaaaccaaactgcaccccaaccaccttgggcacatgttctcaggacctcctgagggctgtgtaatgggccatggtcagtcgtatttggctcagaataaatttcttcaaatattttacagagtttgactctttttgttgacaccttttcttagacagctactacaagatgttcttcagaaaatggacggcgcaaactgagaacaagtaagaggtggattcagaaagttaggagatccggtggaggagagaagtgtagttggtggccagggtgacagccattcaccaggttccatagacaaacagttcatgttggagatggggttcaagagatgctagacggagccgtccaggaagaaagagcaggaatgaatggacaaaaagtatgggagttagaaaaactgatgaatttaggggcac

SEQ ID NO: 41913 - DNA, 1426 bp, Artificial sequence
  DNA replication origin
gtttaacttgtctggtacaattttttctgacaatgtccagatcagatgatcccacagaaacactgagtgtgattttagcctgagaagggggaggatgagaagatagattgggagacagctgtgtaggcaggggacttggccactccctaaacctctcccagtctcacctgtaaatggagtgcataggcagcagtgcttctcttccgaggctggggtgatggaaacagactattgagggcatctggaagggcatttgtgtcagggttagtcctcagggcatggtggccaatgggtttcttttggttgactgttgacaatgcgtttgttgaatggcagcctgcactaggcaacgctgaagccacagaagacaccgcagtgggaaaaccagcataagccgctgcccccaaggaacctcaaagcccaggcagaggaccagccatcccagtcgcacaggtaaagtgtgtcacctgtcaggtgggcttggggtgagcgggtggggggagtgtgtgtgcaaagggggtgtgagtgtgtatgtgtgtgagcacatgtgagtgtgatggctagtgtgactgcatgtaagggagtgtgaacaagcgtgtgagggtgtgtgtgcaagtatgtatgcatatgagaatatgtgtctgtggatgagtgcatttgaaagcctgagtgtgtgtgtgtgtgtgtggtcatgagggcaagttagtgactgaatgcgcaggatgtgtgagtgtgcatggaacactgtcagtgtgtgtgtggcaagtgtgtaggtgtgtgaggacaggcagaagtgtgtcagtgttgtgatgatggaagtgtgaatgagtgtatgagtgtgcaaaaaggtatggagtgaatgtgcatggaagtgtgtgtgtaaactatgaaggcatgtagtatgtcagtatgtgagtgtgcagtgcatgtgtgtgggagggtgagcgtgtgagttagtgtgactgcttgtgggtgtgtttatgagtgtgtgccagtgggtatgagtgtgagagcatgtaaaagtgtgtgtgtagtgtgacagtgtgtgtgtactgtgacattgtgtggctgcgtgtcagtgtttatgaatgacagcatgtgaaagtatgcatgtgtatgtgggtgcatacatgtaagtgtatgagggtgcgtgtgatggtgtaagtgtagggttgtgatgcatgagtgtgagtgtggctgtgtttttcagtatatgactgtgtatgtgtattgggtgtggacctgagtgtgctagtgtgcaagggcaagtgtaaagggcatgagaatgcaagtgtgtgtacatgaatgagtgggagtgtgtgcatgggagtgagtgcatgtgcctgtgtgagtgcactctcaaaagcgtggaagggtgcaagcctcccccactaactcctgtcccctgctgaaatcatctttccca

SEQ ID NO: 41914 - DNA, 1285 bp, Artificial sequence
  DNA replication origin
gcacagctacaaagttgagctagtgactggtagaatactgaatagtctacagttaaaggaggagcgataaatgtattggaagtgcaaaactaaacatatagttgtagggatagaatgcaagtggaggaaaagaatgatgttttttgttagctgaaataagttgatcaatgaatcttcgttgaagaaaggaagagtataaggaaggaaggagagagggaaggaaggaaggaaaggagggaaggaaagaaggaaggaagggagggagggagggaatgaaggaaggaaggaagaaggagaggagggaaggaaggaaggaaaggagggaaggaaggaaggaaggagggaaggaaggaaggagggaaggaaggaagggaaggaaggaagggagggagggaaggaaggaaggaaggagggaaggaaggaagggaaggaaggaagggagggagggaaggaaggaagggagggagggaaggaaggaaggaaggagggaaggaaggaagggagggagggaaggaaggaaggaaggaaagggagggagggaggaaggaaggaaggaaggaaggaaacaaggaggtttattctgagccaatatgaatgacaactgcctgaagaaaacccaaatgcaagaaaccttgagcaaaaattagctgggcatggtggtgcatgcctctggtcccagctactcaggaggctgaggcagggggatcacttgagcctgggaggcagaggctgcacggagccgtgatcatgccactgcactccagcctgggtgacagagtgagaccctgtctcaaaaaataaaataaataaattggcttcttcatcagagttgaagaaaactgagaaggaaagacatataggttcccattaactgtttgtcaatttgttttggaggtgaccttgccgaatactgcacatctctgagggagcctctggccaagggtatgcctagatttatgctagtcagggttctgaattgcagccatctgaagctgactgcagtggattaagcagaaagaggcttaggaaaagatattgcatagataccgaaattgttaggaacggctagagaagcaggctatagggaaatcttccagcaacaatgtctaaaataaagctcatgaactggcctgatggagatgttgtcaattctgcagctggtccacaggccacttggggagtttttgtcatctgcaaagccacaccatgacgcaactctttaagtcaaggctgtgacctgctcccagcatagcctgaccgtggaaacctggaaactccagctgcc

SEQ ID NO: 41915 - DNA, 1006 bp, Artificial sequence
  DNA replication origin
ttgtttcttttaaagatgtatttactataaagatgcagacagaagtgtattaaggtagaagaattcccacgctgccactgaagagaaggaagccagagtgactctgctaccctcattggagtagatatgaagaggatgaccattaatggagatgaagaccattacttactggaaaaaaaagtgaaatgtataaacaggaaggcatatgaatttgtatgtatacggagttcattacagagctccaaaaatatatgaagcataggaagcaaaactgatagaaggagaggagagaagagagaggaattaagggaaaagagtgacagagaggaaaagagggagtgagagagagagccagagagtgggagagagggaaagagagaggaagagacagaaggagtgagagggaaagagagagaagaagaagggagaggaaggaagagggagagagagggggagggaggcagagagagagagaggacagaggaagaggggtggagagacagagatggaaggagggagagagagagaaagagagagagacagaaggagcaacagaaaggaagagggagacaagggagagagaggaggaggaaagggaaagagagggagagacagaaagggagagagagggagggagagaaaatgagaaaagagggggaagagagaggggagaaagaaaaaggaagggagggagggagagagacagggagaaagggagaaacacagagagagagagagacagagagatagcaagagaggaagaggggacagagagggagagacagggagagagagaagaagggaatcgggagagagtgagggagagaaacagaaggagagagggaatgagagaaatagaaggagagagggaaggagggaaataggagggacagaggaagaaggagggaggggggagagagagaggaatttaaacttttcacatccttgttgggggttttaagaccatcctgtaaacaactgatgaagcaagtctacttttccaggt

SEQ ID NO: 41916 - DNA, 1111 bp, Artificial sequence
  DNA replication origin
gatgctgtttaaagcaatgactgggaagtataaagatgtaaagtacagaatgttgcaatcaaggtaataaaactgaaaattacttagtagtaaatgttgcagtcatttctttgtgtttctccgttgtatgtagactccttggtggaaagttttttaatttttttttcaatcccaatgcctgttgcatagtagatatttaataaaatcagtaagaaatcaggaaggaagtgaggaaaatcaaagaagagaaaaaaggaagagagacagagagaaaagaaggaaggaaggaacagagagaggaaatgaaggaaagaaggaatgttgggaggtaggaaggagggaaaggagaaagaaaggaagggaggaagggagggaaggaaggagggaagggagaaaggatggaaggaaggacggaaggaaggaaggaagggagggagggaagattgggaaaaagtgagaaaggaaggaagagagggagggagggaacgaaggaaagaaggaaggttaggagggaagaaggagggaaaggagaaaggaaagaagggagggaggaaggaggggaaaaggcaggaaggaagagagggagggagggaaggaaggaaagaaggaagaagggataaaaaggaagggaaagaggaaggaaggaaagagcagacagagggaggaaggaggggaagaaagagagaaaggaaggaagcaagctcaggagaaagcctatattaattaggatttgcagcgttagtggagatgtcacaaagaatgaatcatttaggctctagtttgaagtacccattgatttagtgtctcagggggaggggagggagaaagaagtaggcaatcagttgatatcacaagagggaataacagcattttacctaatgttgatttaaagaaaaataccctgacccagtgttactgtgaaatctggtgctggcattttgcagcggttggacattgataaatacaaatatggtcagaagtatgccctaggaggatgactatggtgttcaggcttgaagaagtttgcaggatggtgtggagtggggagagatttatgaaaaaagacacaccagcaggccattgccttatgtcaattttgtcatctttgatg

SEQ ID NO: 41917 - DNA, 1101 bp, Artificial sequence
  DNA replication origin
ctgttgtggggtttgagggccggaatttaatttttggagttttatttaatgtcgggagcagattgggtaataaaatgtattttgagaataggacggccttttgaccttttagagtctagggctgtaaagcgtctcagggttgctgccgaacgagccatgaactgggctgggtttttcatatttgatgaaagagcctaaaggctcacggatttgggagaggtctgataaagaaaaaggagcattaaccttgactatgcctttagcttcagccacctttttaagaggaaattgctgggcaggtggaggagggctactcacggaatgaaattgtaaaccagaccaggtgtgaggaggggaggggaggtgataaaaggattataggatggaggagtggaggctgaggaagaactgggacctagctcggcctggcgaggagcagcctggggaggaggggagaggtcagatgggtctgtagaaaaggaagattagaaagactcagcaatgcttggggttgggactgaggggacaggtgggagggaaagaaggaagatttgggacgagttgcactggggacagagactagggagggaccgatgtgtaaaagaatgcctggacgtcagacacctcagaccgtttgcccattttacgacaggaattatttagatcttgcaggatggaaaaattgaaagtgccgttttctggctatttggaactactgtcgagtttgtattggggtcaagcggcattgcagaagaaaataagatgcttagattttaggtcaggtgagagttggagaggttttaagttcttaagaacacaggctaagggagaagaaggaggaatagagggtggaaggttgcccatagtgaaggaagcaagcccagagaaaagagagcataaagacatggagggaaggggtttgggggttcttaccctccagaaaagcgggaaaggggtcggggcacagagatacgaggtcagggcacggaaataagggattgggatgcagagatataagaggttggggcgtggaaataagggatcggggcgcagaggtataagaggttggggcgtggaaataagggatcggggtgcagagat

SEQ ID NO: 41918 - DNA, 971 bp, Artificial sequence
  DNA replication origin
cacacacacacacattctttattaaaatgtaaaatctcactaaaagcttttgaacaaagtaaaaactcattaatttatattttctttttagcttaaattagaggcacacgtgaggtaagtgaaagaaagagagagaaagagggagggaggtagggagggagagagggagggagggaggaaggagaagggaagggaaggagggagggagggaggaagagaggaaggaggggaggaaggaaggtaaaagtaagggaggaaggaaggaaaagaaaaggagaggagagaaatcagtgagggagtaactgtaaataagatggttgagactataactggataaatgaattaataaagttgtatgtaatctgaggtctctgataaatttcttccacttaattttcatatattttttatgaaaccagtctaaccactgagtaccatttttctttcctgcactgtaggttaactttaaagatacattagtggtccacagccaggaaaggatgctaatgtcagcggcccgcacggaccataaataaacatttcaaaggagcaatggtgcattcaggaacggtctctcaaattgcacgcgcaaaggtggcatgtggagccaacaccaggtaaaagactgcagggtgatgagaaggggcatggattgagccactgggcctgtgctgactccagcctttgcatggagctcatccacttacgcttgaagccttgtcttctacagggaaaaggaacaggaatgctgggtatggggagtggacaccaggtgacgggattaagtaaggcttttaagggagacggtatgggggaaaggagcaagacttgaggcagaggagggagccagccagtctgctcgggagaggcacgcttcgtcccggtgaagaccagaccagagcagccaatccagggggatctgactccttccaggaatgggaaggaggagctaggggcatcggcaggaggaa

SEQ ID NO: 41919 - DNA, 1264 bp, Artificial sequence
  DNA replication origin
cacttcctcctcgcccccacccagacccagaaggcgccaccatggcggcgcccccgcagcccgtcacccacctcatctttgacatggacggacttcttctgggtgggtagtgtgcagccgccgcctccagtaagggcggtcttgtgtgggcgtggggacggtcggcgcggggtacgtcacggcctgggggccgcggcggggcggtgttcatgcagggacgctcgggctcccgcgcgctctgcccccggctggccccgaagtcgggcggcggccaggagcgcccgcgggcccatgtccgggctggcgggcgcgcgtggccgcggcgtctacgcggccccagcacccgcttccggtcggcggcccgcgcgtggggccggagcacgtgggagcagtccctggggtccaccgggcgggcgcgcggctccgcgtcctctcctcagagcgaggcgcggcgggacctccgcgctctcttttcggttacgcatgcgtgcgaccttgagcggtgcccagcctcagcttccccgtctgcaaagtagcctggaggatacttgcctgcctgctccaaggttgctgctgtgggcgcactttgatggtagcatcctgcatggtagcggttctctacctggcggttttgcagccctgagggcatctggcaatggcgatgtcaggagacattttggctgtcacagctggcgaggagtgatggggtcactggcatctagtggagtccagaccagtgatactgttaaacttcccgcagtgcacaggagtgccctatgcaaccataaggaattatcccgcgccgtcaacagtgtagaggcacagaaggtccgtcaagtggcctggctgcctagggtgaccagcaccggggacatcacctgtgggctacttgtaaatgtagaagctggggccccaccctacccctgcccaatcagaatctgcattttaagcgcgtgaacgtttgagaacagctgctctatcaatccgaggcattaagaaacccttggcagtgtactaaggtagtcagtcttagcacatgtgaacttcaccagccaagaggaattcaagtagaattcaaagaataaaaccctgtttttaactcaagacagaactatgctgagctctaccgaaagccttgacacagttaacactatgacacataatcaccaggaggcttcatatatctataaacatgtctgcatactctttgtagacagctgacctgcttggttacgtatatcattccttcatttcaaaaccctgc

SEQ ID NO: 41920 - DNA, 1064 bp, Artificial sequence
  DNA replication origin
ccagccgggggcagagcgcgcgggagcccgagcgtccctgcatgaacaccgccccgccgcggcccccaggccgtgacgtaccccgcgccgaccgtccccacgcccacacaagaccgcccttactggaggcggcggctgcacactacccacccagaagaagtccgtccatgtcaaagatgaggtgggtgacgggctgcgggggcgccgccatggtggcgccttctgggtctgggtgggggcgaggaggaagtgcgcgcgcacccgcccgccccgcgcacgcgcactgaggaccttctcgcgcgcccggggtcgctctgcgcacgcgccttccgcggcccctcgcccggctccgagcccgcgcgtcctgggctgcctagtggcgctccgcgcacgcgcaccttgggctttcgccgcagctgtagctgcagacccgggatgcggcgcgggccggcgctgtatgtttacccgcatcaattcctcctcacttcacacccggaatcgggccaagctactcagccagcggccgcgcagagccgaggccctcgtctggggacaaattcagtgcttgagtttggatcaggggtgtgaatgaggaaggagggacagtacaaggggctgtagagtggggaaaggggattgaagatgctcagggtggtatcacttctagccatcaggttgcagacaaatggccttggtcaggaggtccctgggtgggttcgcccgagcccccagtccctggaccgtgggtgggtttttctcagtttcgcttgcccgcctccttgcggtcctggaccgcgacttgaaccggcagccgcgcatgcgcagtgtgcggagaggctgcacaacctccgtgcctgcatctctgagcatcccaggctggtgcattgtcccagagcaaagccaagctgctcaaggaggatgctgaaataatactaacagtcaacatgtcttgctggttgtgccttcttaggtatcatctgtcttttgggctgctctgagttttctttcttttttaacttttcaaatgccacctaaacagctttcttttttttttttcccgtttg

SEQ ID NO: 41921 - DNA, 1171 bp, Artificial sequence
  DNA replication origin
cgacgcaaggcgcacattagagatggcattcagctctctgcgtggtgagctccagctgtgattccattcaaggagagaggcttcagcaggcagggccagtgggtacccctctttgtgaatgtggtacaagacacagcaaaggcccaagttgctgacatccccatttgtatccattatgggtgcacaaacccctcacaggtcctggagagagggagctacgccagaggaaatgtcaggagggaaagaaaaaaggaaaagagggagagagggcaggagagggggagggagtttaggaggagaacaggaagacaggaaaagagagaagaaagaaaggaagggaaggaagcagagagggagggagttgagcaggaggacaggaaggaaggaagacaggaaaagagagaaggaggaaaggaagggaaggaagcagagagggagggagttgaggaggaggacaggaaggaagacagaaaaagagagaaggaggaaaggaagggagggaaggagagagggaaggagtcgaggaggaggaggacaggaagaaagacaggaaaagagagaaggaggaaaggaagggagggaaggagagagggagggagttgaggaggacaggaaggaagacaggaaaagagagaaggaggaaaggaagagaaggaagcagagagtgagggagtcacggaggaggacaggaaggaagacaggaaaagagagaaggaggaaaggaagggaaggaaggagagagtggaggagaagaacaggaaggaaaacagaaagagagaaggaggaggaaaggaagggagggaaggagagagggaaggagtcaaggaggaggacaggaggaagacaggaggaaaggaagggaaggaatgagagagggagagagtggaggaggagaactggaaggaagacaggaaaagagagaaggaggaaaggaagggagggaaggagagagggaaggagtcgaagaggaggacaggaaggaagacagggaaagagagaaggaggaaagaaagggagggaaggagaaagggagagaggggcaagcaaggagggaactgtttggagtcaggagccctaaatctcagaacaatgagatgataaagggtggggtgtgatgaagcctgagcccctctctcagatgtccagtcatgtctagtcagtgagaatcctg

SEQ ID NO: 41922 - DNA, 955 bp, Artificial sequence
  DNA replication origin
cgtccgagaggtgaggggcgcctctgcccggccgcccctactgggaagtgaggagcccctctgcccggccggccgccctgtccgggagggaggtgggggggtccgccccctgcccggccagccgccccgtccgggagatgaggggcgcctctgcccggccacccctactgggaagtgaggagcccctctgcccagccagccgccccatccaggagggaggtgggagggtcagccccccgcccggctagctgccccgtccgggaggtgaggggcgcctctgcccggccgcccctactgggaagtgaggagtccctctgcccggccagccgccccgtccaggagggaggtgggggggtcagccccccgcccggccagccgctctgtccgggagggaggtgggggggtcagccccccgcccggccagccgccccgtccgggaggtgaggggcgcctctgcccggccgcccctactgggaagtgaggagcccctctgtccggccgccaccccatctgggaggtgtacccaacagctcattgagaactggccatgatgacaatggcggttttgtggaatagaaaggggggaaaggtggggaaaagattgagaaatcggatggttgccgtgtctgtgtagaaagaagtagacatgggagacttttcattttgttctgtactaagaaaaattcttctgccttgggatcctgttgatctgtgaccttacccccaaccctgtgctatctgaaacatgtgctgtatccactcagggttgaatggattaagggcggtgcaagatgtgctttgttaaacagatgcttgaaggcagcatgctccttaagagtcatcaccactccctaatctcaagtacccagggacacaaacactgcggaaggccgcagggtcctctgcctaggaaaaccagagacctttgttcacttgtttatctgctgaccttccc

SEQ ID NO: 41923 - DNA, 1204 bp, Artificial sequence
  DNA replication origin
cggctggccgggcggggagctgacccccccacctccctcctggactgagcggctggccgggcagaggggctcctcacttcccagtaggggcggccgggcagaggcgcccctcacctcttggacggggcggctggccgggcagggggctgacccccccacctccctcctggactgagcgtctggccgggcagaggggctcctcacttcccagtaggggcggccgggcagaggcgcccctcacctctcggacgaggcggctggctgggcagggggctgacccccccacctccctcctggactgagcggctggccgggcagaggggctcctcacttcccagtaggggcggccgggcagaggcgcccctcacctcccggacggggcggctggccgggcggggggctgacccccccacctccctgccggacgaggtggctgccgggcagagacgctcctcacttcccagacggggtggctgccgggcggaggggctcctcacttctcagacggggcggttgccgggcggagggtctcctcacttctcagacggggcggctgggcagagacgctcctcacatctcagactatgggcggctgggcagagacgctcctcacttcccagatgggatggcggccgggaagaggcgctcctcacttcctagatgggatggcggccgggcagagacgctcctcactttccagactgggcagccaggcagaggggctcctcacatcccagacgatgggcggccgggcagagacgctcctcacttcccagacggggtggcggccgggcagaggctgcaatctcggcactttgggaggccaaggcaggctgctgggaggtgaaggttgtagcgagccgagatcacgccactgcactccagcctgggcaccattgagcacggagtgaaccagactccgtctgcaatcccggcatctcaggatgccgaggctggcggatcactcgcggttaggagctggagaccagcccagccaacacagcgaaaccccgtctccaccaaaaaaatacgaaaaccagtcaggcgtggcggcacgcgcctgcaatcgcaggcagtcggcaggctgaggcaggagaatcaggcagcagtaccgtccagcttcagctcggcatcagagggagaccgtggagagagggagagggagaccgtggagagagggagagggagagggagagccagaagg

SEQ ID NO: 41924 - DNA, 1518 bp, Artificial sequence
  DNA replication origin
tgctcatattttcatcccttcatttatttatctgtccatttattcaacagatgaggagtagagatagaattctaagcaaaatagacttagtttctgtccataggaagcttagggctaagatgaagcgatgtcaacttaaaaaggagaagatagtacaagaaaggataatgaagaaagaaaaacagaatgaggaagaagggagggagggagggaggaaggaaggaaggaaggagggaagggattaaggaagggagggagggaaggacagaggaagggagggagggaggaaagaaggaaggaaggatggatggaagggagggagatagggaggaaggaaggaagaaaaaaaggaaaagaggaagagagggatggaaggagaggaggaggaagggagggagggaggaaggaaggaaggaaggaaaaggaaaggaaagaaggaaggaagagagggaaggaggaaggaaggaaggaagggaaggagggaggcaggaagggagagaaggagggaggaggatggaaggaagggattaaggaagggagggagggaaggacagaagaagggaggggaggaaaagggagggagtgaggaaagaaggaaggaagggagggagggaggggaagggaggaaagaaggaaaggaggaagagggggatggagggagaggaagaggaagggaggaaggaaggaaggaaaagaaggaaggcagggagggaaggaggaaggaagggagagaaggaggtagggaggaaggaaggaaagaaagcagggagggagacaggaagggagggaggagaaaggaagcaaggaagggaggagaggagagcaggaagggagggtgggaagaaaaggaggaaggaagaaagagaggaagggaggaaggaagggagatagaaaggaaagacgaaaggatggaggaaagaaagaaagggagggagggaggaaaaaaggtgtaaggctaacaagatagaaataagggagaaagaaaatgacagaaggaaagagagaaggaagggagggagggagggagggaagctgtaagatggtagctgtaatagtagctatgaaagagagaatggtggcccttttcctagactggagtgcacacggagggtgtcccaacactcaatgttggggtggtaatttgaccacagcaaggaagtactacagaaaggtgtctggaaatgaagactctgacagaaggtaagatgtagcagatttatgaagatgggagttggaaagtaagacaattttctgtgtgcctgaatgtcttcctctccaaagggggagtaataccattgagttccaagttgctgtcaggactgactcaggtaaagtagaggaagacacctgacaggtcctcacactaattaggtcgtcttaggtttgtttatacatctatcattttgcctctttgttctttgcataagttttggtaatgattcaggcatgagacgagagagaggagaaatagaggcaaatactaagattgtggctaagaaaagctactgtacttggaaa

SEQ ID NO: 41925 - DNA, 930 bp, Artificial sequence
  DNA replication origin
caattcctgacactctgttataatatctgctcttggccgagaattttcattcactaatgaaagaatggatggatggatggacggacggacggatggacggatggatggatggatggacgagtgggtgggtagatgggtggaaggaaggaaggatgagtgggctggtggataaatggatggacggatggatggatgagtgggtgggtgggtggaggcatggatgcatggatggaaggatgagtgggtgggtggacagatggatggatggatgagtgggtggatgaatggatagatggaagaatgggtgggcgaatggatggataaatggagagacgaatggatgagtagatggatggatgcatggatgagttgatagatgaaaggatgaatgagtgaatagatggatggatggatggatgagtgggtgggtgggtggatagaaggataagtgggttggtggatggatgggtggaaggatgagtaggtggatggttggaaggatgagtgagtgggtagatggaaagatgagtgggtgggtggatagatagatggatggatggatagatgggtgggtagatgcatggatggtggaaggaaggatgagtgggtgggtgaacagatggatggatggatgagtgggtggatggagggatagaaggataagtggctgggtggatggatgggtggaaggatgagtgggtgggtgggtggatgaatggaaggatgagtgagtgggtagatggaaagatgagtaggtgggtggatggatggatggatggatggatggatggaggaatgagtgggttggtacatggatggaaggacaactggatagacggataaatgaatgaatgtatggatggataaaccaatcaatgaatggacacctaattgtatgcaactttgactttatctctggccaggaaactc

SEQ ID NO: 41926 - DNA, 1164 bp, Artificial sequence
  DNA replication origin
gggccgcaggtggagctgcctgccagtcccgtgccctgtgcccacactcctcagcccttgggcggttgatgggactgggcgttgtggagcagggagcagcgctcatcgtcgtttgggaggctccagctgtgcaggagccgatggctgagggggatgggggaggggggaggggatgggggagggggaggggggaggggaggcgggtgtgggggaggcccaggcatggcgggctgcaggtcctgagccctgccctgtggggaggcagctaaggcccagtgagaaatcgagcacggcagctgctggcccaggtgctaagcccctcactgccaggggcttgcgggccggccagcctctccgagtgcggggcccgctgaccccacgcccacccggaactcgcgctggcctgcaagccctgcgtgcagccccggtttctgccggcgcctctccctccacacctccccgcaagctgagggagccggctccggccttggccagcccagaaaggggctcccacagtgcagcagtgggctgaagagctcctcaggtgcggccagagtgggcaccaaggccaaggaggcaccgaaagcgagcgagggctgccagcacgctgtcacctctcaagggaacctattaacatcagctttcccttacctgaatttggaaacaatcgagagatagggagagaagtcaagcagctggaaatcaaaatttacaatttgtgcctggcaaattgggattgaaagatacagattcaatgtgcagaaaaatggacatcctcatagccccccacccccatgagacctctgcttccagcttctctgggtggggaacgcctcccgatacgatggtgaggaagaggagtccacaatgcctgctctcttggaaaaaggctgcatccaaaaatggaggaaaggaaaactctaaacagacccaattttctacttcaaagtaatcagcatgcacattactcttcttctcagactccgtgccacaacaactgtgtgaccactcatcagatacggatgctgtatcacagcagggacaaggagatgtcagagagaagtggcagggaagagacaatatgtctggcctcctcagagatcccaaggaggctgagagactattgtctctttcccatgatcagtatgcctaatagtgacagca

SEQ ID NO: 41927 - DNA, 1294 bp, Artificial sequence
  DNA replication origin
tacagcttgcatgtccatgaaactggctttgcctatagaaccttttgaacaagatgaccctgattttctaattcgctgagaaacacaccaaggccaattaatttgactggcctttctgatttaagctatgtgaagaaatacacatgtaagatgatgtatttgaaaagcactcataataggatagctgcagatggctgtcattgcaatttgttaacaggcagatctcaaaattgcagagtggaacctgtgtataagaatagggaaaagggtgggaaattgcaaaacaactatataggctttgtgcaaagaggattccagccttctgatgtagctttgagtagagcgagtgcatctagataccctgactgtgcttagctgggtgcttatagagatcccgttttcgaaggtgaaagtgcaattgggtaggagagggtggagatgtcagagcaaaggaacagcagtcagttgttgtccattcgaataggagtgtgcctgggtcttttttctctgggctctcctacctgcaaggggactgtcacttcctgatggggctcaggggagtgtagagctttgttacaagttgtgtcttatcaatgcctcctgtctttctgtggcaggatcctggctggggagggagaatttgtgtgctgagagaacactagacaaaaacgacaggagaggacggagcagccattccaaagctaaaaagcctgagtcaagaggctcgggcaaatcgtggggaaagaaagagattaagacgcaagtctatttagaataaatcactcactttggggcgtgcaaggcttactagaaaaacagacacctgaggaaacaaggcgtgtggacctaaaggtggttagctatgcactgagactgtctccagggaaaacagtgcgggagggagggagggagggatgcgggaaggacggaagaaatgcaagagggagagaaggaggaatttgtctccgggacactgtagggcaaatgtccacgctcccctccccgtctgtcttactgccatttgttttcttcacttctttccactacctgggcaaaggaaattcgaatatgtgaaagcgtgggaaaagcctggacccaggggaggtcggggagaaagcaagccacttaggggcgcggggtcaatccccaggcaggtgggacgcccctgggggtcctgaggcctcttccctcctgctgaagggagcacccctcctggcaggcctggacctgctcacaccgacgtttacctggacggagggggaaggtgggaggggcaggaagcggttggtgcgaa

SEQ ID NO: 41928 - DNA, 1095 bp, Artificial sequence
  DNA replication origin
cgcaaccagggtgtgaagcgctgagcggccggctgacctgcacacgggcagcccgagacccctggccccttcttggctttggagtccaccatgcacgtgctaagaggccccaggttttcaaagcaggaaatggccctggcatcgttgcctggggcctgggtcagggcgaggccctgagggtgggctgggatgggccagggcagggagggagctggagacacctgagtgatccccagggcccaggagtgtccccgggacttgtgcatgtgtgcagtgggtaggggtggggcaggggaggggggcttgggggaatggagggggtggagaggggagcaagggaggggtggtggcagagggtggagggtcggggaagtggcagacaggcaggggccgggtgtggggccagggatgggggcaggggaggggaggggtgtggggttcgtggggtgaggggatgggggaaggggaggaggaggggcggagtgtgtggggaggcgacaagcaggggtgttgtgggggacagttcgagtgggtccctccagcccggccgcccgtcaggacaggacacttggggtcacgaggggtcacctgggcatccaggcaggcaagtggcagtgcagcccctgacattcccccagagatggctggggaggtcctgtgacacccgtggtcctccgggccacgcaggtctctggggcacacaggggcagggctgaactctgtcccagggacaccgcaaggatcctgcaggggccattcaggtgtgcgaggcagctgtgagttctgcagccagccccagggacgggctggacgggccacgaaggataggaggggacactggcatcttctccgacccctcctgctcccacaggatacacggggtgggccagccccaccctttcttgaatccgagatcccgttggctctcctttcacatatcctgtttccttagcttacttagtttgactttgcactcaaccaggttcagggatcgcctctaacttcccaggacagccaaccatggagcccgtgggcaggaagcgcagcaggaaggctgccaaagctcagttggaagctcaagttacggccgcccag

SEQ ID NO: 41929 - DNA, 1061 bp, Artificial sequence
  DNA replication origin
acaaaaccatcagcacccagaattcatcctatcggctctatctgcttgttagggaagggccctatatttggcctcaagcttcccaacagcctatgtaaaaagggaatcatgatcacctatgtgtccacaatattaaaaaaaaaaaaaaaacagagcaagcacttgagaacaaattctgctcttcgtcctgacagaatgttctctgctttttctctaacatggacgtctccatggtgtggagctaactgtgtagccagaacacaaacaagaaacaaagttcagtacctgtgaatacaaacccgcgggtgcaagggtaatgtgcgcacaaacagataggaaagcagtggaaagaggcctcgggagaccttgcggaaaaggtcctgagcgttgggtgagatttccaaggagagaaaaaagaacgacgctccaagcagagggcacagcctggaaaagacatgcagttagaaggaaacaaaacatcttttgatacaggcacgttgctggggtggctggagtgtaggtctcatgggagcaagtaaaggaagataggttggaaaaggcagattggaaaatttcctgaaggcaggctgaggaggtgaggcgttatttcatgagctatgttctggatcaagcagggaggcatgggaggtttatgatggaagcagggaaccctggggttgaggttatggggagaggaggaggtggaagaccagacctatggctggggagtagtagtctacagatgccaagacgaagggggtggcaggcggaggaaacgaggagtatgcatgaagagctctggagagggggcactgacaagctttggaaaaatgactcaatccctggcatggggcctcagcttcgaacataggtgctggagaagtttgcgggatgaggaattacgtgttgaagataggggagaggtatgacagaaaaaaaaaaggctttgtactttagaacctgagcggccaggaggagcccagtgcattaaccagaatagggaagacagatgcagaatccgtcagacgcattgagtccgaaacgtttttaccacatgctgt

SEQ ID NO: 41930 - DNA, 1323 bp, Artificial sequence
  DNA replication origin
cagcaatattttgcagggtaattttgaggtccgccgttttggtggaggaccggcctcttaaaaactcacctccggccgggcacggtggctcacgcctgtaatcccagcactttgggaggccgaggccggcggattgcctgaggtcaggagttcagaccagtctggccaatatggtgaaaccccgtctctactaaaaatacaaaaaaaattagctgggcgtggtggcatgcgcctgtaatcccagctactcgggaggctgaggcaggggaattgcttgaaccagggtggtggaggttgcaatgagccgacagcgcgccactgcactccagcttgggcgacagagcgagactcctcagaaaaacaaaaacaaaaacaaaaaaacaaaaacctcaccttaggtccccctccccctacaaccagaacaacaaatggtctagagttcgaggaagagcaagtgaggttatagtttagattgctgagtgtaccgggctcttagcacgaagctcattatatagtaaaggaaggggcaagaatatttgaaaaatattcaacgaggctgaccccagaggtgctggggagggggagtggagatctgtttaactgaattaaggctgcgagtggttgggagtagcctacgtggaggggaggaaggagcgctggggacttaggtacaccggggccaggccgtgtaagccattgcaacataaagcactttgcaagggccagagggctgatgcctggggggttggggtgggagtgatgaggcccgagtgcccaggtccccccaacctcctcagcccccacacccgagttcctggcgcctatgcctgtgtgtctgagtttgtccctaagcatttctggctcttcttgggaggtgttttgcaaaggtcgaggctccgccggaacccccactttttgagctggggtaaagactactggggtgtcttctaagacgccgattttgagggagattcaccatcgggcaggtggcagggggttctgttggggcagccgggtggcttcctttttggggtgggggagggtaacactttagcagtgatcgaggttcccctgccccctagaaactgagggggtggccgaggttcccgtcccctcgaggcagtcgtggaaaggctgggtttgggatgtgatgggggtagccctggggtcctctcagtcccacggaggccacggggaagggaccgggaccagagcaactagggagaggcccgggttcccctcacccaccctaggcgtgggggagcggggcgggcttggtagggacgctggtcccccgaccgtgggacaggggctgggttggga

SEQ ID NO: 41931 - DNA, 1096 bp, Artificial sequence
  DNA replication origin
ggccgctccccgaagtgccggcgcgccttgcggggagagacggaggtcggcggggggctcctttgttttggggagggggaagtggccggtaagtttagggaagcgctcggcttttcctccggtgcccctttgtctgccgattcaggggcttgctgggcaaacctgcgccaccgcgggctccggggaccggggtggagggcggtggcgggatttccccgctgttggggagaagagccccattcatacccgggacgcgggccggccctcccggacccgggtggaagcgcagcctcgcggagtggggcaagcggcgggcgaggtggcgcgggccccgtgtctgctcagtttctgacgcgcagaaactgtcaaggaagtcgggagccccagtcctccgcccatctccccggcctgagcgcacggctgggctgggggcacccttggcccgtcgagggtctgcagagcgccgcccggggagagcgcagacctgttgctgctcctgggctctgacggggcgggtggggtgggtctcgcagatcctgggccccggccttgctatccagggggaccttccctaacgatgggaccggtgctcggagtggagtatggggagtgcgccttcgggagtcggcgctggccggatatgtgacaactgtgggtcgctggaggcccgcctgcgctgggatagggcctggacttcacgtgcgtcgcctgtgttccgtcagaccggggccggggctcgctccctgcaaggcctcgtgttcccccagccagctgcgttggacgttccacaaaggtagggactgacgtttattctcgagtcagtgatgttctggagcaaaacctaaaaagaaacaaaaacctaccctctattgtatttgcaactgtttctgctttgcattgtcatgtgtggtttgacctgccttttggatgttttcctctcctgaaacatcgcccagtccctggtttaacctggaaggcgagggggaaggaaggcaacctccctgctaaggttccaggcagtggctttggtgttggaagtggcacttgacgattttatgaaaagtttacaagtccttcctagaaaagatgtaattag

SEQ ID NO: 41932 - DNA, 811 bp, Artificial sequence
  DNA replication origin
ttgtgtctggcttttttcacttagcataatgtccttgaggttctcccatgttgtagcctgtgtcaggacatttgcagctcagttcatttccgaggaattgtcctatatgcagggggtcttaggaacacaggtaacttcacttcccatttgaagagcgaggagttctcccgaggccctgaacaggaatagagactgtgaggcattggcgtttggaaggaagtgtctctgaaatagaaacgactgtcagatgaagagggacagttcagtatggtacccgggcctgcctttccagacgtccccagcctctttgcctagttcccactctgggcccctgggcaggtgacccgcagctgcacatgggtttcctgggaagccacagtgctgaggatcttgggagagaggctcaggatcagagtctggggagtgcaggagcttgcggggggagggggtggggtcagtgggggcggggggtgctgctttggggattgggaggagtggactggggcggggtcacagagtctttagctgaacccatgggtgctctgggtctcggcttgtcctgactcaagtcaaggggcccaggcctttgtaaaggtccacattgcccattcactggggcctggctttgggtgagggtggcagctggagatggggggaagccctgaacgggaatcttggccacacactgctatatccgcgacaccaaattctatcccacctgttgttggctgttctggaaaccagcactgaaaaatacggagtggaaaagttttctgattttttttttcctgctttgtttgggttttttgga

SEQ ID NO: 41933 - DNA, 1796 bp, Artificial sequence
  DNA replication origin
tccctcggatggatggggcatactgttctgaccaccatgtctccttccaggccacatcctctttcgtgagcactgtgagggcatcaccccacatttttagaaacctcagcgccccatcttgcccccatcccttgcctttggcaccacttaaactacagcctcattctcttcctcctcgcctgagttctccagccaactcaagtgccacctcctccatgaagcccctgtaggtttcctccactgggacaaggacgcgcagagatgaaaggcagagaagtccagccctgggacttccaggccgtcagttcaatcctttgagcctctgtctcctcctctgtgcagtggggcagttcagtgctcccccttagtgctgtggcacgctgcgttgattggcctgggtgctgttgcggatgcccagcgagttctctgtctccctcctggttcttgtcccactccctgctccctgttacagcctggaagtggttggacggtttcccctgggagtcttgagaacccccaaagacgccatgcatcttcttgtcctcttttcgtggcatgttctgtgttgtgtgtgtgtgtctgtgcaacgtgctgtggcattatgtgtgtctgtgtttgtggcgtgttgtgttgcatgtgtctgtctgtactgtgtgtgttgtgtgtgttgtgtgtctctggcgggctgtgtatgttgtgtgtgtctgtgcacgtgctgtgcggcatgctgtgtatgttgtatatgtctctggtgggctgtgtatgttgtgtgtggctgtgtattttgtgtgtctgtgtggctatatgcggcgtgctgtgcatgtcgtgtctatctgcaccgtggtttgtgtgttgtgtctatctgcgtggtgtactgtgtgtgttgtgtctatctgtgcagtgtgtctgtgtggtgtgctctgtgtatgttgtgtctatctgtgcagtgtgctgtgtgtgtgtgtgtgtggtgtgctgtatgtctgtctgtgcaaggtgctatgtgtatgtcgtgtctgtgcagtgtgctgtgtgtgtgtctgatgtgctgtgtgtgttgtgtctatctgcagtgtgctgtgtgtgtgtctgtgttgtgtgctgtttgtgttgtctctatctgtgcagtgtgctgtgtgtatgtctgtctggtgtgctctctgtatgttgtgtctatctgtgcagtgtgctgtgcgtggctgtgtggtgtgctatgtgtgttgtgtccgtctgtgcaccttgctgtgcatgttgtctatctgtgcaccttgctgtttgtgttgtgtctctctgcacggtgcactgtgtgtgttgtgtctatctgtgcagtgtgctctgtgcggtgtgctgtgtgtgtgtctgtgcagtgtgctctttgtgtgtgtgtggtgtgctgtatgtgtgtgtctatctgtgctgtgtgtgtctggtgtgctgtgtgtgtgtctctgcagtgtactgtgtgtgtgtggagtgctgtgtgcgttgtgtctatctgcagtgtgctgtgtgtgtggtatgctatgtgtgttgtgtctatctgtgcagtgtactgtgtgtgtgtgatgtgctgtctttgtggtgtctgcagtgtgctgtgtgtgtgtggtgtgctgtgtgtgtgtctatctgtgcagtatctgtgcaatgtgttgtgtgtgtgtggtgtgctgtgtgtgttgtgtctatctgtgcagtgtgctgtgtgtgtgtgtgtggtgtgctgtgtgtgcacgtgtgtggtgtgctgtgtgtctgtgtggtgtactgtgtgtgtgtctatttgtgtaccgtgc

SEQ ID NO: 41934 - DNA, 1474 bp, Artificial sequence
  DNA replication origin
atcacggaacaggtccaaatccacaggccgtgcgcccttatccgggcaccagtcgggtctcaacctgcgggccacgcgccctcacccaggcgctgatcagattccaacccgcgggccgcgcgcgcccttacccaggcagccgagaaggtcgcaggcagcggcagcgcgcaggatgcggaccgaggccggcggggacgtcgcgggggacccggggcccgcgggccggcggccgggcagcagctgcagaaggcccagcgccaagcggagcccgccgctgcccaggcagagcgcgtggaaggcccgcggctggaagctcagcacgagctgcgtggctgcgtcccgcgtggggcagcagaaggtccctaggcgcggggaggccatgggctgtgttcgcggacgcggctcgggtgtgccaggaccccgccggcctgcctgggtcatgtgctgggcgggctgggggcggcatcatgtgccctgggcctctcccccaccccaacccccagcgcctgcagtagagccaggctcggtgggggccgagagcactgggctaacgccacgaggcctcacgaggtgatgcttgggcgggcggaggaggaggacagagagagggagggctgagaggagaggaagagggaggaggaggagggaagtggaaggagaagcagaaaggttgggaaggttacctttctccccattcaccaagccttcctggtggtttctctgccacctagagcgccaaacctgccatctttactggtcttctagagaaacaggcctcgtggactagatctttcctatttgggactctgacatcctgattttgatgcctttaaggcgccagaacatgttcataaactgtgactgatccctgtaactgcttttttcctaagtagagatggttgtccaattagtgcttttttttatggcctctctcattcatggatataatcccacagaggcaggattttcgtttacaattaatgaatgaaacaaacagatcaatgttaaagaaagagcagtagctcacacctgtaatcccagcaccttgggaggccgaggcaggcagatcgcttgagctcaagagttggagaccagcgtgggcaacatggcgaaaccccacctctattaaaaatacaaacattagcccggtgtggtggcccaggcctgtgatccaagctactcggcaggctgaggtgggaggatcgcttgagcccaggaggtggagtttgcagtgagccaagatagtgccactgcactccagcctgagcgatagagccagaccttgtatcaaaaaacgaaacaaaacaaaaattagctggatgtggtggggcgtgcttgtagccctagcttctggggaggctgaggtgggaggatcacttgagcccggcaagtggaggttgcagtgagcagagattacaccactgcactccagcctgagcaatggagtgagaccctatctctctctctcacacac

SEQ ID NO: 41935 - DNA, 1221 bp, Artificial sequence
  DNA replication origin
atggtgaaaccccgtctctactaaaaatacaaaaattagtttggtgtcgtggtgggcgcctgtaatcccagctactctggaggctgaggcaggagaatcgctggaacccgggaggtggaggctgcagtgagccgagatcgcaccactgcactccagcctgggcgacagagggagactccatctcaaaaataaaaataaaagcaaagaaaaagaaaagggtgatagtgagccagggaatgaaagggagtgactctggagtcagcaaatgacttcacctgcacagagaacagggtggtatgagcccaggacaccagcagcctcaaggcaggggatttaagtggggagaaagcaggtggaaaaaggtgagtggggccaggaagccgccttcaccaccccctgcctgagcagggtagtcaggaggggtgtggggaggaaagcagcccatgctccatggctggaggaggcacagtgccagggagggccaggtgtccctccgtgcctccttcagaaggggccactgagagaggaggctgaggatgggaattcctggtgattgcgggtttccggtggaggcggggcgcacctggaggcttggctagcatgagcagaaaacagtggaggctgggggcgtgggcttcgagggctcaaagacctcgaaatgaagtgtggggtgggggggtgatgttgtggggggtgtgttaaaactaactcctgggtttctgggctaagtaactgagttgagagacagataaatggaagattggaagtggaagaagtggaagagccaaggaggggaggcaatgatttgtgcttcagcaggtggagtttgacatgcctttgggatactgtatgagtttcctagggctgtgtgtacaaattaccattatggcttagaacaagagaaatttctcttttttctttttcttttcttttcttttttttttttgttgttgttgttgagacaggtctcactctgttgcccggtcaggaaagtggcacaatcacagctcactgcagtctcagtctcccaggctcaagatggatacatttaaggtcagatatcagctggggaaagggccacactaccttaatctggagttactcagtgccaatgtacacctatctctctcttttttctccttcctgccacctcatcccacccttctggccatgcagttaggaggaccccaactgagcatgagcgaggggatcagcaaatgg

SEQ ID NO: 41936 - DNA, 1701 bp, Artificial sequence
  DNA replication origin
cgggaggggcgctcaggcgcgcgcgccgttcagcgggttcggggtcggggtcgaggagcgcgcgccccggggctggcggagccagcgcgggcgaggacgggggcggaggccccggcgccaggtcgggcctttcctcccgcgccagagctctgcagtgcttcgaagctctgggcgcccccgcccgccggttggaggccaggaccgggcaggtgaggcggcaggtgagatgggcgcggggtggcgtggcgggagtctccggcctcctccgtctcggggcgcgcggcccgccggcgcccacactttgttctcgcgcaccgcgggctgccgcgcaggtgagagcggaagcgccgcgggaggccctggtgcccgcgctgtggccgctgccccggggcagagggaccgcccgtcccgcgcggccctgcgcgcactcacactctggacttagagagccgggaagggcgccccccagcagcctgagccgggcgcgggtccggcctctggaggggcttggaaggcgggcgcagaaggaccgtgccccgtttccacgagggccttcccaccttcccgcagaggcctcccacagccaccgcgcagaaagccgttgcgtctagatgctgtccccactcgcctaggattggaccacaaggtcttcaagtttcccaggtttacatccccgaaaaggggaggtggaggtctgggattggtgaaagtttgcggacaacatgtgtgccacctcttcctgctcggtttcagtttccatgaaactctggtctaaagtacctgcatggataggtatttacatgctttgcaaaaaagctgttttcgttgctgtttctatacgtagctgaaggctggtgaacacctcttttctctaagcagctccatccaggcccttttcagaggtgacgatgctggagtacgcatccaggacaggccgggagagcactggacagagagtcaagggtccccgggtctgggttctgccactgtcaagctgggacaagaaatctcagctctggtctgtttcttcagaggtcaagtgagaggggtgcattctgtggaggtgtctcatgcagccgattaaattcagagtcgcagctccactgggcacctgtcatggcgctgggcacgtggtgactgccccataattaacttctaactacagtctctgaatgcctttagttagaagaatgaggcgattttttctttttcaaagattaaacgaaggcttaaggaatgtgcctctcagaatcaagtcgagtgtatcttcactgtggtgatggtcacaggagctgccaagttgattaagctaaattgcacagaactaaatgcacgtgaaacgggaaatctgaaaaggcttggtggattgtatcaatgtccatattccaggttgtgacattgtgctgtagttttgtaacgtgttgccattggaacaggcaggtgaagagtgaagggtgcacaggacttccctgtattattccttaccaagaggcgaagccagttgggtggggactccgagaatttttctgtcttacaagaggattgtaaaatgcaccaatcagcgctctgtggctagctagaggtttgtaaaatggaccaattagcactctgtaaatggaccaatcagcgggatgtgggtggggtcaaataagggaataaaagctggccactgcagctagcagtggcaacccggtccagtcc

SEQ ID NO: 41937 - DNA, 1116 bp, Artificial sequence
  DNA replication origin
gctccatccttggagggcggccagctgccgtctgcgtgggcctcctgtgggcagcccgggcctcccgatcccttcccgaggctccccgggtgtgctgacctccaaggccgatcggtgagctctggtctccggtcaccacgaggctgagcctgggccagggccgtaaagtgctgtgccgcagccgcctctgagaacacagggccctgggccttctcgtggctcttggtggcagcaaagctgtcactgcggagagggggagggggaggaggtggggatgatggtgctttcttcttatcgggaacataccagactggcccaaaattggacctcccaggggcagccagcttgggctcggcattgtactctggcctggggcctttgccgctgtcaccggggaccctgggcgggaaacaactgagcttctcctccgagccctgagggtcgcctgcggcctgggcctgccggccaccctgcctgggagcctcccagaggcccacagtgtagaggatgttctctgcggaggacgtgtcggctttggacaaggtgtggtcaggagtgctagagctggtggagaaggagccgtaggccgagtcgcgcttgctgtggctgcccaggtggtcgatgctgctgttggacttggccaccgagaggcgactggaggggtggtccaggctgtcaacgctccccaaggagctgaagtgatctaaggtgcgctgtaggttcgtctgctcccaggaactggacaggtcgtgggaggaagaactgcaagaatgagaagaaggacaaggcatggtgtgctttagcaacagcaatggcaaagggcaaggcggtggacgcagctgaccctctgtggaaataccaaaatgccaaacagtaatttcccacggtgatgttgctgaggctgaggttgcagctcagcacatctggattttagtagagacacggagaaactgggcacaggctgaaaagactgtgtcctccctgttacatggcttttaccaaacagatgccttgcaaccctagcgcacattctcagcctgatgcccggatcgttggcaggcaacgtctgcatttacacgtctatggtcaatcaacagttaagcgcaggggtggcca

SEQ ID NO: 41938 - DNA, 965 bp, Artificial sequence
  DNA replication origin
cacagaagaggggcatttggcaaaacctgactggagggctttttgagaaacctgtctggagggttccttggcaccatgcaactgaaggctgacagctctgcacaccttctggttcagtcaatccatctttaagagtttaccttgaaagtggacatccactgccccatgaatgtgctaacctcttcaaactgggatggtttggcagggggacagtgactcttaaactcacatcacggatgtatttgtacaccttcactattccttgctgtctgctgggctggaccgttggctcctggaagatgggattttactttttcatttctcagtaccccgtacctgacataattcctgcacagattacatgctcaataaatggttggatggatggagggactggtggatggacagatgggtggttgagtagacagatggatggaccagtcctcaggtagatagttggagggtggggagggtgggtggatgaatagttggatggatggaagggtaagtggatagatggatggatggatgcatggatggatacatggatgagatgtagggatgcatggatggatagatggatgaatggaagagtaagtggatggatggatagatgggtgtgtggatggatgcagaggtgtatggatggatggatgggagggtaagtggttggatggacgaatggaaaagtaagtgggtgggtgggaggatggatggataagtagatggatggatgaaagggagggtgagtgggtggatagatggatggatagaggggagggcaagtggatggatggatacatgggtgcatggatggatggaggcatgggaaggtggatggatgagtgaatgggaagatagaaggatgggtaggtggatgtataaacagatggattggtggctgaatggataaataccaggctgaccttccttgagttagtctttcttgattgtggtgaataatc

SEQ ID NO: 41939 - DNA, 1205 bp, Artificial sequence
  DNA replication origin
tccgcctcccccggccccgcgtcctccgcgcctctccgtcgccggctgctccgcccccagtctccctcggggtcctcctcggcgctcggctcctcgaccccacccccacccctccgcttgctcctccccctccgccgtcctccctctccgcgcgctcctcgctctctccctcccgctccgccaccttcctccggcctcgggaaaccgcatggaggccaggatgggcgccgccgcgtcagtccgcccccgggcccccgcgtagaggaaggcgggcggggaggacgacgccctacccggactgcgggcgcggcctgcctggggtgactcctcgggcgcaaacaattcccgagagagcgggcagtgccctcccttcacccgctcccgggctctggctgtctggagaccctctgcgcacttggcgggaggctgcgccctcggtctcccacacaacccgtctggtcccgcgaaggtgggaaaagcccctgaaggcggggccgagggagctgaggagctgggggagcccgcggccggtcctctcgggcggcgcagggaggacgcctctggaagcgggcagctgggcaggtggccactttgcgtccccgccaggacagccctagaagggctaacctgggggcccacactaggcgggagttccttgaccttccctgagcgcttcatccggtttgtggggtctgatcgtttgagcggagacccaagtagaccattgctggggaggaagccgggtcaactcctaaaactttcagcctagacgggaacttctgtttcactggctcccagctggggaagctgaagctccagagttggggctgtgtcttgctctaaatctcccacctacttcgtgccccagacccacagccgcaacacgttatgccaggaaatgcaggacagtatcagggagatttttaaacagttacagtgatacaaaaatatctggtagagcctgattgaaatccagatacacaggggaagagactggaggaaaatgtcctgaaatgctcacaagagtttgcattcctttggcgggatttttaaaaatgatttgccttccaattttttgtaaaatggtaatattacttttatgaggggaaaggttgttttaaaaaagaagaatgggccgggcgcggtggctcacgcttgtaatcctagcactttgggaggcccaggcgggcggatcacgaggtcag

SEQ ID NO: 41940 - DNA, 1094 bp, Artificial sequence
  DNA replication origin
ggccgggcggcggcggggcccgcgccgtcatgccttggctgagcggcggccggcggcgacggcggggacagccgcgcgaggccccgcgggagccgccgccttctgcgcagccccagcgggaaccgcgccgccggcgccccccgccgcggtccccacgcccccagctccttccgcgccgccgccgcgggcccgggagagcgccgagctgccgctgcccgccggctgggaggaggcgcgagactacgacggtcgcgtcttttacattgaccacaacacgcgccagacgtcgtggatcgacccccgcgaccggtaagcgggccggctgggggcgccagacccggcgcgggcgctacgacccgggccgccggccggcgccaccgcggatgcgctggggacacgccccgcccagcgcggggccgccgccgagagcccccgggcccgggcagagctcggagcgcctccatccccggaaccaggggactccctggagtgctccggtccaggctacgatcgaggcgcccccatcccttgggcccagggagaggatcggagacaccaggaggccctcggggctgggtgaagatctttggttccgggggtccgggagaggatccaccctcccaataccccgactcccagggctctgaccaagaatggaggtgccccttctccaggcctcgagccctctgagcgccgaggccggccgcctacaggtcccccgccgctgggcggaccctctcattcggttccctcacgtcacccgctgtccggcgcctgggaactgggctcctggaatttcctctcctggggctgacagatggccctcttttcctttctctgcggcagcctcgcccatcccggtcccgggcgtctgcggcccactgccccggccctggttctgcaggtgtccccagccccgcggtggcgagatgagctgtcaccttggatcacaaacgtgcgccccagctttggggtgcgggttccctgtctggcgggttcaggctggtttccatccaaaacctgatgtcagacgggcccttgagggattcccaacccttttggagttggagaagtctgttcccaaactctagttg

SEQ ID NO: 41941 - DNA, 898 bp, Artificial sequence
  DNA replication origin
tagttagaaagaggcagcagaagacagtgaacagttcatacagagttggcttcagtgtattgctggcagcatgtgcccaaggctgtaaaagatcttcccatccttaggttcacaaatgccactaaaatagtggtaactctcaggcaggtgtgactgtgccccttgggacatttgcactgtctggagacattttttgctgtccccacttgggggggatggggtgcgtcctgctggcacctagcgggtggagcccaggggtgtcgtccacacctgccgtgcagtgtggcccccccatagagagtgagctgccctgagtcagcagagctggggctctggctcacacctgctccaggcctccagcagcgagctgttctcgttggcccttgcccttgtgggtcttccgctgcagtggtggcaaatagcaatcactgagcgtgtcaccacattacaaggtgcaaactggcagggtgaggttggtgggactgtgtggctgggtgggtgaccgttttgtggagagcggctggagaggccttatttttcaggtgcctgcaggaggggaggagggaacctgaggtgtctagggtcagaggctttcagggagaaggagctacaggtgctaagatgagagcaatgggccaggaggaggatgatggggtcaggcggtggtggcagcacctcatgagccactgcagggactccaggtgtgactcagcaattctgttgggagctattctgttgggagacttaacatttcattgaggtcgctctgactgctgtgggggactaggagggcaggagctgaagcaaggagactggtttaggagatggcagctgcccccagggctgagcagtggtggctcaggccaaggaggaggcagtggggtggcttcctgaggac

SEQ ID NO: 41942 - DNA, 831 bp, Artificial sequence
  DNA replication origin
agttcatgtaccagtcattggaacatgatgaacaagtacagttttctctttgaaagtaacctacctttttaactgggactggaggtaggatgttaagcgggtggcttcttccagctgcataagtagacaattccttttttcctgaagcagaatcctgtaggtaagaagacagtcgattagtacatttcaaagacagggagaatattttcataacaagacagtccactatcaattccctccagctgaattaggttgcaatcaccacccattctaaaagcacccaggtcacaagggccaagatcacagagactgcttttgtcccgtttgaaaaatacatccctggcaccctgagcagtgcctgctactctgtggaagcgccaggcacagtgcacgggggaggggatgcgtgagaagaggagtgggcacagggatgggtcaatgtgtgggtgggtggctggatgggtgggtggctggatgggtgggtgggtggctggatgggtggctgggtggctgggtgggtggctggatgggtggctgggttggtggatggctggctgggtaggtggctggatgggtggctggatgggtggctgggtgggtggctgggtgggtggctagatggctggctgggtgggtggctggggatggctgcttggatggatgggaggagtggtaagtgagcagaaggacagataactagcagatgagctcaaacgcagagcacgcagtcatctgttgaaattccttggaacaaatcagattccctcatactaggccaccttctagagaagaacaaatataattctaagatctatacagttaaaacattag

SEQ ID NO: 41943 - DNA, 960 bp, Artificial sequence
  DNA replication origin
gagagggaggggactttgcaggtgccatttctggaacctgttttctcatccatgaggatggaagtgattatgcctgaaaaggaaatgagattatgtgtatatgaaagcacatatgacagtgcctggtgtctagttggcaatcagtatatattttaatggaccacaatggttatctgtcaagtgctgtgggatcatttaggttcggttagggaagggtttttcagcaagggtaacatttcagttgggtcttgaaagatgactaagattttgctaggcagaggaacggtgaggattctaaacatcaggaatgccccccttttttaagtcacagaggcatgaaagaatctgatgtatctgggcaattcagggagctccgaggatctggtggaggattcctgcagagggagggatagggatgagtgtggaaatggaggcagcagggccacgtggggaacggccatgctggcggtggagaggagtttgcatttcatgctgaaagccacagaagacaataaagatgcgctgcaaagggagaaacaggaagcttggaaatgagtccaggagaccgaaggcagtgatgtgtaggtggagagaggggatcaggatggagaggtattttgaggcgccacggacgggattcaggggaggtgctggggccaggaggggaatggggtcacagaacaccaggctttggcctgatgaggatgatgcctttgatgcctagaggaagcaaggggggactggcagactgcggaggaggccattgagttctgtgtagatgcgttggtttgagctgcgctgcggatgggtgatcacaggtggcgagaactctgtggttcaagggtgagggaagggccggggggagaatgaggtccctgtgtgcaagtggaggctgaagctttagaaacagccacggtggcgtgggtgtgcagagacagaagggaagaggtagtcaaatcc

SEQ ID NO: 41944 - DNA, 1434 bp, Artificial sequence
  DNA replication origin
cacggtgtctctctgagttccccgcacttcactgccatcctggggcagcccctgggcgcgagccctgctccgtgcgtgccgagtgctgtgcaaagcgcccctggcacagcgtcccgctgccgctgcggagccggtggggacctggagaaggcagcggcgcgaagggggagggggaagaggaggaggaggaggaggaggaggaggaggaggaggaggaggaggagggagcggccgagtctgatgcgatgggcgggcgtttaattccttccgctcctggcgggtccctccggcggccgccgccgctgacagctgttgggggctgcggaggccgaacgcgcccacgacaggtgtcaggctggccggcacgcctgcctcctgccaccccaccctccccggacccgtgggaccccggctgctgaggcggggactgccaaagcctttaatgccagcgagaaggcgaacttgggtttccaagaaagagagactttcactaactttgaaggaggtgtgggcctgacagtggaaggagattcagagccttctcctgggagggcagagtttccctttctagaaagccttcttctgtgagagtctcaaattgtggggacccttggggagggcaggactgagaggaaccaagtcatgctacccaggagaactgctgcggggacaaggctgcccaggatgctggtcacttagggtgacccgagttccaggggggcttgcagggcacattctgtaggttcacaataacccttaaaactggcctctgctctgaaatcccctcatggaaacctgcactttaaaacaccttggagaagatcagcgagttccctccacagccttgtccttctgtaatttacgtccagcctcccacaagttgagcccagaggaaggccaggcctggggccagagtagagactccagactcatgaatcaatcaatgcaagccccagaggggtggctacaaagtggaagatgtgcttgggggtagcttgtgccagtttgtcagggtcccactgtactgaaccggctgaatgactctccacttgctctgtgtaagaggagaggggaggagaggggaggaaagttggatgtggccccggaatttcagcccttacaatttagttgaatgaaccatccactggcatgtaatattttaaaacaatcacagcataattataattagcagtgggaatgtgaagccaggggtgcaagtggcctgaggaatctaccattagatagtcccatgacagtttatccacctggaaaactggatggttatatctgctaaagtcaatcataggcctaccttccaatccagcaaattccacccctagatatacagagtacaataatctcatcatataccagaatgctcatactgtgttgaggcataattgccccaaataaaagcgatccaaatgtacacca

SEQ ID NO: 41945 - DNA, 1680 bp, Artificial sequence
  DNA replication origin
aaagcccagctcacgcgccgccggtgcgctccaagtgccccggcggcggcaggagcagcagatccatcaccagccttctaggaaaatgggtctggggacctcctgcagccgctagaaccttcctccggagcccaagacgcgaagagggtcaggaagaggaggaggaaggtcaggcgctcgctgggttcccagctccagcctgccagcgccactcccccttcctagctgaggcgggagacgcagcgctcctgctcgctggctctggatggcctctaagactccagcaagctcctccttgcggcccgaggacagtcccgagggccagggagaaggctgcctgggcgtgcgcccagggcgcgtccaccgcgctcccggcgccgcgagaacttcctcccgctcctgagccgggcgcctgagctgcgcctccctgcactctctccttgccccggcgcccgaggttgcgcgcctggcctccgctgggctgctgcgcccactcttccgactgcagaggctcaagggttgttccaagctcaaggttcccgcggggtctctgtcttgctgcagtgtggggacaccgagcgtgctgcgcccgggacctccaaagactgcgtgcccacggtgggatggaattcccggcggcgctcagcgctctccgtggaggagggagctcaggagacagccccaaggccgggtgtgtgtgttccgccggagaggaacacgctattcgcagcccagccttgggcccagggcagacgcggagatgaccccgtacgctcgctctagaggcagcgggaagggggcggccaggacgtgtagagctggaggaatgccggggctggagctggggcggagccaggagcaggagaaagcagaacgtgaagagttttccaggcgccaaacctgcaagcggcgaggagagaaggcagctcgccactgataccgggtctcctggggagaaagtcgtgaggacggaagtgcggaccttctcccccgtctccccacccccagatcaagggtcgcgccagctccactcacgtttctggaaaggaagggaagtgtcagattgcaccccacccactggtgtcagatgggcagccggggacgattgctctgaagttggagttaaatctcctgccttttctccccgcgcccccccaccccgccctgtcccggctgtttttgtttttaaaaaggaaggatagataggaaactgtctaaaagcagtggctgccgatgaatgagctggagatggagacctactaagaaagtggagggggaggagcctttgccgtggaaggggtcctgagcacgtgcggaaacgtgctctaggaggaggggtgagtgaggccgggtagggggcaggcgccgggcgcagcttcagcccagaggctgcagagattggcgctcacaaagcgatctgtctccgcgtcccgctctgggacgcctcgggtctcagcgcggtggccacagtcctgggaagctggagaacgctggggaaatcaatcttcccggcaaggagatgagtctgaaagcagcttctcccgctgtcggacccctggaatctataaagcgcaaagcctcgccctcttggagggctttttgatgtaacagttaagctttgcaatgcaacttacaaccatctcagcagggagcagacagaatgttggaaatgtctacttt

SEQ ID NO: 41946 - DNA, 1113 bp, Artificial sequence
  DNA replication origin
ggggcggggaggcggtgcgccgtggccggggggggccgggaatggcggaggctgcggccgccccgccctcggcccctcctccgcccgccccgagccgctgccgggacctcggaggcgcctggcgcgcgcgctcccgcccgggcgcgtccccgcacgtccccgccggggctccgggaggggtgcgggcggggagcgcgaccccctggccaaggtctaccggcaggacgtctcccgtcgcccccatgggagagggtccccgcggcctccaggctgcgcccacgtgcgcgcagggtcgtccgtcgccccgagcgcccgctctccggcccgggcgtgggaggcgcctagggagagagagagccggtctggagtaggcacccggcggccgggaggctggacggcgtctgcccccaagagctccctggccgtgcgcgccgcgtcagcccccttggcagagcagcgcgccgatgagtgtggccacgcttggagaacgcagcgctggagctggccccaggcgggcagtggcctcgggcgagggcagaagggcactccgggctgtgaatagaacacttgcttatcccttcagaggacaagccggtggcaggcctggagcccccagtgacgggttgagcagtgggcagcgaggcagatgggtccttaaagagtagctgacgtcttcagtgtcagcttctagcgtggcctgacagcccccagcatccccggaatgccccccacggtctatctgctccaatagactaaaaattccctaaatagaagcacccttgaggccgctatcaatatggtacctgcacagagtggatgttaagtaaatacttgatgagcgaatgacaagtgatgggagacttgaaggacaaacttccagggacaggaaggacagtgctgggctttttcttttgagttttggaaagccgttgggcagtgtaattactggattaggaccgggctggagaccagcttccaggctaatctctgcggacctggtgaacttccccttctctgttctagcctccagaaagttgcatttgcttcccctctgcacgcttccttcaccaggttcctggtatacatccttcacatttcagcgtgggcatgcca

SEQ ID NO: 41947 - DNA, 1284 bp, Artificial sequence
  DNA replication origin
cggggacgcgcccgggcgggagcgcgcgcgccaggcgcctccgaggtcccggcagcggctcggggcgggcggaggaggggccgagggcggggcggccgcagcctccgccattcccggccccccccggccacggcgcaccgcctccccgcccccgcccgccctcccccaccgcgcgcgctccgcccgccccggagcctcgccctccgccacgatgagcaaatgagcgcgagcgagggcatgaaatttaaattccactcaggggagaaagtgctgtgcttcgagcctgaccccaccaaggcgcgagtgctgtacgatgccaaggtgccgccgcggagggacagggaggaggcgcgggctgggggacccgggaccgggggcgggggcgggggcggacggccgcgcggagctgagggaccggccgggctcctcggcctgcgaggagcggtgcggccggcagggggcgctcacagggcgctacgcccgggagtcggggcggggtctgggatgcttccacttccttccgtcaggccgggcggcgcacgcgcggttgggagcctcgcccatgctttgtcgcgttaccggggctaccgtttgcgcccccgactgcaacggtggccgctgagggaggaggcttctcgaatacggtttctgtcttcgcgttaaatgtctccttctgtgcggcctggtgccgggtgggctcctgtgggacgccctggccgtccgatccaggttctaattcatagttacacggcgctggccgctgacttgcgacgttgtgtccctgggaccctagtccagtttaggccccatcccgcctgtaggccgtgaaccccatcccgagggcaaggttggcccagtgttttcgtaccccagggccttgcagcatttacgttttcaaactctgaaggatttacgtgggtctgaccatagttgatgggaatcgcgccccgggccggtccacctaagtctccgggagctgagccacatcttgcagctcctcagatttgggtggcgggcaggagttggcaccaggtctcccagatccccaaggaaagcacccaggtgctttcatttcagagacctgggttcctagggccacctgggcgaagccttaggcggcagggacaggggcagtcccaggtgtgtctttggcgatgtctggacagctctgtccattagagatgctaaaggacatccctaaagggatgagcatattctgccttcagttccctcccctgctgctcctgtcttttaaccgcgtctgctatccctctttctcctcgc

SEQ ID NO: 41948 - DNA, 1657 bp, Artificial sequence
  DNA replication origin
cggccctgggtgcaaacggaacccgcgcagcccctacctcgaaagctttgcaatcttcacaaagctgaagacatccatgcaggcagctggggacccccgagcgcgacaactccgtcgccccttctcacgccagcaacagcagcctccgcagccccatggccaagacctcagtgcgcccggggctcgagtcgcggcgacagcgggtggcggcggcggccggagagaacctgcacctggaggcggcggctgctacccccctccggccgcgagctgcgtgtgcatccccgagcaggaccattgataggcacccgaggcaggaaaactcaatggagagggagccaggcagggcgcaagaggcgggggcggggagcgcggcccgggtctcgcgccccgccccgtgcgctctagccccggggactgccgggcgtccagagaaagcgaggcctgggcgagaggcgctgctctggcttcccggccctcggaccctcgtgccccacgcaccgaggagcgcagacggagccgggagacggcaggcgagctgggcacacgcgcacgcacccctcgcagcactgcagctgcctccctgcctccttctccaagccgagtccctgctcctctccccacccccacccgcccggggggagggggcactctcctgtcacccactgcgtgtgcctctagatctgaaggatctggtctaacagtctatggcacactggagaactgtgaacgctacccctccctccccaagccgaaggagagccgtgcaaccgcaggttgctcaaagcctcggtttgctccgtaaacaaaactagcgttcggaaggagcagggatgattgaggttgggtcgtttgtcaaggggaagggaagggagatgccaggcgcagcgggctcgattcggggagctcagagttcccactgcttctcccgaatcgctggggcgagacgtgaccactgggctggctgggaaggtgtgtctttggacagcagcaccgcgggagtgtctgccaaataagaaccggaggcatttgcgggtagggggatgaacacagctgctccctcctcgaggagcatagagcggagggtcccaggagcccgtgatgcggaggctaattctaaccgggctcagaatctaaggaaagagaaggattagaatggggtctgccacgcagagcgagctgcttttgcacactgagccttgggtgaagggaacagggaagaaaaaaacaaaacaaaacaaaaccttgccggagaagcaaaaacacagaaacataaacactcaccttaggcagagtaaactccaagttgcagccatctagaactcctcctagccttctcttttacataattaccttggataatcagccctgttcattaactcagttctacctcctgggaggctcaggcttcattgggcccctttttcttcttcctcttgaagtctcaaggcctcttctccacaatcctttaaaatttccccccagactgtgaaggtcagctggccgcactaagtgtgtgctctcccaccggcagcgttcacctggcggcagggccaccgcaaagaacagagagcacccccagaaatgttggaagatccagccagtgttccagtctagctctccgaggggattaagaaagaaataggtttaaagttcc

SEQ ID NO: 41949 - DNA, 1069 bp, Artificial sequence
  DNA replication origin
ccctccccccgggcgggtgggggtggggagaggagcagggactcggcttggagaaggaggcagggaggcagctgcagtgctgcgaggggtgcgtgcgcgtgtgcccagctcgcctgccgtctcccggctccgtctgcgctcctcggtgcgtggggcacgagggtccgagggccgggaagccagagcagcgcctctcgcccaggcctcgctttctctggacgcccggcagtccccggggctagagcgcacggggcggggcgcgagacccgggccgcgctccccgcccccgcctcttgcgccctgcctggctccctctccattgagttttcctgcctcgggtgcctatcaatggtcctgctcggggatgcacacgcagctcgcggccggaggggggtagcagccgccgcctccaggtgcaggttctctccggccgccgccgccacccgctgtcgccgcgactcgagccccgggcgcactgaggtcttggccatggggctgcggaggctgctgttgctggcgtgagaaggggcgacggagttgtcgcgctcgggggtccccagctgcctgcatggatgtcttcagctttgtgaagattgcaaagctttcgaggtaggggctgcgcgggttccgtttgcacccagggccgctgccgcgggcaacttggtgccttatttttcgggaggctgggtagaggcaaaagctggaaagcgcgacggggcttaagacaaacgaagtggccgggggcttccacgttcaacttatttctcactggctgctgaggcttgtgtagcggcgggtgtagaccacacacagagaggtacatacatgccctcaccaacacaccgacattcacgacagtttgttttccctaaggaaaagccccagcggtgtttggggtcccatgtataattcagggctaagagaagatggttgtaattgctactgctagggaaacccagaagtgcttggagcttgggtgcctgccttccaagctgcaaagaccaaaagtgccgccttcccccaactcctaaattacacctccacacctccacaaagtcagctcctagat

SEQ ID NO: 41950 - DNA, 1809 bp, Artificial sequence
  DNA replication origin
gctggggacgccaggccgggcggcaccgctgggaggccgggagcggctcgggaccgccgggtcgccgcggtcccaggaccggaggccctgcaaccgggggcacagccgaggcgcgcatcgggacgcgcggcgccccgcctcggtttcttcgcaggcgcgggcgcgggggcgcggaggccgcgttgccaccgtcccgccccggaagggggagcgcggcgtccgcggaggtggcccgggcaggcgccggcccccaacccggccccgcagccgcgtgcccagcgctctccctagcccggccgccggcgcggcccccacctggtctcctggttgctgaacttcttcgtgaccaccttgcccagctccaggcccaggcggtcggccacgcgctgggacaggtcctgatgcgagctgccgctgaacagcacgatgttgggcatggtggggcgcggaactccgaggggcgcgcggcggcggaggaggtggcggaggcaacagcgacagcgacgcgggaggctgctgctgcgggagcgggaaagcgcggcggctagatgtagggaaggggaggagcggagggggaggagccggaggaggagctagagggggcagagagggaggaagagcgggcgtggagggggagctggaaagtgccggggggcgggggcacagccctggcagcagttttggacgccctgggtggtcctgaagcccgaaggtgtccttgctccgcgagagagctccgagcttcattcttgatcttccagacctgcctcgcggggagagccaatgaaccgcggttagctgggcacagagggagagttcgggccggggggatccctcgaggtgcttcgcagcccggagcgacttcccaccccggaacaccgcaaacccagtgtgggcgactggtgttcagctatagcaagggtctgcaaactacagcctatgggccagatcgcgagagctccctgtgtttgtaccagagagctaagcatggttttcatacatgaacatttgcactttatgtgatgatagcagacaccgcctttgaactccaattaagagaaatatcccccccgcaaaagaattccttttctctcattaatagatgtgagttgcaaataattgtactcaaatattaccgtattttggattatatcaataaaaacattgtgacaattttttctctcttgttatgtaagttcctacgtaatatcttcccttttcttgcttggtctgcaaaatgtaaatattggccatgtggtccctcatagttcaaacttgatgacccctgaactacagagttgcccctgcaccatgtgtccttaaaaaatccaaccactatgtgagtcctcatcacaggctgaggggaagtattgctcttggtggctcactggatcaaaccaagtcccccagattcaccatttttcggtagatgtgatggtccttggggcacttcacaaccttctgcctgttgggtgctcaagggcctgatcccaggaacacagatctccctagacaatccagctcagtccctccacatccctggagtcagggcctccttcctctctttcctgctagaaaccagcaaaaaggttttctcaagatgccaatgcagtaccagagccaacttcagggcacaaaccaagtgtaggagaaaggaaagcagtccctgtctatagagggctggttggtgatgctggtcacagtttcacactcctcaacaaaggctgattcaaccgggtagataaatggcttggttttactaatgtttgccacgaattggctctccatcaacagcaaagcccacttgca

SEQ ID NO: 41951 - DNA, 2178 bp, Artificial sequence
  DNA replication origin
cctccctcccggacgggaaggctggccgggtggggggctgacccccccacctccctcccggacggggcggctggccgggcagggggctgacccccccacctccctcccggatggggcggctggccaggcagaggggctcctcccttcccagtaggggcggctgggaagaggcacccctcacctcccggacggggcggctggccgggcggggggctgacccccccacctccctcccggacggggcggctggccgggcggggggctgaccccccccacctccctcccggacggggcggctggcctggtgggggctgacccccacctccctcccggatggggtggctgccgggcggagatgctcctcacttcccagacggggcggttgccaggcggagggtctcctcgcttcccagatggggcagccgggcagagacgctcctcatctcccagacggggtcgcggccgggcagaggcgctcctcacatcccagacggggcggcggggcagaggtgctccccacatctcagacgatgggcggcccggcagagacgctcctcacttcctagatgggatggcggccgggaagaggcgctcctcacttcctagatgggatggcggccgggcagagacgctcctcactttccagactgggcagccaggcagaggggctcctcacgtcccagacgatgggcggccgggcagagacgctcctcacttcacttcccagatggggtggcggccgggcagaggctgcaatctcggcactttgggaggccaaggcaggcggctgggaggtggaggttgtagcgagccgcgatcacgccactgcactccagcctgggcaccattgagcactgagtgaaccagactccgtctgcaaacccggcacctcgggaggccgaggctggcggatcactcgcggttaggagctggagaccagcctggccaacacagcgaaaccccgtctccaccaaaaaagtaggaaaaccagtcaggcgtgggggcgcgcgcctgtaatcgcaggcactcggcaggctgaggcaggagaatcaggcagggaggttgcagtgagccgagatggcagcagtagagtccagcttcggcttggcatcagagggagaccgtggaaagagagggagagggagacaaagagagggagagggagaccgtggaaagagagggagagggagaccgtggaaagaggggagagggaaagggagagggagagggagagggacttttgtgtggaatcgagaatacatatttttaaaaataagtagtgtgcatagtatactagaagatgaccatggaaagtgagagtagggtaagggaaatgaacagggagtgtgtaggagggatggtccaggtaagccatcagaggcaagacttcaagggaaagaggaagtgagccacgcagatgcctgggggaggtgctccagggagaggtcacagccaactccaaggccctgagcagggaccatgaccacacacgaaagccagcatggctgaagcaggagagcagcagtgttccctggagtcgtacaacgtgaagccaaataggtcaaatcacccttatgggagtgtgggatggatggtgccaaacatgaggagcttcccaggccattttaagaactttggccttcctttttttgcatgagttaggaagccactggcagtttgccatcagagaagtcccatgacctgattcaggtttgaaagggaccacagccactctggctcctgggttgagactagactaggagcagggaggctgctttacaggccattgcaacaattcaggtggaggacagaccaggatgggaaagtggagtggtgatgagtggacagatgctggatgtattttgaaggtagagccaataggatttgctgatctacagggtatggagggggagagaaagtgaggagtccaggctgatgcaaagattttggtctgagcaactggaaggatggagtggccatccactgaagtggagaaacttaactgggcaggggatggggaggcgcagtgtgctcaggttttaggatagatgatcaggagctcggatggaatgtaggacatttgatttgcctagtagagtccaagtggacatgtcaggaggcattttaataaagatttttttaccttcttccttcctcccagtgttcctgccttctcta

SEQ ID NO: 41952 - DNA, 941 bp, Artificial sequence
  DNA replication origin
tgaggagcatctccgcccggcagccaccccatccgggagggaggtgggggtcagcccccaccaggccagccgccccgtccgggagggaggtggggggggtcagccccccgcccggccagccgccccgtccgggagggaggtgggggggtcagccccccgcccggccagccgccccgtccgggaggtgaggggtgcctcttcccagccgcccctactgggaagggaggagcccctctgcctggccagccgccccatccgggagggaggtgggggggtcagccccctgcccggccagccgccccgtccgggagggaggtgggggggtcagccccccacccggccagccttcccgtccgggagggaggtgggggttcagccccccgcccggccagccgccccgtccgggaggtgaggggcgcctctgcccggccgcccctactgggatgtgaggagcccctctgcccggccaccaccccgtctgggaggtgtacccaacagctcattgagaacgggccgggatgacaatggcggttttgtggaatagaaacggggcaaaggtggggaaaagattgagaaatcggatggttgccgtgtctgtgtagaaagaagtagacatgggagacttttcattttgttctgtactaagaaaaattcttctgccttgggatcctgctaatcggtgaccttacccccaaccctgtactctctgaaacatgtgctgtgtccactcagagttgaatggattaagggcggtgcaagatgtgctttgttaaacagatgcttgaaggcagcatgctcgttaagaatcatcaccactccctaatctcaagtacccagggacacaaacactgcggaaggccgcagggtcctctgcctaggaaaaccagagacctttgttcacttgtttatctgctgaccttccctccactattgtcctatga

SEQ ID NO: 41953 - DNA, 1592 bp, Artificial sequence
  DNA replication origin
gtggggatgcggggaaggcgggccagaggccctttggggaagagggtgtgaagggcggggcagccaggctgatctgtgaggaaatggcccaggcattgtcgcctggggcctgggtcagggcagggagttggagctgcctgagtggtccccaggacccaggagggtcccggaggcctgtgcatgtgtgcagcgtttgggggggggtcggggggtcaacgtgggtccgtcttgtctggctgcccatcaggacgggatacttggggtcaccaggggtcccctgggcgtccaggctggcgaatgggcagtccctgcccctgtcagaaacaggtgcgtaccggctcattcccatggagatggctggggagatcctgtgtcaccccgcggccctcccgactccactgggtcgctggggaacccaggggcagggccaggctctgtcccaagggcactgcaagaatcccgcagaggccgcggaattctgcgagctctgcagccagccccggggaagcgctggacgggccaggacaggaggggatgatggcatcttctccgcgtcccctcctgctcccacgggagacccggggcgcccttgaacctgcgatcctgatgattttcatttaacacgcctcgtttccttagtgtccttagtgtgtctttgcactcaccaggttcagaggtcgcctctagcttcccaggccagtcagccacggagcccgtgggcaggaagggcagcaggatggctgccaaggaccagttggaggttcaagttatggccgcccaggaaatggagcttgcaggtaaacacagcccaaggggacctagaagaaggtgcacgcccaacagtctgtctgctttctgggcggggcgcacatgggcagcccgaggcccccggccccttcgtggctttggagctcaccgtgcatgtgctgagatgccccaggttttcaaagcaggctcaagggccttaggcttcccgtgggaggctccccctcatagcagggttacagatgctctcagagcagctcttctccatggatgcggtcctgacatccaagggatctgacctgtgaacgttgtttactgggacttgaacccgaagggcttccaaaaatgcctccgtaaaatggttaggagccggcgattccatgtatagctctgcggtaaagctttaattggcggagagccaaaaaagtctacaaatagtacgtttctctatgaaaaatgtccacaacagcgtcttcctctaaaaaaggtttgtcttttttattttaatgcaggaaaggatccagtaagtcatgagcatgaggaaagaaaacctgttacagagacaaaggagggagatgtaactgatgagcatggggaaagaggatcttttgctgaaacagatgaacacacggggtaaagtgtttaagtcccttttgcctgtcagataaggtcttttaggaaaagtcagctttggatcatgtcatcactgttatgttctatgcagaacatttcacacaagacatttcttcccaacaaacaaggccttttgtgtagcattatgttaaaattgtgttgcaactttttgttacagggttgataccaaggag

SEQ ID NO: 41954 - DNA, 883 bp, Artificial sequence
  DNA replication origin
tagttagctccttttgcatcagctgtgccccacctggctgcgtccggagggttgcaggaggagggaggctctgcacgcagacccgtgggtgcgtgcgggcttgatggtctgcagacctgctgtaggggcaggtgtgtgagggttggtatgcgtgtcggtgggtgggttctgtgtctgtgcggttttgtgttttccactctattcacaggacaccaagtgcttgtcagtcgctagttttgctggggaaggagggaaagaaaccgaggacgataaagcatttactgttcttgagctgagccagccgggctgctctcctcactgctctctgattagggttgatgaactggaaagaaaggacacggttgtcagatgacaaccattctcattcttgctatggcaatgcagactctgaagccgttccctactgcccttaagcttagctgagacctgaaatattttttccagagatcggcaaagacgcttagtaaatgcacgcttacatggtgactgtcgacctggcactgttctaagcacttcaggactattaacctacccaaagccataatggctctgtgtgtaaggtactattatcatcatctccgtgttgtagaagagaaaaacgaggcacagagaggtaaagtaatttgcctgaggaagcatagccagtaagagatggagccagggtgcaaacctaggtattctggcccaaagtctgttcttcaccagggcactagggcagccttccggcaacggaagaggttttctggttctctaactgtgatgtcttgctttctacttaggtgtccactagaatatggtttttccaccgcagcattattgacctttcgggctgggctggataattatttgttggggtgatggg

SEQ ID NO: 41955 - DNA, 1786 bp, Artificial sequence
  DNA replication origin
cggcttcgtcgcagaggtggccgaggaggcgccacctgagcgggggaggggcgggaccctcggaagggcgcgccctcccggggcgggggcgcgagaccgtggccgtggcgcgcagccagcgcgctcgcttacccatggctggagactggcgggaggggtgagggctgcggggcgttcgggctccccggggacgggcagagccggtggcacaagtttgcaggtctcgcgggcacgtgcgctgaccgggcttctgcgggctgcgctgcgctgcgcggggctggccgctggctcctagctcccggccggggtgggagcgcggcgcggctccgcctgcactgggggccggccgcgcggagaggggccctgacgtcagcgccgggggctttgtgcgcccggagctagggcccgattgggggcagcgggcgcgcggagtctgcaggcaaagctcgcggcttcctctgggacccccccgggcgagcgccgagggtcgcgggaaccggaaaagccagcgagggggatgggtagagaggggagtgggcttctaggatcgcggaggcggcgatccgcgtcccagatgaaaactattatggcctggggaggttggggggagcggggggctttgaggtcttagccacacccgttgtatagataaagaaactgaggcccgggacactggaccaagggcacttagtacttagcgttgcctcaatccacagtctcagttccttttgttcagatacgagtcgttacttaattcagtggtctcaaccctggctgcagaggagaaatcagctggggagcttctggaaaccggatttcatcatggcctctgcgggtgggacccaggcatccgttctttaaaagctccccaggtgattccaatgtgcatccaaggttgcgaaacattgacataagtaacttgtcggtggctaatgacttagaaagacacaggtagcaccctccaatctagagtggtgccagatttgctggtgtccgttatcacccctcttgattcctggaagtccacccctggaaggctcttggagactttgcaggctagctccagtcaaccatttctcccgctgctcaggcctcgcgcttgagcctttaagtgaattaaatggtttaacagtgtccagggcttaaattccttctgtctccttagagaattttcctgtctccaaaggtattagaagagtcatgggacccttgcagtttttgtaggactaacgctctctgtgacatttctgagcctgatgttcccccctgatattttttgttgtgttcttttattgttctgaaaatacatcatgttatttgaacagagggttacataaacagtgacaatagatagtacactttagggacatttaagccaaaagagaggctttaggactgagaaaggatggaggaggcaaacatttcatctattgaaatttattggattaggaaagattttatcaaggcagagctctagaaagcctaataatattttacatgaaaggacagagatttgtgctaggcggatcagtggctcattttcacaatcccacgggaatagtcatttctaaccaatcttcatgcagtcataaaacaacagggagctcataggtataacttgttgtcctcctgttaagaggaagtaatccatttgcgccattcctgagtgcaagtgtatgtaggaatccaacaataacagaggctgcctgtaaggtagaggaagacaaaggtggactgggtgagagcaatgaggaattcatgctaagtcctagttgagggaagggtg

SEQ ID NO: 41956 - DNA, 1046 bp, Artificial sequence
  DNA replication origin
tagatcaacaggatcccaaggcagaagaatttttcttagtacagaacaaaatggagtctcctatgtctacttctttctacacagacacagtaacaatctgatctctctttcttttccccacatttcccccttttctattcgacaaaaccaccatcgtcatcatggccctttctcaatgagctgttgggtacacctcccagacggggtggtggccgggcagaggagctcctcacttcccagaaggggtggccgggcggaggcgccccccacctccctcccggacggggcggctgccgggcggagatgctcctcacttcccagacggggtggctgccgggcagaggggctcctcacttctcagacggggcagctgccgggtggaggggctcctcacttctcagacggggtgctgccgggcagaggtgctcctcacatcccagacggggcggcggggcagaggcgctccccacctctcagacgatgggcggccgggcagagacgctcctcacttcctagatgtgatggcggccgggaagaggcgctcctcacttcccagactgggcagccaggcagaggggctcctcacatcccagacgatgggcggccaggcagagacgctcctcacttcccagacggggtggcagccgggcagaggctgcaatctcggcactttgggaggccaaggcaggctgctgggaggtggaggttgtagcgagccgagatcacgccactgcactccagcctgggcaccattgagcactgagtgaacgagactccgtctgcaatcccggcacctccagaggccgaggctggcagatcactcgcggttaggagctggagaccagcccggccaacacaacgaaaccccgtctccaccaaaaaaatacgaaaaccagtcaggcgtggcggcgcgcgcctgcaatcgcaggcacccggcaggctgaggcaggagaatcaggcagggaggttgcagtgagccgagatggcagcagtacagtccagcttcggctcggcatcagagggagaccatggaaagagagggagag

SEQ ID NO: 41957 - DNA, 1407 bp, Artificial sequence
  DNA replication origin
tgacaactgttctggatctgatggagtgcaaacttaaatgttaatcttatcattggccacatcattctccttccattaagctctcctttcactggttccttcccctatttttaaatctactaatgtctatattttaggacgctgcctcaaatcatttgtggaagaaggtgaagtagaactacttgtataaaaataaactcagtaatttatatagactgtatttggaccaatttctgtgaattcatttttcaggcaaaaaatgactgacagttgaaacattttataaatgaggcagagttctcagggtcagggcgagcataatgaaagtgttctgttgaaagttgttcttttctctgtgttccttctagcccaacattttgaatattctcactgtcttcaagccagaaatgcaagggaggagaagaaaaaagaactgtgtgatagtaaaatctttattgttggcatatgaagcaatataagtagcaaattttacttctacaaaggggggaaattatatatttctatacatgtggaagagtagatattcagtgaagattttttgataatttattgtgtaaagaaatgtactaaatactataaaagtggcttcctatgtttactacccccaaatattcctactaatgacctgagattaccaactccttttccacctattaaccttttgccacatcttccccaattttctcatccaaacccaagttggggcaacttcagactgtaagcttcttgaggcttgtcttgtttgtcaggggagcatgtactcaataaatgaaatttgcatgaatgagtcagagatttatgtacacaggggaagaaagctggttatagcttcttcatatttttcacgtggacccagagttgtaaattgagggaagaaggatagcagagtaatctcaaagcacaaagtgggggtgatgtcttcacacgccctcagcagcaacggggcactgggtgcttaggaaagcccatctgaaggagacatcaggaagtagaggaattctgttttttccactcatctgcctagtatttaaggtcggctaagaggctagaaggaacacatccacagttctgctttagaggatatgaaaattgggctggaaggaacacgggtccacagttcgagttcagaggacataaaaactggctcaaagaaactcgggtaaattggacatgaaaactagcgggaaaggacacgttcagtgtttgtttccctactgagtcacctgttcccagcacataaagtcgtggtgtttggagatgggaggaaccgagggaaagtcactttttagataaggctctgaagccccaggtctagtttcaatccactaatgcggccagcggcgagcaggaggagggaggattggtccggcgggggcggggccagag

SEQ ID NO: 41958 - DNA, 1215 bp, Artificial sequence
  DNA replication origin
gtgcttaggaaagcccatctgaaggagacatcaggaagtagaggaattctgttttttccactcatctgcctagtatttaaggtcggctaagaggctagaaggaacacatccacagttctgctttagaggatatgaaaattgggctggaaggaacacgggtccacagttcgagttcagaggacataaaaactggctcaaagaaactcgggtaaattggacatgaaaactagcgggaaaggacacgttcagtgtttgtttccctactgagtcacctgttcccagcacataaagtcgtggtgtttggagatgggaggaaccgagggaaagtcactttttagataaggctctgaagccccaggtctagtttcaatccactaatgcggccagcggcgagcaggaggagggaggattggtccggcgggggcggggccagagcagggctcagaggcgtggcccaggctagagggaagagcccagggggagcgcagaggcggggctaggagggagcaggggtgaatgggggcgtggcccgggcgagaggggcgtggctgtagctaaaggggtgtggccagggtggagggcagagactggcacagtttggttgggcgtgaccggggcaataagtacggacgtagtggggcgtggatctgccaggtgggggcgtggcctccattgaggggcgtggccctggtatgtggggcgtaacagggcacgagggggcgtagcttcgatggccggacgtgcaggctgcggatccccgtaggcgagcgagcggctaggttcgtgatctggagagacgctcaggtaaggacgggtggccgagaggagtggggggcgaccagggacaggccgatccagacagggccgtgattcttcccacgactctccgctctggcgcaccgggttccggagctaggagagctgttgatcctgcgagtattgtctgggtcccggcagggcgcccgggagtactgagtggggcctaatggggtgtcgaactcccccaccccagccctcttcctccactatgggagttaccaaacggctgtcatcctttaaggttctttgcacaggacgcgataacagctgttccagagaaaagggggtgggggcgcgggagagcagttccttggtaggtagggttgccaaggttggttgaatccaaataactccagaaagtccagccttctgtgaaatagctagagacgggggtaa

SEQ ID NO: 41959 - DNA, 1387 bp, Artificial sequence
  DNA replication origin
cccagtcctccctccccctctcccccatccccggcgccccctttcgcccccagggacttacggcggccgcgggccgcgggcgcggcggagcttggccggcggcggcggcggcggcgaaggggaagcccctgtcgccgtgctgaggaagagaagccgtggtgctgtggggaggacacccggctggcatagggcaggcttaggcggagaggggagggcaagctgacagaccccgccccgggggccggacgagggaggagccggggctgcggcgagctgaggggcgggctaggcgacgcgcgggaagcggctcagcggtcgccagcggcaccggaggcagcgcgggtaaccgctgagtccaaggcagccgattggaggtttcttcgctgaggggaggtgcgaaccggaagccgggccacgtgacccggaagcggcgtttgccgggcccgagcgcccgcgcgcccgcgcgctcttgcaggtgcctccgggacgcgcgcgggcggctgtcctgcttgtttaatgataggaggacgggattctgcagcgtccttagcctagcgggtggtgcggggcagggaagttccggacagcgaagagccacgttcgagctctaatgattctctgtgtccccagagaggaagtgtgaagtgtgacggctgacgaggagggtgggaggagacgagggagtgctgcaactctggaaaaacaagtcagctcttctgtggagctcgtcacgcattcacgggccttttgctatcattctgcctcaaaattgtccggaatccgccctctccttcccattgcactgctccagccctagcccagacaccttccgccccgagcttcgcgggagtctgttccctgggctcgcctcgcccatcctcggtgctgcggactggatgagttaccgtccgttcggctgaaaagcccggacagcacctcaccttcgagatcccgcttccttcacactgggtcgccccaccagccgcctgggttccagtttagcactgccgacgacttgctgtgcctggcatgtccttgctcccaaatgtcacatctatgaagcctcaccctaaaaccctgtaagagcgattccctctttcacccacatgcccgttagcctttatttagcacaccttaaattgtattcattttgcatctcaatctagttcacagcctggtatataacaactaataaatgtgagttgactgataaagactataaaatgataaatttgttaagagctgtaatgctgagcgtaatgcctgggcataatggatgttcataattttctgaatgatagaatggatgaatcatctagtcatttacagataaggaaaggggagtcccacgggattaggtgaccttccttgaagagccacgggtttc

SEQ ID NO: 41960 - DNA, 1077 bp, Artificial sequence
  DNA replication origin
tttttatatttgatgaaaaagagcctaaacgctatctgatttgggataaagaaaaaggagcattaaccttgactatgcctttagctccagccacctttttaagagtaaagtaccaggcaggttggggaggactagtcacggaatgaaactgtaagccggactgggtgtgaggaggggaggtgatgaaaggattttagggtggaggagcggaggctgaggaagaattgggacctagctaggcctggagaggaggggagaggtcagataggtctgtagaaaaggaagattagaaagactcagcaacacttggggttgggactgaggggacaggtgggagggaaagaaggaagatttgggatgagttgcattgggaacagagactagagagggaccgatgtgtaaaagaatgcctggacgtcaggcacctcagaccatttgcccattttacgacaagaattatttagatcttgtaggatggaaaaattgaaagtgctgttttccggctatttggaactactgtcgagtttgtattggggtcaagtggcattgcagaagaaaataagacgcttagattttaggtcaggtgagagttgaagaggttttaagtttttgaggacacaggctaagggagaagaaggaggaatggagggtggaaggttgcccatagtgaaggaagcaagcctagagaaaagaaagagtagagacacagagggaaggggttcgggggttcttaccttccagaaaagcgggaaaggggttgggtcgtggaaataaggggttggggtgcagagataagaggtcggggcatggaaataagggattggggcacagagatataagaggttggggtgcagaaataagggattgggccacagagataagaggtcggggcgtggaaataagggactggggcacagagatacgaggttggggtacttgctcctctagaaaagcggacttgccactcagggtgaaggagaaggggttgggtgtttcttgccccccagaaaggcggagaaggggtagagacacagagagaaggggttggggtacttgccccttccccagaaaagcggg

SEQ ID NO: 41961 - DNA, 1357 bp, Artificial sequence
  DNA replication origin
cgcttgggaaaggcaggagcgccagcggtcgggctgctcttggctaacgagaggagtccgaggcggcggcgaggggcgaacgacccgacgcaagatggcgagtaaagagagtaagaggccctgcggggcggcgcgcgccggggccgcggggggcggcgggcgcgcgaggccgcggcacgcgccggcgaaaggcgcgaattggcgtgcggagcagggggcggggccgggcgcgagactgggcgcgcgcctcgaggggcctgcgcgggacgggaccgccgcgccgagggctccgagcacttccggagccgggcgcggggccgagggctgggcccccctcttcccttccctcctccagcggctgcgctccctccggcgccctcggccccggggcggaggcggcccccgccgctgggaagcgagcgccgcggctctttctacgcgcgcgcgcgcgttgaccgcctcggggtcgcggcccttgtccgggggttgctggggtcctcaggcctatggctgccgaggcgggcgtcgtgggagctggggcctcccctgatggggattggagagaccaggcctgtgggcttctgctacacgtgcatttgtcttcccgactgggtcgcgcagcccctgtacgtacaggtcgtcatcttagaacaggtgcgaacagctgtaacagggtaaacaatttccatgtccgtgtaattgactacccaacatggtgtacgcagggggtattgatctcaatggaaaaaataggcttcctgattgttagtattttctccaccttctggaagagcagttagttgtccgtgtccaaattagaggtaaaaggaaagagtacatgaggtgtggccatcttgaggtgacctccaatttctgactttgatctatctcagccacttaatcgtgtgggctttctccaaatttcagtgtttgaagatactgtggaggagcgtgtcatcaatgaagaatataaaatctggaagaagaatacaccgtttctatatgacctggttatgacccatgctcttcagtggcccagtcttaccgttcagtggcttcctgaagtgactaagtaagggtttctggcaacttttattttgtttaaatttaactgtcgttctgaatttcctagttttggcgttttatgcatagaacataagtatgtaatcagcccttgcatgaggtggcaggtggtttttattttcaaaacttacgtgatttgtgggatgatttctggtgtatagtgtggtggtaaaaggggagaaagaagctgttgtgagattaatcgtgtttggaggaagcactgaatatatttgacatttcctgggcttgaatgtagagcagcatctttctgggc

SEQ ID NO: 41962 - DNA, 1660 bp, Artificial sequence
  DNA replication origin
gccgcgtccttctttcctgcctcctccccgctcgcgggtaccgaggtctgaggcgctcttctctctctctccaaacttggaacgagacttttcaacccgcgcctcccagcccgcccaggcagctgagcgcaggcgcatccgccctgggaaaagtgagaggaggcggagaggcgggtctgggagccaacggctccggcgccgagaccaatgacgcgcggcgggcgggtttcacgcggcgttcggaggcgggcttctgggggtgggcggagcgtgccgcggcaggaagttggcgatgcgcaggcgcgagggctcgcccggcgctcccagggccggccgcggaggcggatggggcgcgcgggggcggggcggatgagggcccgagggggcggggcggatgggggcgcgcgagggcggggctgatggaggcgcggctggccggctgagtgggggccgcgagccccggggcggcgagccttggggcccgcggggcgtggttgcttgtagcggcagcggtggtgggggtgagaggggggcagggaggctgccgccgcttagccaagcaaaatctcagagcaagaggggaaaatggttcctgttctcgagagattactgtgccttcaaagtctccctgataatcacggacatgcaattctctgcacccctgaaatgttctcctccagccgactggcctttcctggggcccggtcgggccgaggtggggctggtctcagacggaggagagcttttggagaggccgcgggcgttttctgcctgcaaaagccgccgggccgccctgttaggctaaatgtgcagcctgtggcggcacaggccgccggcgggccgaagccgatttacactgttacattttaatttgttcgatgtttgggtccttaagatgatggtttgcggcctcttcgcgcttcaggggattttgtccctgcactggcgttcctttctcatcccagccccggcccctgctgagtcatttttgtcacctgcaggggtcccagcgcgaccccaccccaagctggcggagctggagagagcagggctgaactaccctgggcctgcttacctgagccctgctctgctcaggaacttcatagcccctgaggagtgtgtcgggggaggagaaagctggctgcaaggccaaaagggaaatagaagaaaatgagggccaggagcagaggggacggagttgggggaggcgaccaaggtgcctgcgtgcaaagggaaccgaagtgtacgtccagctccgggagaggctcctcttgcaaaagcacccccggaacatttgctgccttgatacctttccaagtgccttcatgctcagatgctatcttgcagatgccgctgtcatgcccacttttctgaccgggacgcaaacccagacgttagtcagtggcagaaccagtcacattcccttctgtagatatttactgtgttgtttccgatacaataccgttcattattataacgccctccccccattctgggtcaaggaatcttgttagtgcctaaggctgagggggtggctagagagggaagagagttggaagggtgtttaagcaatacagccctcatattctaggacattagttggcaagactttttctaaaaggaccgagatagtaaatattttaggctttgggggcaactg

SEQ ID NO: 41963 - DNA, 1543 bp, Artificial sequence
  DNA replication origin
ggccgtgccgggggcgactctggcggcctcggggggcccagacccggggcccccgcccgcggcgccggcacagcgcgcgaagagctcggagtagcactgctgctcgccctcgctcagcagcagcggcggcggcccggagccacagcccccgcccgccgctgccgctgccgctgccgccgccgccgccgccgctgccgcctccatggggccagcaagggggcgcggcggagccctgtccctagctggggtgctgctgcgtccgccacagccaccgcctcctcggcctcagctgccgccgccgccgccgccgccaccaccgccgccgccaccaccacccccacgccccgcagctgccgcgcggccgcttcctcccggcgcgcgccggccccacccccgggcttgaatgttgtgcctcagctgcgcggcacatggagacaggcgcggcgcggcccaatcacagcctgagatgtcaccccggccccgcccccgcctcccgcttgccccgcccagcgccaggtaactaacccagcgcgccgcacgccctccgcccgtcacaggctccggtgcccaggaaggcgggccccgtgcctttccaagcctaccctgcaagggagcggagcctttggccatccgccctggttgggaagggggcatctagacccaactggagagaagctcttttcggggagcggggaaggttgtgttgttttcttgctagaaggctggggcaggtgtggtgcccacaccacgccatgccctttccagaaagggacaaggcatgggaaattaggtttcctttcttccatagcagtactgcttatgtcctaaagagccggaagacgcagacgtctgtacaaacagggtcccactgaccccagagtgttcagggtggtattggagttaggccccctcgtcagacatggctcaaaccaggagttgagactttataaggaataacatcggttactcgtaaatactagagtagtaagagtacaaaaagacccattttgcagatcatttcgtccaaaccctgcttttacagatgaggaaactgccatgttcaccttcattcctccaaaaccagttgaatatctcgtatgtagcagatttatatgctagggcctgaaaatacaaacctcagtaacagaggatcctcactctccaaaggaagcacttattttagtagtaaaacaggcattttttttagtacaaaacttgttcaagctcacaccaaaaatcaatgcgaaaccccacatttttccaccccggtccatgtcctcctctctctctccattcctccctatcctaaagcatacacactatatttttcaaatgtgcttgcttccccctggctagtactctaaccactttttttttttttttttttttttgagaaggagtttcgctcttgttgcccaggctgtagttcaatggcacagtcttggctcactgcaacctccacctcccgggttcgagcgattatcctgcctcagcctcccgagtagctggaattacaggcgcctgccaccactcctggctaatt

SEQ ID NO: 41964 - DNA, 1053 bp, Artificial sequence
  DNA replication origin
gctgaggcacaacattcaagcccgggggtggggccggcgcgcgccgggaggaagcggccgcgcggcagctgcggggcgtgggggtggtggtggcggcggcggtggtggcggcggcggcggcggcggcagctgaggccgaggaggcggtggctgtggcggacgcagcagcaccccagctagggacagggctccgccgcgcccccttgctggccccatggaggcggcagcggcggcggcggcggcggcagcggcagcggcagcggcgggcgggggctgtggctccgggccgccgccgctgctgctgagcgagggcgagcagcagtgctactccgagctcttcgcgcgctgtgccggcgccgcgggcgggggccccgggtctgggccccccgaggccgccagagtcgcccccggcacggccactgcggccgccggccccgtggctgacctgtttcgggcatcgcagctgcccgccgagacgctgcaccaggtgggtccctccgcctcctgtccctgcgggtctgtggggcagtgtgtgcgggggcggaggttgcgagtggggcgacagggctgcccccagggacccggaggcctcggccagttctgagagagaggactctgcagccggggatggcggcgacgcccttgtccccgggggacaccagcctccttcgcagctcagctcctcgcccagtgctgggtgcgctctccccatcttccttccctgagacagtctgacactctctcccctcccccggccatttctggggttctgcagccgcccagacccaaagtttgtcctgttctggaagtggtgtttgttttggctgctgcctggtttaacctctgctcgctgctcctgcccctccctctcctgagtgggttctcagggtgccttgctgggatttcaacttgaagggtgtgtgtgtccgtagggttcgaggcccagggctgaatgttgtcctctctatgtagttgtaatatataagtatctactatatgtaattgcccataacatatttctaaatattaatattaaatcgaaaaccttaatga

SEQ ID NO: 41965 - DNA, 962 bp, Artificial sequence
  DNA replication origin
cagccccccgcccggccagccgccccgtccgggaggtgaggggcgcctctgcccgggcgcccctactgggaagtgaggagccactctgcccggccagccgccccgtccgggagggaggtggcggggtcagccccccacctggccagccgccccgtccgggaagtgaggggcgcctctgcccggctgcccctactgggaagtgaggagccactctgcccggccagccgccccgtccgggagggaggtgggggggtcagccccccgcccggccagccgccccgtccgggaggtgaggggcgcctctgcccggccgcccctactgggaagtgaggagcccctctgcccggccagccgccccgtccaggagggaggtggggggggtcagccccccgtccggccagccgccccgtccgggaggtgaggggcgcctctgcccggcggcacctactgggaagtgaggagcccctctgcccggccaccaccccgtctgggaggtgtacccaacagctcattgagaacgggccatgatgacaatggcggttttgtagaatagaaaggggggaaaggtggggaaaagattgagaaatcggatggttgccgtgactgtgtggaaagaggtagacatgggagacttttcattttgttctgtactaagaaaaattcttctgccttgggatcctgttgatcggtgaccttacccccaacccggtgctctctgaaacatgtgctgtatccactcagggttgaatggattaagggcggtgcaagatgtgctttgttaaacagatgcttgaaggcagcatgctccttaagagtcagcaccactccctaatctcaagtacccagggacacaaacactgcggaaggcggcagggtcctctgcctaggaaaaccagagacctttgttcacttgtttatctgctgaccttccctccactactgtcctgtgaccctgccaaatc

SEQ ID NO: 41966 - DNA, 1237 bp, Artificial sequence
  DNA replication origin
cctccctcccggacggggcggctggccgggcagagtggctcctcacttcccagtaggggcgcccgggcagaggcgcccctcacctcccggacggggcggctggccgggcggggggctgacccccccacctccctcccagatggggcagctggccgggcggggggctgacccccccacctccctcccggacggggcggctggccgggtggggggctgacccccccacctccctcccggacagggcggctggcagggcagagtggctcctcacttcccagtaggggcggctgggcagaggcgcccctcacttcccggacggggcggctggccgggcggggggctgatccccccacctccctcccagacggggcggctggccgggcggggggctgacccccccacctccctcccggacggggcggctggccgggcggggggctgacccccccacctccctcccggacgaggtggctgccgggcggagacgctcctcacttcccagacggggtggctgctgggcggaggggctcctcacttctcagacggggcagctgccgggcggaggggctcctcacttctcagacggggcggttgccaggcagagggtctcctcacttctcagacggggcgtccgggcagagacgctcctcacatcccagacggggtggcagggcagaggtgctccccacatctcagacgatgggcggccgggcagagacgctcctcacttcccagatgtgatggcggccgggaagaggcgctcctcacttcctagatgggatggcggctgggcagaggctgcaatctctgcactttgggaggccaaggcaggctgctgggaggtggaggttgtagtgagctgagatcacgccactgcactccagcctgggcaccattgagcactgagtgaacgagactccgtctgcaatcccggcacctcgggaggccgaggctggcgggtcactcgcggttaggagctggagaccaacccggccaacacagcgaatccccatctccaccaaaaaaatacgaaaaccagtcaggcgtggcggcgcgcgcctgcaattgcaggcactcggcaagctgaggcaggagaatcaggcagggaggttgcagtgagccgagatggcagcagtactgtccagcttcggctcggcatcagagggagactgtggaaagagagggagagggagaccgtggggagagggagagggctgggcaatttcttagagcagta

SEQ ID NO: 41967 - DNA, 1063 bp, Artificial sequence
  DNA replication origin
cgtccgggagggaggtgggggggtcagccccccgcccggccagccaccccatccgggaggtgaggggcgcctctgcccggccgcccctactgggaagtgaggagcccctctgcccggccggccgccccgtccgggagggaggtggggggggtcagccccccgcccggccagccgccccgtctgggagggaggtgggggggtcagccccccgcccggccagccgccccatccaggaggtgaggggcgcctctgcctggccgcccctactgggaagtgaggagcccctctgcccagccagccaccccgtcccggagggaggtgggggggtcagccccccgcccggccagccgccccgtccgggagggaggtgggggtgtcagccccccgcccggccagccgccccgtccgggaggtgaggggcgcctctgcccggccgcccctactgggaagtgaggagcccctctgcccggccaccaccccgtctgggaggtgtacccaacagctcactgagaacgggccatgatgacaatggcggttttgtggaatagaaaggggggaaaggtggggaaaagattgagaaatcggatggttgccgtgtctgtgtagaaagaggtagacatgggagacttttcattttgttctgtactaagaaaaattcttctgccttgggatcctgttgatctgtgaccttacccccaacccggtgctctctgaaacatgtgctgtgtccactcagggttgaatggattaagggcggtgcaagatgtgctttgttaaacagatgcttgaaggcagcatgctccttaagagtcatcaccgctccctaatctcaagtacccagggacacaaacactgcggaaggccgcagagtcctctgcctaggaaaaccagagacctttgttcacttgtttatctgctgaccttccctccactattgtcctgtgaccctgccaaatccccctctgcgagaaacacctaagaatgatcaattaaaaaaaaaaaaaagaaaaccaatatgggtatgcaaagagctgaaatcacgtatatttgagatatgccatag

SEQ ID NO: 41968 - DNA, 1298 bp, Artificial sequence
  DNA replication origin
ctcacttcccagtaggggcggccgggcagaggcgcccctcacctcccggacggggcggctggccgggcggggggctgacacccccacctccctcccggacggggcggctggccgggcggggggctgacccccccacctccctccgggacggggtggctggctgggcagaggggctcctcacttcccagtaggggcggccaggcagaggcgcccctcacctcctggatggggcggctggccgggcggggggctgacccccccacctccctcccagacggggcggctggccgggcggggggctgaccccccccacctccctcccggacggggcggccggccgggcagaggggctcctcacttcccagtaggggcggccgggcagaggcgcccctcacctcccggatggggtggctggccgggcggggggctgacccccccacctccctcccggacggggtggctgctgggcggagacgttcctcacttcccagacgggatggctgccgggtggaggggctcctcacttctcagacggggcggctgccgggcggaggggcccctcacttctcagacggggcggctgctgggctgaggggctcctcacttttcagacggggcggttgccaggcagagggtctcctcacttctcagacggggcggctgggcagagacgctcctcacatcccggatggggcggcagggcagaggcactccccacatctcagacgatgggcggccgggcagagacgctcctcacttcctagatgggatggcggccgggaagaggcgctcctcacttcctagatgggatggcggccaggcagagacgctcctcactttccagactgggcagccaggcagaggggctcctcacatcccagacgatgggtggccaggcagagacactcctcactttccagacggggtggcggccgggcagaggctgcaatctcggcactttgggaggccaaggcaggctgctgggaggtggaggttgtagcgagccgagatcacgccactgcactccagcctgggcaccattgagcactgagtgaacgagactccgtctgcaatcccggcacctcgggaggccgaggctggcggatcactcccggttaggagctggagaccagcccggccaacacagcgaaaccccgtctccaccaaaaaaatacgaaaaccagtcaggcgtggcggcgcgcgcctgcaattgcaggcactcggcaggctgaggcaggagaatcaggcagggaggttgcagtgagccaagatggcagcagtacagtccagactcccac

SEQ ID NO: 41969 - DNA, 843 bp, Artificial sequence
  DNA replication origin
gatcgtctgagatgtggggagcgcctctgccccgccgccccgtctgggatgtgaggagcgcctctgcctggcagcgaccccgtctgggaagtgaggagcgtctctgcccggccacccatcgtctgagatgtggggagcacctctgccccgccgccccgtctgggatgtgaggagcgcctctgcccggccgcgaccccgtctgggaggtgaggagcgtctctgcccggccgccccatctgagaagtgaggagcccctccgacctgcagccgccccgtccgggagggaggtggggggtcagcccccgcccggccagccgccccgtccgggagggaggtggggggcgcctccgcccggccgccgccccgtctgggaggtggggggcgcctctgcccggccgccccttctgggaagtgaggagcccctctgcccggcggccaccccgtgtgggaggtgtacccaacagctcattgagaacgggccatgatgacgatggcggttttgtcgaatagaaaagggggaaatgtggggaaaagatagagaaatcagattgttgctgtgtctgtgtggaaagaggtagacataggagactccattttgttctatactgggaaaaattcttctgccttgggatgctgttgatctttgaccttacccccaacccggtgctctctgaaacatgtgctgtgtccactcagggttaaatggattaagggcggtgtaagatgtgctttgttaaacagatgcttgaaggcagcatgctccttaagagtcatcaccactccctaatctcaagtacacagggacacaaacactgtggaaggccccagggtcctctgcctagg

SEQ ID NO: 41970 - DNA, 1211 bp, Artificial sequence
  DNA replication origin
gatcaacagcatcccaaggcagaagaatttttcccagtatagaacaaaatggagtctcctatgtctacctctttccacacagacacagcaacaatctgatttctctatcttttccccacatttcccccttttctattcgacaaaaccgccatcgtcatcatggcccgttctcaatgagctgttgggtacacctcccacacggggtggccgccgggcagaggggctcctcacttcccagaaggggcggccgggcagaggcgccccccacctcccagacggggcggcggccgggcggaggcgccccccacctccctcccggacggggcggctggccgggcgggggctgaccccccacctccctcccggacggggcggctgcaggtcggaggggctcctcacttctcagatggggcggccgggcagagacgctcctcacctcccagacggggtcgcggccgggcagaggcgctcctcacatcccagacggggcggcggggcagaggtgctccccacatctcagacgatgggtggccgggcagagacgctcctcacttcccagacggggtcgctgccaggcagaggcgctcctcacatcccagacggggcggcggggcagaggcgctccccacatctcagacgatcggtggccgggcagagacgctcctcacttcctagatgggatggcgactgggaagaggcgctcctcacttcccagactgcgcagccgggcagaggggctcctcacatcccagacgatgggcagccaggcagagacgctcctcacttcccagacagggtggcgggccgggcagaggctgcaatctcagcactttgggaagccaaggcaggcggctgggaggtggaggttgtagcgagccaagatcacgccactgcactccagcctgggcaacattgagcactgagtgaatgagactccatctgcaatcccggcacctcgggaggccgaggctggcagatcactcccggttaggagctggagaccagcccggccaacacagtgaaaccccgtccccaccaaaaaaatacgaaaaccagtcaggcgtggcagcgcgcacctgcaatcgcaggcactcggcaggttgaggcaggagaatcaggcagggaggttgcagtgagcagagatggcggcagtacagtcctgcttccactcggcatcagagggagaccgtggaaagagagggagagggaga

SEQ ID NO: 41971 - DNA, 1027 bp, Artificial sequence
  DNA replication origin
atcagtccagccagtcctcctttgggtgcaccgttccctggggaggatgacaagcgctccgcacagaaatttaggggtgcgcctggtctcttctcacttgcttccaaccagggtcgactggctcaactccatcgtttctgtgctcgccgtcgccaccccggccactgccgtcgccgccgcctatataaatgggcgtgcgtgtgtctgtgtgtgtgtgggtgagtgggtgggtgggtgtgagtgtgtgcgcgcgcctcagtttgaaagtaccccggcgcaggcctctccccgcgcgcccctcggccgctccggggagcgattgcgcccgggatctctctccctggctgggcggggaggaggtttcggaaaggcgctctgaaaacccggagagaggaatctgcctccagcccgggcgcaggaggccgcgcgggggtgacggggcggacgcagggcgggggaggccggggcgaggggggcgcagcgccctgtgcggccgctgggagtcactggtggcctcgccgtgctgggcgcgttcaggcgcaaagacacttcctcacatccaaggggttggaattgagactgtcagcgtggtgggggcggggagtcctcaagttgggagtaggggtgtgggcagtaagcgcagagggaagagggtggggtattgaggatgcggcagatttggcgtgttggagcaagtttttcgccgaattccagctctgtacaagacctttgggttcttacagggaaaactgggctgctccttggagatccccgggctctatgaacgcaaggagacaactggggagggcaaagggcgtaggcgcatctccatgtggccagagcagccagagtgctgtttataccccttcccaggcatcacgtggccccctgttttgggcacgggctctatagaatatcgtgaatgagacccaaaccaccaatgagcaaaatccccagaaaactgcttacgaaactcattgcacgttgggtgagataaacggcattacctcctcgtcaccctactgtg

SEQ ID NO: 41972 - DNA, 854 bp, Artificial sequence
  DNA replication origin
cgctctcgagctcctggaagaggctgcaagcgtgccgggccacgtccgagagctgccggaggacacgggccagagcggcgttgctgaccgcgcataggtccagcatgagcagcacggccgccgccgccgccgccgaggacgcctcgccggctgcgggcgccgcctccgggatccccgccgtgctctcctcgccagccacggacgcctctccgtgcggcggctgagtctggtcggccggcgcgggcagtggcggcggcggcggtggcagccctgaaggtgcagggacggcgcgggctggctcctctggccctggcgcctcgacctcgtccaggtccctccggcccggcggctgcaagggcggcggcggctcagcgctgcctccgctcgcgtccactgctgggccgggcgcagggcgccgctgcctgcacagccattgcggctccacgatccgcttggcgaaaggcatcccgcgcagccaggcggcgactttctggtctcctccaagcgcccctgtgagctggagaccgggcgcgcccacctgagcagggagggggcaggagtccggcaaaagcgcgatctggcagtccggatacgcagggggcttctctgctcaccttgcctcctcttccccgccctctccctagcaaatcagtccagccagtcctcctttgggtgcaccgttccctggggaggatgacaagcgctccgcacagaaatttaggggtgcgcctggtctcttctcacttgcttccaaccagggtcgactggctcaactccatcgtttctgtgctcgccgtcgccaccccggccactgccgtcgccgccgcctatataaatgggcgtgcgtgtgtctg

SEQ ID NO: 41973 - DNA, 1370 bp, Artificial sequence
  DNA replication origin
gagccagcccgcgccgtccctgcaccttcagggctgccaccgccgccgccgccactgcccgcgccggccgaccagactcagccgccgcacggagaggcgtccgtggctggcgaggagagcacggcggggatcccggaggcggcgcccgcagccggcgaggcgtcctcggcggcggcggcggcggccgtgctgctcatgctggacctatgcgcggtcagcaacgccgctctggcccgtgtcctccggcagctctcggacgtggcccggcacgcttgcagcctcttccaggagctcgagagcgacatccagctcacccaccgccgcgtctgggcgctgcagggcaagctcggcggcgtgcagcgcgtcctcagcacgcttgaccctaagcaggaggcagtgcgtgagtacccgcgccgtccgcccgccaggctatgggtttctgcgccgcaccctcgcgccctccccagcagcggcaatcccagccccgcggcgccgctccggttgcagcttgcaccttactactctcgccttcccacccttcccatcccctgggacccaccccaatcctcctggggctgagtggctgggctggaccccgattcagtgatgcagacgtggacggtggaaagttaaaagggcgacctctgaagtcgcaggcagcgtgggctgagaaggagcagaaagggagcgtttatggggagcacaggaggcagagagggtctgtccttcaccaccggggctcgcctttcacgtccttcacggggcgtagggaggagggttgcaactcctgtggtttccagaagcccagccctgagccctgtagcccacaccatgcatgttcagggttgggggttccaggagtagtgagtgttcttttgagactgctgcagcaccgcggctgtttcgtcactcgctgtgacctcaggtgctgccccgagctccgaacttgtgccttgccctcgtgtgcgacgtagcgtggcgctgctcgcctcctagactgaacttcgtagtgcttctgccgaaaacccttgtggcccggaggggccgcggggagggtcagggagagatgagggtgggagtgtcaggggccccggggagatggaggagacccctgggcatcttttctgctctgaacagcccagggttcctactaaatggctctgtgccatctgcccgcagaggatcccacagactatcttcctcctccccggtgcactgtcgcccaaatttactggcacgtggacttaggtatgaactagtctgctaggcgggctgcagggaaacgacgaggaaggaagtctgggagacccctgggcgtctttgctgtccgttgacttcgcttttacgacacccaagggctcccaataaat

SEQ ID NO: 41974 - DNA, 1131 bp, Artificial sequence
  DNA replication origin
tgtggggtgtgaaccactgcatggagctgcaaaggatcccactggcttcaccaacaaatatttgttgggtgcattctagataccagctcctggggagacaagaatcaacacaaatgaatgggtcctcactccatgaaacttacagtctagcaggagagacacgcattaatccaattgtcacactttggatatataactgcatagggcaaaaagcactatgaggataagaaggagggtcaacaacaaaggaatctcactggctggagaaggtcagagaaagcctccctggggaagcttgaggggccattggcaggatgctgaggcactaagcaggtgaggtggggctggagaaagcacctcagcttgtgcaaaggccctgtgggggcctgaaaataggccagcgtggctgcagcacaaagccaagggagggcagcagagagaaagacagaagcatagccagggcccaccctagaggccttcagggccatgctcaggattgtaggctacgaccaatggtgtcacagaaagagctgaagcagtggcagaggaggaggggggaataatggtgcgggaaactttgaataggtcacttggacttgatagtagaaaagagactggacaaatgcaagagaggctacaaggagacctccaaagacagctgcaggagaagatggggcttagaccacaggggtggtagttagggtagagggcagaagagggatctgagagacactgggcagtgaaatgaatgatcctggtgatggattagggggacagtgagggagggggaggcccacttccagcttgcaatctaactgggaaggctggggcaccaggggaagaactggggggccactgaagggggatgagaaagctcagagtggccaggaaaggaaagtgtgggtttggattcacagctaggaaatgggggaggtttataagggggaggtactggcctctccaaaaggaggaaggggaagggaattaaaagcatgaggcagggggcaagggtagcctggctggtgcgagggtttccatggagagagaaataaaggctgccagaagggccagggttcctcgagagcagctattcccaatgtgtgctcctccacctcaccagaagcatgggca

SEQ ID NO: 41975 - DNA, 1518 bp, Artificial sequence
  DNA replication origin
ggcagcatccattcataattctctgcctgtggaccgagttaggctggagctgggcatggactcctgcgatctctctttttgcatctgaaggagaaactaagataaaaggaaaaggaagggggaatgcagtcctaacgcaacaatgcgctggaaagtccccgagaggcctctcttttgcggggagagggagaagaggcagattccgagcccagcgccccagccagctgctgcttcgctgcggagccggcacgcatgcctacctcacctgacggccgcattcccggggagccggcgcggggcccggcggcgcgcccagggcgcacgggcggtaggatttctgcaccaggggaacgatgcacgggcgggctgcccagggccgagcctgagcctgagcgggcgccaggggaggctagcctcggcgtggcgccccaccgcaaccctccgggatgctccgcgactcgcagcccaggccatgcgggtgtgtgagatgggaccagcctggggggagggggtatgggcaagtgacatcattttaaactaatttctcgcacctctgggtgctgggtgaacttgggggttgggggaggctcgaggccagccgcgcgctagcccgagaggagatcccccttggtcgagatctgagagctgggtccccttggcagagctgagcgagggtgagctgacagtccaggtggaccgcgcatagctcgcaggggcaaagggaacagcgctggctttcaggggtcttttattatttttaaaagcatattgcagctgcagcttttaagtttgccgcctcctccctaccctgatcccgggttctggggcggggcggcactttcccacgctgcctaccctctgggtggaggggtctgcaggggctgcagcgcctggtgttgggtttcctgcagggggaatgaggattcgacggctctgtgagtggaagggcgccctgaggtttggccttttgagggcttctaagggctggggagaagtcgaggatcccgcttggtgccctctcctgttttcctgccctgccacttggtgttggatgacattttgcctgtgcaggggtttcactgtcaaggagctgtgatgctgtaaggcaaatggactgttaggatgagctggaagagaggggagtgagctggagcttttccttttgtggcagtgttaaccccatcgcccccacctctctggcgcacctgtcccctggggtcaccatctgtgcgcatgagtggggcagcctgacccactagccattccagggacagtgagccaaagctggacttgctcagggcatgctaggccaggaatgtgtgggcagtgaaagagcaacacccttcctcacccccctgcggggaagactcagcaggccccgccatgatggtgcacagtgttttgccatactgtggtatgctctggagttttggagctcttgttttatgaggcttttattttacagtttcttgcctcttggtgaccagtttgtttttcacagctgcttgtgagcaaggc

SEQ ID NO: 41976 - DNA, 957 bp, Artificial sequence
  DNA replication origin
gtcaaggtcaaggcctggtgtgtgcggctgcctggtgtgtgcggctgcccgctctgtccccgcctctctctgtccccgcctcacgattgtgcatggcgccctggaggtgctcagtgaggatgtgttcaatgaagaagtgaattctaggagtcaagacacagctcagcaggagtggccatgcacgctgaaattcacgggaccccaaggcagaggaaagctgggaggagccagtggatttggactgcagaaagccggtggtcggctgtggctaactgcgcttgcaggacccacgaggcggaaggtggtggaaggagggactggggggtgggttcagggaggaaaagaaacgtgagaatttgagtggctggagaagaaaacatgcggccgcaagcgtgtgaggcaagcctcgggccaggggcttggctgtccttcgtggtgggctggtcctgctgtcgtgttgccatcgggggtgggagctggggctcctggcctgtagacagggcttggcttcaggcaccaggagccgctgtctacacgtaagagaggcgcgaagagctcaggttggaagggggttgtttagaggacaccgtgccccgaggcaggttgagaggcaggaggactgctcaggtgggattcgcgggtgatggccgggggctcagtgagagggctggggagcttgatctcctggtgcagcggcggggctggagagggcagtgaaaatggagaccatcagagatagcccttgggccacggggccggggtccaacagcagttggcgtcattttgcagggggaggagtcgtggagcctggaggggaggtgcagaggcttctcaagctgtccacggggggtgccagggtcagggggccacagagagcagaggcccagcactggaagccagggaggcgggagtccaggacagggtgccccttgggtgaaggcaacacacagactcccg

SEQ ID NO: 41977 - DNA, 1422 bp, Artificial sequence
  DNA replication origin
ttcctaaggggctctgcatttcccatggactcttccccttggctgttgatgtcatagccctgaagcacggagtcttctcttttgaaggagaagtttttggtggacacccctgagaggcctttgatcttgccacagaatatggtaggcacagcatcttcgacagagacaatgaccttggccgcctgggactcgcccaccatctcaatgttattttcagccttgacttcgccgctggggtggttgggctggctgagcatctcggtagcagcatcactgctgctgatgtgactatccatcatggctggggcctcatgggacgtggcaggggcaaaagaaatttccatgccactgggaagtttctccatcactgtgtgacctgagctgtccactgatgcaccactgtcatacagtgtctcagggggaggctcggatttccggtgggctgccactgacaggtctagggctgcatcttcctggaagattgggggactgacttcaccagccttgagccagggcactgacttcatggagagatccagggcctcgttctcacttcccatcttaatgaccgtgtggcggctgagctggaagtactccttaggctggaggatgtcaaagggcttcagttcatctttttccagaggggtctgggtgcctttaaaggggtgcaggccgaaggaagatggtggcttggggaaactggagctgaacttggattcagaactctgaggcatcgggatggggatgggaatagggactggcacaggcaaggggacgattacaggatacggcaccaagagggtggctggtgggaccaggggggacaagggggagctaaaaggctgtgggggcacaggggcatagccaggaggaggctgacagggtgggggcccgagagtgccctgggagggaaacaaattctggagcacagcttcaaatggcaaagtgggctcctgcggctggctggggatcctcaggtccaggagctggggctgggcctcggggtcctccgctccctggaagaggttgttgtggatggtactggaggagcatggggcctcctgcggcaggaccagaggggagttgaggtgctgaaagacgtgctgctccagcaccacgggcagttgcacggggccctgggtggtcatgacgtaggtggcattgccattcggattgagctctggtgcggagcttccctccacctgcatgtgaatgggcatcaccactgggctctccccgaggcacaggggctgcaacacagtggccgccaccttcagagccatgccactctgagactcggcaggggggttcagaatggatggggctggcacggtcaccagggccttctttaccaggtcagtggagttgatgttccaggcctcggtggtgatcagctgagccatgccattctccagtctgtta

SEQ ID NO: 41978 - DNA, 946 bp, Artificial sequence
  DNA replication origin
ggctgggagggccgggcgggggcggggacgcgggccgaggccgccgcccgtgtggcgcgccggggccccgctcccgttcccggcgccgcgcactggccggcggggccggggactgccggggaggcggcgccggccggcggggcgggggccccgaagtgggtttcgggccgccgcccgcactggcatcgggcgcagagggcggtgcacggcggactccgcgcccaggcaccgcaccgggcagtctccggatctgccgttctgccccggcccggaaaacccggcgccttccaggcccttcgaaagatggattctgttgacgtatctggcggccctggcgagcctggtggaaagttgggttttgccagattgcgccgggctcctctttgtgacgcgcggccagccccgcatcccccccggagccgggtgagtgtgcgtcggcgccccgggagccccggtgccccccaatgcccagccccggggtggccgcaccagctcgggctttctgccatgttaggcaccgagcaacgttctcgctgcatttttgcgtgcgtttcagtggcgccttttgctgcggagggagttattgcttctctccgcggtggctttttcggggttggggttgtgctctgtgtgtttgcttgtttgccatttaaagcccgactattgttcaggataagctccgcctgggtggggaaatggcatcccaccacagttgctggcgaggggtagaaatgttgccaaacagctgctgctttgtgtttccctatcagaagtccttggagtaggtttggggcacgacggatggatggagagagggatggggcacggaagaagaaggtggctttggaggagcgggttgttacccacaccatggcactcactcagtctccctttctgcctgccaaacttttatgaatattccttttgtggcagagggaagcttaat

SEQ ID NO: 41979 - DNA, 1650 bp, Artificial sequence
  DNA replication origin
atgccagtgcgggcggcggcccgaaacccacttcggggcccccgccccgccggccggcgccgcctccccggcagtccccggccccgccggccagtgcgcggcgccgggaacgggagcggggccccggcgcgccacacgggcggcggcctcggcccgcgtccccgcccccgcccggccctcccagccggccccggcctccgggcgccgtcctgcccccgggagcaggcccctccccgggcgccgggccccgccaggcgcgcccagcccggcgcgccccctgcgtcccggtggcagctccgcgcggggagggcgggggtgaccccggcccgcacgggggcgccgcggccactacctcgcaatcgcggccgccgcctccaggaagccgcggggtggtcgagtgtgctggaactctccggtctggcctcgccgccggccgcctgaagggggtgcgccgcggtgggagccgccgtcgccgctgtcaccgagtcgctgtcgccgccgccgctgctggttgtgcgtgagcgtgtgtgcgcctgtgtcctggcgagtgtgtgtctgcgtgcggcgcccggcctttactatatacaccaaggggtgggaggaggcggggaaggggagggcttgggggaggcggcggaggagggggagcaggaggggggcgaaagggtacccgaggaggcggcggcggaggagggacaggtgatctcgcccacggggagggcgtggccgtgggcggcgcggggtgccaggaagaaggggtgtcggggcggggaggaggaccttggggggagcgccgggggagggccggaggagctgggaccctactgcctcccggcgggctggggaccattccagaccccaggatggagaagagcgaggaacagagcccagaagggaggaagtggctggctgatggaagcgggggaggtgggaagggctcagcgatcacccgaaaatgccaattgtgataccggtggaggatgcttctcacaaggtgggagattaggaaagatcaaattagtccacctacgtaatgtaatttccatccaagaggtgattcatgtatcaatctaacctttattaagcgcctagtgtttgccagatactgggcaaagaactggagttacagggacggtgactgtatgattgctgaccagtaaataagtagtaggtgtcagttgtactattgatcattttaaaactgaaaacaataaacccttagaattcttgagacagccaaggaagcaaccaaattggtttaatgattctccaaagatgtaaagatttttttctattaatcaaaacaggatgaagatatttgagagagaatagcagagcagaaattatttaatcagagcagagaataaaatgaatctagttgttcttggtagtctcgagccccctgaagttccaatactgtgtgtattaaacatgactttcctcttatcaaatctgagttttataacacagtttataattagtatgggagcctgaacttgtgtttgaaaggctgtattctaactatgttgtgttgcaagcataaggtggtagtaactgaggctgaatgatgtctgtcttgagcacttttgcctttgtggactccttcctccgtagaaagatattacaaattacattttacaattgcatttg

SEQ ID NO: 41980 - DNA, 1316 bp, Artificial sequence
  DNA replication origin
ccctttgtcttaagtagcctgactgagccaacaaagtttgctaaatcatgatttttctgggacctgctttagtcattaataattagcacatcagtagcctgtatcaatcatttatagtgtctccagaatattaaaactcaagaagtgctagagataggatcatgagccatcaatgctggtattctgtttgagacatgagagctagaggacaaattttggaacgacgtatccttcttgcagacttcaaggctggaaaggtactaccaacacatatgagttatgtttagtcacctaaccacagccaatcaacaattgctgagtagctgtgctagggctttggtggattgggcaagatggaagggagggaagcagagaagaaaagagaggggagggagggagaaaggaaaagagaagggagagaaggatggagggagggagagagaggaaaagagtagggaaagagggagggagagtgggaaggaggaagagaggaaaggagaagggagggagggagacagagagaagggagaaggaagggtgagggaaggaggaaaggagaggggagagaagggagagggaagaggaagggtagaagaagggagtaagggaaagagagaatgaaggaagagagaaggggtggaaatcatccttggctttcttacaaggtagctaactgtaagcaaagctgcacgtggtgattgccaaataagataagcaaacatggaagcatcttaagagcctggacaaaagctgtggggatcagggaagcatccagaaagaggtgagatctgagctaaaatggatcatcaaacctgcagggactgttaaattggattgcgggttctcatcaccagagtttctgagccagcgggtctggagtggggcctgagcatttgcatttctaacaagttcccaggtgatgctcatgctggtgatctggagaccacactttgagaaccaaccacttctctgaaggattttagatatgtagaagggagacctacgtgaagggttaagatgaggaagacgttaagaggaataaggtggcgaaaagaggaagacctgtttaggaggattctgaaatgaagggattgtataacagaagagcgagagaaaagaatggaaaggacttgggaatctatcctataggcaaatgggagtcatcaaatgtgtctgagttgtgacatggcatgatggaaactttaatttggaactgcttaatctgtcatcagtatactctatggtgtggtgcgaggcagggggagagatggatgcggaaagcacatgtaagagctcatgaatgtatttaagtggtt

SEQ ID NO: 41981 - DNA, 1029 bp, Artificial sequence
  DNA replication origin
ccctttcacacgccttcggaaagaattttgttcatttctgttttccctccccttgctgaccagaaggtcaaggtcaaggcctggtgtgtgcggctgcccgctctgtccccgcctctctctgtccccgcctcatgattgtgcatggcgccctggaggtgctcagtgaggatgtgttcaatgaagaagtgaattccaggagtcaagacacagctcagcaggagtggccatgcacgctgaaattcacgggaccccaaggcagaggaaagctgggaggagccagtggatttggactgcagaaagccggtggtcggctgtggctaactgcgcttgcaggacccacgaggcggaaggtggtggaaggagggactggggggtgggttcagggaggaaaagaaacgtgagaatttgagtggctggagaagaaaacacgcggccgcaagcgtgtgaggcaagcctccggccaggggcttggctgtccttcggggtgggctggtcctgctgtcgtgttgccgtcgggggagggagctggggctcctggcctgtagacagggcttggcttcaggcaccaggagccgctgtctacacgtaagagaggcgcgaagagctcaggttggaagggggttgtttagaggacaccgtgccccgaggcaggttgagaggcaggaggactgctcagatgggattcgcgggtgagggccgggggctcagtgagagggctggggagcttgatctcctggtgcagcggcggggctggagagggcagtgaaaatggagaccatcagagatagcccttgggccacggggccggggtccaacagcagttggcgtcattttgcagggggaggagtcgtggagcctggaggggaggtgcagaggcttctcaagccatccacggggggtgccagggtcagggggccacagagagcagaggcccagcactggaagccagggaggcgggagtccaggacagggtgccccttgggtgaaggcaacacacagactcccgtaccaacacgtgcgcgggtcacc

SEQ ID NO: 41982 - DNA, 1033 bp, Artificial sequence
  DNA replication origin
cgactactcaccccgccgagtcccccacttctagcaggggaccccacagctcctgaggacgccgtcgccgctttaccttccccagcggcagagacaactaatcgaaacctccggccccgccctctagcagaagcgaacgcgcagcctattttgctaactgccccgccccagccggcccgttcggaccaatgggaaagcacctcaggttttgcccgatcccgcctttaccccgcccccttctggtaggagccaatgaggaggaagcgcttgtcctggggttcgggctcgcgccgctcgtgctcgagtctccgaagccgaagaacgctggttccttatacaagctcgcctgcgcgctcacgcgcgcgccgcgcctcctggcacgccaggtttggttgccccgccaagccctagcaacctgggctggagaggctgagaggggcggggcccgagcctggagtcgacgccggggggtagagcggggaagcagggagagggtcgacggtggtggggtggggagatcgtgactgagaaaggggtggctgcgggggtaggaggtggcgaggaggccccggaatccgcctgtcactgcggaaaaaagagggaatcctgcctgcagcgcagctaccctgccctccctccggagggacccgtgccgggggctggggtgggggaagtcggagaagagggggagaacatactcggggcgggagctgagaaatacaggatggaggatggtttatctctgttgttggtaaaaatgatatcgaagtccattgctgctgctgcccaactgttgccgctgcgtgtgcacacacacacgcacatatgcacacacacaacacacactcacacgtacactcatccagcagcttgcggtcccttgggtgagttaggcgcaaagacctagcagcctgaggattccttacacagcagctgggcgcgtgcaaagagctgttgcagcagtagcagcagcagcagcagcaacgacccacacctccgcttcggtccgatgctctgccacacaagatccccc

SEQ ID NO: 41983 - DNA, 1047 bp, Artificial sequence
  DNA replication origin
cttacccttacatcggccccgcgtccacccagcttctcctgagagtggagacccacccagtccccccgggcggacaagagaaggggcgggggcgccggttcccccggaacggggcgacgcggtgaggacgtcccagcccggagtagcccctcctcagcgctcccctgcgcctctggaagggcttcccccgaggggctggggctgtcttttggggtgtggggaggcgaaagggtgtgaaagaggggcggcgggtcgagcccgccccgcggggttcccctcagcggcgggtctgcggcgtccccgccccgccgctcccgcggcacgagctccccggggcttgcggcgaggtaagccccttcccgccggcgccgaggaggggcctgcgcgccccagccccctgcccgagttcggagggagcccgagactcgccaggggccgtcagtcgcggcccgggcccttctgaccttggctgcccgcgagggtgggctagcgaccgggcgccggccccgcggctccgcaacctcccccggacaagtttcaggcgatgctgtgaagttcacgactggcatagtgcggggaagaagaatggccccttctcagaccttcataccttttggaccctcatagaaatcggattctgggatttggaaccgtctcccagaacgaacaggtcctccttgcattgacacgttttgtgcccacgttggggaaaaaaataacctgaacatatttcagtgtaaaggcagatcttccttgagggttttgtttttcgcttcatttgagtgttaaagaacagatgcctgaataagaaaagcctgaccttagtatctctacagtgagattagacgggtgctgtgatatttaagtagttgcagatcagtattctgttagcacaatctattttaattggctggaatttaagctgattttagaaagtattgttgacaccgaatgatttctttctgtgcatctgaattaggtttgtttgaacgtaatggttatatagttaatgtaaaagattacacaaattaatttgtctgagagcgt

SEQ ID NO: 41984 - DNA, 787 bp, Artificial sequence
  DNA replication origin
atcagccacagaatctaagctgggtagggaaggaagagaagccaggatgggccagtcaactgggagaagtaggagggtagtaggactggaatgctgaccgactgtgtcagggagcaggctgactgcagtgagggccttaggaggtaggatggtgggaagtgcagggggagcagtcccagggcaagggatgccctggggtggagcctagaacatgggcagcccaagccatcgaaagagagtattggcgatgaggtgggcaaggacctggaaagcaggtgtgttcaacagtggggggcaccacgtggacccagatgaggagcaggggaaggaagtttagtcagaggtcatgggcctgaaaggagggtggtggggtgtttctctgtgagcagccctgggggcaagcagagcctcccctgctcctgggcctgaggtgggtgtcctggggatgggtgggtcctttccttcagaagggctgcaggagtcaggagtgctgctgtgctctggaggaagcccaggcctatggaggagagaagcctttctgaataagttgaaggtggaaggggcttcattgaccatgaaatggagattctactggccccactggagtgccatgggaaaggtggaaggatggacaggggatgggatttatttaatttgggacgtagctccacaccaaatgttcagaagtgcggtccggctattgttgacaattacaatgtgaggaaggaggagggggcagggcatgtggagaacaacaacaaacctggtcattctttatctagagtct

SEQ ID NO: 41985 - DNA, 1355 bp, Artificial sequence
  DNA replication origin
cttttccttcctcctcaggccgcgacttggagggttccgctccgcggcgggggcagagccaggggcggggctgagcgcggcctgggcgatctccccggcggctggggtgggctggcgtcttcttcgcgcccgggggacctcctcgcgaccgccgggacgtaaaaggggcttggcaggggcgtcctcgccccactcccggaacctggtttcccgctgctcccgcgagcgtcgggagcccagcaggcctggccgaggcgggaccttcgtcgctccagcccccgtccccgcccccgcgcctccccgccgcgcggagctctggttggcttgctttccaaccggactttggggctagcgtttagaaaagtctcgacctcctccggcccggtcccatcccaagaaccgactaaggctgtgagtgtccgggaaccagacccgcttggaggccacagccccgacgtcccgcgcccacgcggcagatcgggcgctgcggcctgggagcctcggggagatgcggagcaggagcaattccggggtccgcttggacgggtacgcgcggctggtgcagcaaaccatcctgtgttaccaggtaaggagggaccgcccccagggaacgcgtggaactaccctctcatgtaactcattctccttcccaggtctggccctcttgtgacctgagaccttgcaattaagagtttgctatttgaatctagtccttgctagccagtgattaccaccccattgccaccccgtgctccttaagattcaggggacctaactgttgctacggctacttttcacagaattctttggccattgttcaggatgagaatgagccgcctccgtgcccgggtccaaactgcctctttttgcattgactctgctttttttggacgagaagaggtgtggggggtttggacagactacactgaatgagaacagtagacaggagtgaagaagctcctgaagtttacgcaggactctgcagtgtggggcgacagctaccgtccctcccatgagctgtcttggtagagacccacctgggaagcccttaggggctactttggttgctattttacagataagaaaattgtgaggctagaaaggtcactgcatgtagcaggtcagacccaaaggctcccaagctcacagggtcctatgacactgcccatgtggtccgaggtatgaatttgcctgctatgctttgtattcctgggctaaaattatgtgtgggtccatcagtgtaagaccactgaactatttttattcctagtgaagacagcagctatgtttcttgccctcaatcaacagcaactatttatagggccttcaaagtcaacgaaggaagtggcattcag

SEQ ID NO: 41986 - DNA, 1180 bp, Artificial sequence
  DNA replication origin
cctgccaagccccttttacgtcccggcggtcgcgaggaggtcccccgggcgcgaagaagacgccagcccaccccagccgccggggagatcgcccaggccgcgctcagccccgcccctggctctgcccccgccgcggagcggaaccctccaagtcgcggcctgaggaggaaggaaaagggggcggcccgggagagccgctgcgaaatcagcaacgggcgggaaccaggttgcctccctgagtcccttctctccccggccggctgccaaccacagccaaggccagagaaacaggcccttctgccgcggccacctgggcgccttggacccgccctccggactcgcccccgcccctgccgcggagtggaacgtttggaaccctgaggggcacaggtaagggggcggccccgccccgcgccctggaacgacctcacggccccgcccacatccccgcccctggccccacctccgccgcagagcggaaccctcagagtcgcggcctcgggggggacgaaaaaggaggcggcccgtgggagtctaggggaacccggcttcgggcggcggacgagttggctttcctgcgtggtagtgtggagccccccgagacgggtgccagtcccactcgaggccggagaaagagggccgcctaccgcggccgcctgggcacccctctgagggccaagattgtagtcccacctctggccccgtctccgccgcctagcggaactggagtagcgggacccagcccggaagaaaaagggggaaggcccggagaggtgccccagcgacacctctggcgcctgtgaccccgcccctagccacttgggcgccgcttcctcgggcaggttcgcagttcatctcccacgggtctacagcttgaaacttggcattcattataatgtttcgtggctgctgataacctacagttcacaatcttcggcctggtattcattgtccaccaaaatctggcccacataggaatttactggacagctagactaatgcaatcaatttccgcaagctcttttccagtctccatgcatttactctatgcttgaccccttcggcccttcttcctcctccttgactaactgaagcctatctttcccttaacggccagctcagctcctctattagccttccccattttctgaatttctgtagccattggtttagtaagagc

SEQ ID NO: 41987 - DNA, 1370 bp, Artificial sequence
  DNA replication origin
ggggtcctgagacccagactcgcacagccggccacgggcgctggaggctcgggcgcagcgtctagccccggagggcggcgggccagcgggccggcgggacgaacgcgccttccgcccggctgctgttcctagccggggcccgggaacatcctgaaaggcggaggcgtagctcccagccccggggctagttccccgactgggggagcccgcgcgccgtgggaaaggaggctccaaggggagacgcgcgtctccaaaaccttcggacggagccgtactttccccaacccgcgggaaactgagccacgagcctgactcgcgcgggtggtgtgctagacgccaactcccgggagcccggctccgcgcgcctggtcgggctgcggcggtgctggcggagcgcgaacgcgcccgggccccggacggcttggggcggcaccactcggcgcggccccgaacaggtggccccgggcaccgagggacggagcggcggcccggagccagggggtgagcacgccggggaaggagggggctcgtggtctcggagtgagcgcatttcggcagggactcgagtttcgaggctccgaaacccgataaaaagtgagggggaagaagagagctgacctcccgagagccagacgaagcaggggacaggttttccgtggctgcttcgacagtgacagtctgtactgtgcacgataatcccccagggatcccgttaaaatgagattctgatcccgcaggtctggggtgggggccgagcgtctgcatttctaagaagctcccagtggctgctgatgctgttccatggaccacactttatccggcaggccctacggaagtactttttgtccagcaggctgaaaaccttaggaaaagtgggagattgggagacgaggtcctaagactttacagtatgtatagctttaatacctctttgccacctctacccccaaacgcacgcaaaaacacttgctactataaaggccaagggaaactttcccttcgccccctgaaggttcgcttgaaaaattaactgacaaagacagattgattggagaaaaggcatgcaaatgtattaatgtgtccacggggagagaacaatagagtgattacccccagccccccaatggggtacagaagcatgtagattatcttgaggttacagaaagaaaggggtctcaacgcatggccccaaacaggttatggtggtaaaagaggttgtgagagggggagaagaggaggcttggccagcaaaaatggtctggagatgtcaatgaaacctcacaggtggcagccctcagagagaataaacagtaaatgtttctttcagacctttaaaggggtcagatcctcagttaatttctcttagatct

SEQ ID NO: 41988 - DNA, 1440 bp, Artificial sequence
  DNA replication origin
gcccgtggccggctgtgcgagtctgggtctcaggaccccaaggggccagacccgtcctggcgccgagcgcttacctgccgctcgcgtcctcggggctggctgctggcgccgtccggcccgccttttcccctctccggggctgcggccctcctccccccgcccgcggcctcggcgccgcccccgccgctcccggcccgctccgccgccagctctccagctgcccagcgcggcgtggcgcgtcgggcgctcggcggcggcgaggctgggcgcggaggtggggagcgggcggggcgcggagggaggagggggagcgggcagcgcggccggccgaagccgggctgggagctcggggcaggggcaggggccggggagaagcgggggcggcgagctcggccgcccaccccaccgcagccgggggccccgcagcgctcctgggctccaggcactgcgggaccctcagatgcccggcgtccagcccagcgagctcctccttggggaccccaacggaccccaacctccagactcagcggctcacctttagggctcgccccggtacccatatgcccgtttcagtgtcgcacgctgtaatgggtgggagccccgagggcgcacttctaccaagatattcctgaatccggagatcagatgtcagaccacttgagaggggaatttggagagagcagtaaacgagaaatgtcccagtaaaggattcagttcgatggttttcctggtgaaggactggaaatacaccgggttcccagaaaccgggatctcgggcgctctgcctgctgggggtcgaggtggagggggtatataaagtgagttgtccctggtcccctctacctttctgtctcagcatctctcctcctgcatggtcatagaataaaaactagatctggataggacttacagatcccctaagcaatttgtcaaagtaccctattttacagatgggaaaatggaggctcagttctacaatacgaattagttgtagagaccagggaaaaaataagcgctctgaattccctttccggctcattttactgcccccctcccccgccgcctttatagtcgaataacacctgtgtttgcaaaatgctttgtcgttttaaaggcatcgttctctttcgttaaacctgcgggagaatataccatttttcctttacaactagaacaaaattctggattctgaattgcattcacagccctggagacgcgatggttatcaagtgcagatctttaaggcatatcctggctgactctgccattttagacacatgatgggcgagatgtatattctgctttgcaggaggggttgaatttgttttgcaaacaccagtttattaacactcacaacattctaactgaataaatgaatggacagtcttttcagagagacttttaactgattggattaagggagagtagagtcaggaagct

SEQ ID NO: 41989 - DNA, 1522 bp, Artificial sequence
  DNA replication origin
agtcggtgccctccctcgggcaaatacctgggccacacactcctgcaggttggaagccacctggttctgctcctcccagaggattttgtacaggatggcacggcgctcactgtccttgcgtagcaggaagaggccctggtccctgtcctccggggacgaggccaagccccggtcttccaaggctgagctctcgtctggaacactgtggacaaacacgtgtgacaatctctgtgcgtgccggggcactgtccctgggagtgtgtcatgttaggacgccctggagaagggctgagaggtaactgcgatgcagtccctgtgctcaagaagatgaaattgccggaggaaggacagacatgcagtgttctgtcaacccccacagcaggagggagagcagaaggagggggaggcggggtaaaggagcctcccaggagacagggaggagggagggagggagggaagggggcaagcacagaaggagaggtgagggagggaaggtgagggggacaggggaaggaggaagagagaggaaggaaaaggaggaagggaggaggaggggccaggaggaggagggggccggaagatgcagggacagagggggcaagggtgagggggagagagagggggaagaggagagaggggaagtgtcgaaggagaggggagagagaagggaagaggagaggtgggggagggcacatgtggggaatgaaaggacagggagggaggggaagggacagcaagtgaacgaagcaccctccttgccgggatggggcggctcagctgccctactgccctgcagaagggaagtaaaacccctcagtggccatctggttgggaccagggaggtgccctgtggcggaggactaccagcaccctttcgggcccgcggcagacagacagaatacgggtgtacctgaggaggtggccaaggtggtgcctgggcgcccgggtcctctcaaagagtgcgtcaggctgggcgtcggagtctggggagacagagccgtgctcgctgctgctggtggccatgggctctccctgtgtgggcagggccaggacgacaccgcggggaccttctgtagggggacagccagacaccgaatggggagactcagagagggacggggtggagctgagtccctggcagcccctcaagcccaggtgaaccgcccaggcacccaggatcctgtagaaatgtgggttgggcgggggacgggccacaggtgctgtatttctactcagatgcatgcagttgggggtccctcatggagcaagttgctgagccactcactctggcagcttctgaccccgatcggtaccagggaaaagaggacaaactgcttccttttcaggggccactcttacatcattgccagttaggacttactgccccagaaggtgtcactggacttcggtggcctgcaggacagccacatcaggcaaacctccctgacaaatcctttaatcaaggtcagggttggcacacgatgacaagccaggctccaaaactgaagccccaggctctggc

SEQ ID NO: 41990 - DNA, 1317 bp, Artificial sequence
  DNA replication origin
agaagggccccccgtacacacacactccgccccagggaaagcaaaagccaccgcacacaaatctttcagaggtggcaccagcaggaaggagagtgttgtgcctcatggcaaaaggaacatttaaccgttcagagaagagtctgttcaaactccaattttggagcagaatgaatacaagttgagaaaacggagtggttctaggtgaagtggactcctgaacgacttttctaaaaagatgttgtgctgaagagtatactcagtgtggtcagaaatgtcaggagagtgctttcaatgggtccagctgccacttgtttaaacaagcctgactccccccctaccccgcccttccagctggggagaatttgctctgcaagaaaaacagatctgcgctgcctccagcagaggctgaatcctaatcatcctagcttactattacagcaaagcaacttcccatatcctatctcatcagcttttaggtttagggtaggcactgttaactccctttgaccagaaactgaggcacaaggactcccaggtaattactgtctcacatataatgcttctgaacgtcacccaggtgacagaggtttgtcaccaaaggtgctgtaagggaaaaaacgtcaagcaacaattcattccacaccgagagaaactcttgccaatccaaagtacgcttcttaaggctggattctcaggcacatttattatagtgagtttagagacctagagtcccactccagcaaaggtgccccctaacccgtgaatgctgtgcattatgggataaaatatacgtcacagggtggtggctcacactccaccgtcagtgttttggggacgagaattgaagtgtgcaaaagaacactgggtatttctaagtagaggcaacacacacacacgtaagacaccgatttccactcctggctgcaaaatggaatcgcctgggaagcatgacacttctaaggcctcgggtgcttatgtcattggtctggggtccgatctgggcacccagagttttaaaagctccccaggtgattctaatatgtagcctgcgttgggacccacggccgtaagagaccttccaggaatgagaaagcaaaagttggataacttgggagaaggggggcttggtagggtctgggttacaggctgtttcttgggttatctgatgtttaagatgcctgaagaatcaaagagtctaaatgcccgtggcctctattttcttatctgtaaaagggcacaatgttaaagactctaccctcccccaaaggcaggacggtcctgttggacggatcagggggtgagaggataggagggggg

SEQ ID NO: 41991 - DNA, 908 bp, Artificial sequence
  DNA replication origin
ggacaactgcacagagggaggtgagcatacagagccccagaaacacagaaaaggggccagccatccagacgggcaggcatcgcaagcaggtgctgacagtcccgtcttggaggaggaccaagaagtagccagaggaaaggaggggcacttagagaaagaagctgcagcgggagggaacacgccaggcaaaggtctagagaccgcagagcaaaatgcattggtgggaagtactgctagaccgtcagagggggcaagagagggccttgggggcagagctaaggctgggaagtacaagcggctaggcgaaagggtgagaggagggcacacggtgctgaggaccatgctggctgcagaaaggctaaagggttggcagatctggagctggagagaactgctgggagagtcttacacaacgtaagctagaagcggtcagggttggacccaggcagtggctaggaggatagacacaagacaactttgagtgatgtggcgaaggcaagcacagccgacatagagcaccaggcattgttcccagtgctgggggcaggagtgggccaggaggatggagaccctgccctcatggaacagacgccttgtgagcagggagatgtggtcctggacaggatgcagagggtggaggaggaaggacagatcagggaccacgggtgtggtgcacacaccaggcatcgagattgtacctttcatgggagaaacagcagactgaagaatcagataatgatttccgtttttgacacattggattttaggagcccttagtgactgggaaagaggggaggaagaggggatgaagcagaagacaggcctggaggagagtccagaaggaacgaagtggttgcatgcgtgggtgaagggtgctgagaggaaaactgggtggagtccacttggtg

SEQ ID NO: 41992 - DNA, 736 bp, Artificial sequence
  DNA replication origin
accaggcatcgagattgtacctttcatgggagaaacagcagactgaagaatcagataatgatttccgtttttgacacattggattttaggagcccttagtgactgggaaagaggggaggaagaggggatgaagcagaagacaggcctggaggagagtccagaaggaacgaagtggttgcatgcgtgggtgaagggtgctgagaggaaaactgggtggagtccacttggtggagccagggagacagaaagctgctcctggcagatgaccacctggatgggaggtgaaggtgtggcctgaaagtttaggactctctttccagaaacttggttgaggcaggaagacaggagagagggagcatgctcatgcggaagcctcagggggaggtgggatcagggaagggttctgttcactttccaggactggggagaccctaagctgcatgatacgctgagagaaagagccagtgaagggccaggctgaaggtggaggagactggcgggggaggcctgatggagaagtgtcctgaggaggccaggagggccgaggaagaaggacagtcatgggcgagagagaagaggggtgcccagtaggcccctgggggagaaggcaccaacaagggagctgggaggcaggtggcgaggagggaaaagagtgggacaggatgttgggaggcgggggcgatgagcagcagggcagaagtagaggctggtggtgaagcttggcaacgcggccgtg

SEQ ID NO: 41993 - DNA, 1250 bp, Artificial sequence
  DNA replication origin
tctgattgtgagtctcagcattagtattttttaggatttctaactcttgtccttgttgttttccattaaattaaaaaaataataaccaccaccaggaccataccactttcccatacactgcagttctccagctctttgtgggtgatgggtgatgggtgacagattacaggtgtttcagttctttctcaggaggtcagactctgtcatcctgttgtcatgtctgaggctgggatttggggaagccccacccccagctttgagcaggtccaaggaggcattatcacttggcctgtctgtggttggcctggagactggagggccaatgacagaagtagagttgggaggagaaaagaaggatggaggaagagagaagtgggggtggagtgtgagaggatgtgggcctcagagaccctgttgagcctcaccctgggcctagtctcttggagcaagcatgtttgaggaggagaaagaaggggaggggaagatgaatgttggggatgggattgcaatttatgatagggaggccaggaaaggcctcatgaaaaaggtgatttaagtcaagacttgaggatgtgaggaagaactttgtggggatctgggggaaagagcccttcgggcagtgggaacggcacgtgcaaaggccctatggaggagggtgtccctggcttgttggaggaacaacagagagaccagtgcaccaccactgccggagggaagagggcaggggagagcaataggagaaggggttagaggacataggttacagggctccagatcagggagggccttgtgacttgtgactctgagtgagatgggaagtaactggggaggctgatgcgaccagagatgttttaacaggttccctctggctgccgtgttgagaaaagactgcaagggggaagggtggaagcgaggagagcagtttggaggccctttgcaggaatacaggggagaccagggggtggcagtgggagggtgagaagtggtcagattctggatatttctgtaagtacagccaacgggatttgctggtaagactgggggtgtggcaggagaggaaggagggagagatgactctaaggtttttgtcctgtgcattgggaagcatggtagggatgtgggtctggagtgtgggggccaggtccaggctagagataggaatttgcacagctgcccggctgtcagcccaggcccaccacagaaccacctctggcactacaattcctgtttgatgcaaggatggctgcttt

SEQ ID NO: 41994 - DNA, 829 bp, Artificial sequence
  DNA replication origin
ccttggatacagggaggcaggtagtatggggaaccttgggcccagagaagcaggtgacccccgccaaaggagccctgagggctgggtgggaggggttttttatgacaaggagttgttgatgaaaaatgtgtgatggacactggacttccagtcactaccctttcagagtcgaaaatgaataggaacctatttaaatctttctttaggatcttgtctcagggtgatcctgctagcatttctgttttcttttctctttggtgtgagaaggctggggagagttttgtagggaacatgctgctaaacattgctttctggagttgtaggaatataggctttccccccactgtactacacttgaatccagccgctcgctcccattttaagagtgggaaagtgctgcatctgggccaccacagactctgttgaggtgtgaatgggagttcttttgcatatcccaacaaagaccccagttttaggaaaggagcatccctgaagttgagctgcattctagtgtggaaagagggtttttccagataaaaggggcagtggttagagtgaagatgaaggaagaaggaatgacagaaggggactgtgggaaagagagaagaccctgggaaggagggaagactgtggggaaggatagcaagattgtgggaaagtgagcaggactgtggggaagagagaggagggccctgggaaggaaggaggactgtggaaaggcgaggtggatggtgggaaagagggaggaggaccctaggaaggaggactgtgggaaggggagaaggatcatgggaaagagagaggaggaccctgggaaggaaggagtact

SEQ ID NO: 41995 - DNA, 1433 bp, Artificial sequence
  DNA replication origin
gtggtgtgcgcctgtaatcccagctactcgggaggctgaggcggggggatcccttgaactggggaggtagaggttgcagtgagccaagatcatgccattgcactccagccggggcaacagagtgagagtccatctcaaaaaaaaaaaaaaaaaaaaatatatatatatatatataaaactctaaaagaagtacactaaaataaaaatcacagttattctagagtagggacccatggctggctgtgggatggagaaggccagtaaccctgtccctggctcttcctgccctgtgggattgaaaatctgaggcacgcagcaatactgggtttgaaggaagaaatgggagaatgtgggaaggaggaggaagtgcaagagagaagaggggttgagggagagtgggcactggggccagagtggggttccggggagagaactggggtcgggggagaaagaagtgggcagagagacagaaaagggggcttgggggcagatgagaggatgggagagaggagaggaagagttgggggggcaaagtgggggggtgtggaggtgttgaggggtgagagaagagaggcaggagggggaagaagaaaggaagaagggcttagtaagaacaggagaggaagtgtggagaagggggcagtggagaagggatgtgggcaatgagaagggtaagacacaggggccaggagaggaggggtgaggaagagagaaaataagaggaacgggctgggaagaaaggggcaaaacacagaggggctgagaggaagggagagcagaagtggggagggtcaggaggctgggggtggacagtgaggatgcggggagagagactaagagggaaagagaaggtgtggggagaaggggtgtggaaaagagggtggaaggggagagggggtgcaggggaatgggagagagatgcggggacaaagagcgtaggggagatggatctggatgagagaaagtgagggagacagggtgaagaggagtgagggatgagagaaagggtgaggggatgaagaaagagcagagagagaaaaggtagggggagagagaggagaaaaagagggggagaaggcaggagggaggagataggcattagggcgagagccccctgcccgctttctggagcgcatctctacctcaggggttaactcgtcaggcggtggctgttttttacaatgtctacatctcttcctccatttaaaaacccacaggttccctaaaagcgccagacgatgtcacaactgtacccttcccccatggcatgctatcaccaacccatccaagggcccccagaggcacagacacactttttaacggccgccaactcaataggtgacatggagcttagtcacacagttcaggagctcaaaggattaaaatagccccattactctgaagcacaactgttctcggctccgacaagggcc

SEQ ID NO: 41996 - DNA, 1187 bp, Artificial sequence
  DNA replication origin
acccggcgcagccgggcgcattgggccgcgatgcaacagcagcagcaggagtcgccccggggcagcagcggcagcagcagcagaggcagcagcgggcggcgctgagccgccgccgccgccactgaggaagaagccggcccagccgccgccgcgtccggaccctcgcgcctggatcccagcgccccgatcccggcgccccaacccccacgcccgcctccgccaactttcacgctgcctcggcggcccggcccggctcgacgccaatgggtgagtgggggccgcccgcgtccgggcgtccacttcagccttgagggcggcgcgccagtcccagaaccgcggagcccgggagggcgccccgggggcagggtccggacgggggacaccgcggtgggcgccctcgcctgcctcgcgcacccccattcactcccacttgcgcccgtgtgcccgccgagcccgcgcgcggcgccgacgggaacccgcgggggcctgagcagacgatcacgggggctggccccgggcggctcgggctgagggatgcagggggtgtggttggtttttcgggtgggcggggagagttttgtcttggccatttttgcacccgagcgcgccctcctctgcgctgcggacacgggcacccggacctggtgggctccggccctgcgcggggctgctggtgtcttcctggtcctgtctcgggggaagctggaacctcggggtcttggagggggctgggttgcctttgctgggggttgacaggggttggggggtggggcgggaaacgccccagttcctggtctggctcgcagtcccggggtccagagcacctgacgctcctctccttgcgccccccttcctcccggccccgaccctttcgctgctgccttcctccagcctggcgagctctctgctccgtgatgctaaaaggccacttcccatactgtcctttaagtcttcagggtctgggacctggaaatggtgatccggtctttgatttactgagtaaacatcagttcgaagtagccaactaacctttgaaccccctgggtcccatttgatttagaccccggagcattggaaccaccttgctgcccagagaagctgccactttattggcaaggcacttatgattacttgggctattaaatgtttggtctacccaggtaatgttcttgctgacagccagcttc

SEQ ID NO: 41997 - DNA, 1715 bp, Artificial sequence
  DNA replication origin
cggcttcttcctcagtggcggcggcggcggctcagcgccgcccgctgctgcctctgctgctgctgccgctgctgccccggggcgactcctgctgctgctgttgcatcgcggcccaatgcgcccggctgcgccgggtttcctgctccccgcgagtggaaattgcgaaaaaaaaaaaaaaaaaaaaaaaaaaaaaaaaaaaaaaaaaaaaaaaaacagcgccgcccagcccagcgcccggcagccgcggccgcgccgcccgctctcccctcctcctcagcgctgccgcgaggctcctgcagctccgcctgccggggacgcgcggccgccgggcgggggcggggccggagaggggcggggccggggccggggccgcgtcggggcaggcgccgggggcgtccctgcggctgaggggcttgggcgccctcctcaccgcccgcgccagaggcacccctctccgcgcggctgccacccacccgcagcggctgggctgacgccccgggaagtgccgcgagactcctcgagaccggaggagaggggcttcttgggggaggggcgtgggagtgcaggggcacgtggagaaggaggagaagggggctgagcgggagggggcgacaagaggtggaggacgggctggggatggagaccagggcaggcccggggccaaacgcctgaccagggtgatggcaggtggccctggggcatcgaggcaatctggaatgagttttcccggggggctgttggaggggaaggaaaagggtcccttggaagggagagaaacgcggcgtcccttcggtggggcgtgggaacgcaggcaggccaggtgcgagttccgcacagaggaggcggtggcactgacgtggggaaaaacgggcgaaggacgcagcggggccgaggggacgcatcgcctcgctgggacccgcctaagccccgccccagtgcctgggccaggtgcggttcgggtgttcaggaatgttcccgagctctgacgttcccaggaatccgctgagatgagggctggctccctccctagcaggcattattgtgccttactgactcccagacctggacggccgacccttgagtgggcgctaaaatgttaacagggaatccgtgggcattcgtgggcaattcagaagctccgttttgggtccattcaccaccacacctttcgccatagatactctgcctgccaccacattcctctaccggcccgttatttccttttccctttccaccatctggtggtaggaagcgatagtgaactacatgggagacatttaggcaaagagcacgtaagacaatagagaaattacatcagtggcccctggaaatggaggaggctgagggctagtggactcaaaagggacaaatgaaagccgaccccctacccaagagaggggctgtctccatacctcacctgtgttggcggggcaactcttgtaaattggttaccgtcctgggatttctgtagaaaattgttcttataactgtttcatgagtttttcaaaaaacctcaaagtcagggtcttacaaacaagagatcagtagcatcatctttctaaataccgttcatgtgtgtcaaaccgatcgaaataggagactaatcaagggacaagaggcccatccacacagaggctgcaattgaagtcctagtgtcatcaatatcagactcctaaaaaagggatcagagaacacggagattaagaatgtgaagg

SEQ ID NO: 41998 - DNA, 1146 bp, Artificial sequence
  DNA replication origin
catggtggcgcacacctgtaatcccagctactcaggaggctgaggcaggaggatcacttgaacctgggaggcagaggttgcagtgagccgagatcgcaccactgcactccagcctgggtgacaagagccagactctatctctaaataaataaataggccgtgcgctgtggctcacgcctgtaatctcagcactctgggaggctgaggcgggaggatcacctgaggtcaggagttcgagaccagcctggccgacatggggaaaccctgtctctactaaaaaaaaaaaaaaaattagccgggcatggtggcgcagcctgtaatcccagctactcaggaggctgaggcaggagaatcacttgaacccgggaggcagaggttgcagtgaaccgagatcacaccactgcactccagcatgggtgacagagattctgtctcaaaataaataaataagtaaaaataaaaaagtggttgtagtcaaaggctatgggtttaagttgggtagtgggatttcaacatttaaggttttagagatggagcagtatcaagtgatgaatatctagattttctagactacgggtgaacaaagtagaagtaaaggtcattcggattgaggaactgaaggaaaccaggctgggttgtggatgttggattcattgggaggatggcagtaaatcagatggagaggaaaactaatgccagacagtcagtaggtgacagtgacaagggagggcaaaaggtgttactaccagatggcacagagcctgaaagagctatttcacaaggggaagaaagaatatcagtgtcaagcggaaagcttcaagagtgaagaagacacactacctttgaggctggtgcatggagtgtgggaggggagaaaccaagcgagtagacagagatgaggcaatcttttgaattggatgacggatagatgttggtaccatccgaccatttgggaagtccagaggggaggctttgttttccgggaatatgcttaatttgaggagtgggaaatggatagagggtaggtgaatggttagagatctgcacaaagctggaaggcccacgggatcaagttctgcccatgactgaggggtgacctccaatccctgggccttaacccccaggatccctggacctggaacgccc

SEQ ID NO: 41999 - DNA, 962 bp, Artificial sequence
  DNA replication origin
ttgagtgtgtatctgctactgtgagaagatgcatttacgctgggtgtgcacgttgtgtgtgcatgttgcatgtaagcatcgtatgaagaactgtgtgcgtacgcacgccttctgtgtgtgcactgtgtacagcagcgtgtaaggacgcgtgcacgcccgtacgcgctgtgtgaggactgttgtgcacattgcatgcacacgctacaagcgcgcgccgcgtgagaaccggtgcgcctatcgcacgtgcacgccctgcgtgcgctgtgcgtggaagcggtgcgcctatcgcacgtgcacgccttgcgtgcgctgtgcgtggtaaccggtgcgcttatcgcacgtgcacgccctgcgcgcgtgctgcgtgaggacgcgtgcgcatgcggacgcgcgcgggttcggtgcggcgcggcgggcttggcagtgcgcctgtgcggccggcgcatcccgatggagcgcggcggcggcggctccgggacgggatcccggcctgaggggactgcgcggggaacctctctcccagggaagatcgcagaaccgggcgcggtgcggacctctcagcccaactaccggcctcaaggtattatccccagagtgtggcgggcgcccgagggcttcgggttcctgtgggggggcgggcccggcggcccagggcaaaggtcctcgagcgtggggggaaggggcacggcgcagagctgagataaacgccctttccctggcccaggatcgtccggacgtgcatccaagggccgcacccctctctgtgcgagtggcggggttctttcttggggcgacctgggtgagtgggtacacatggggggtggcttagggtgggcggcaggtgtgtttgggatggaggtgcctgagggggtgctgcgggtccagtccccgtcctcgaggagcagccggcatgggggtcgttaggataaaccgagcggggttctggggttgccccggcctcc

SEQ ID NO: 42000 - DNA, 1673 bp, Artificial sequence
  DNA replication origin
tgtcttccactagcccagcccctgggtgcgcgcggcggtggtggcggcggccgagcctcgctttgagagacaggtatcgcttaggcgccatgttgtgagcggaagtgggggagcgcgcggcggtcgctgttctgctgggagcgggcgcgggaaccggcggggggggcggagccgtagtcccggcggcggaaggaggagaggaagaaaggggcgagacccggtgcccagcggaggcgcgaggctctcgctcagcgcgcgggcgtctctggccaggcgcgcggctttcgggcggtcggcgtcggcgtcgagccctctctggggccgccgccgctgctgctgctgctgccgctgccgctgccgctgccgccgccgccgccgccgccgccgctgccgtggggctcgggcggcgacggagcggggccggccgtggggcgggcggggagggaggaggcggtgaaggcggcgggccgggggggaagatgccgctggcgcagctggcggacccgtggcagaagatggctgtggagagcccgtccgacagcgctgaggtgagtgcagcagggcggccggggccggcgcatctcctcctcgcgcccccgccggctcgcttcgctccccggagctggccactcggcccgttctgatcccgctcgcgtctttcccccgggctcagggttttggtttgggttgttggggtgggtctattggccggtctgtctgttccttccatcctcaccctcacctccttccctcgctcggggggctgccagtgtggtggcgcgtggggtttggagtgggcgctggggctttgcaagaagccaattttaatcaactttgcgtgggggaagcgggaggcggagcgggggccggcggggagttgggaagtttggcccagccgggtcgggggctttcccggaccttggcgactttgggagatgagggaggggtagggatcgggttcaccggggagcagggactctcgagtccagccgagggaggggctgctgcggggagaccggcgcgcggggcacgggcggcggcgacctgtgggggtttcgggtagggggtgcagggttttgcctccccctcgtctgccgcagcggtttctgctgctgcaaagaagaaagcggaagcctaaggtcccctaccccctccgtttctgaggtcgcagagctagacccccgtccctgtgagtttaacttgagtttcctgtccatggaggtgagagggtgatattcaaggagatcagcggccgccgtaaaaggctttctggttttcctcgcccgggatctggtgaccgtccctgagtcacccatcctagtgcccaaaacccaaacaatatacccaaacagggcaaaacagaatttccccgggcgcatcactacaccgagctttcctgaaccgcccctatcccagaacaactcggggtctgcgaaaataatccagacaagacccgttccaaggtatcaccgctcctctccggagtggaaaatcaattcctgatggtggcgcgtctgtgattcttccttcttgactttttgctgccttctctccccgcagcggactttaggggattacaggatgataggctgcgtgtgtgtaatagttactgagtgagtgaccccatttctggaaagcatgactgaaacgcgggggtggaacggggcaggctc

SEQ ID NO: 42001 - DNA, 1707 bp, Artificial sequence
  DNA replication origin
cccccccggcccgccgccttcaccgcctcctccctccccgcccgccccacggccggccccgctccgtcgccgcccgagccccacggcagcggcggcggcggcggcggcggcggcagcggcagcggcagcggcagcagcagcagcagcggcggcggccccagagagggctcgacgccgacgccgaccgcccgaaagccgcgcgcctggccagagacgcccgcgcgctgagcgagagcctcgcgcctccgctgggcaccgggtctcgcccctttcttcctctcctccttccgccgccgggactacggctccgccccccccgccggttcccgcgcccgctcccagcagaacagcgaccgccgcgcgctcccccacttccgctcacaacatggcgcctaagcgatacctgtctctcaaagcgaggctcggccgccgccaccaccgccgcgcgcacccaggggctgggctagtggaagacacgcccccggccgctgcgctccgctcctccctcttcccacccccctccttctgcgccccaacctcagcttctgggcctcgcctactttcaggaagggcgagcccaacagatctgggggcgtcggcgggaggcgggggaaagaaatgggaaaggcaggaggggcgaaggctgggagcctttcaccgccaagggtccaaggaggtcggaggctccttgggaatgagggagaacagtggtccccgcccagctggggagggaggtgggcaaagtaccgggggcgcagtcccgagccaaggacccggggaggggtgcggagtgtcttttcggcttgtctcctccgggggtgcgtgcgtgcggacgcgcctagtctctgggcgcatcccgtaatggcccaagaccctccctcttcagggtcacatgctgggaaatcacctgccccccatctcccccgacggaggcaagggaggcttcgtgcctaggagcctcctgggggctcggctcccggtttgattcaagtcttttcaagttgacgctcttttgttaaattgtggctatttgggattaattcctcttgtattagtcgcttcccccgcaccgcccccagcccaaattctcctccccaagtgcgcagagctctcggccttcagctgcgaccctggaaccgctgccccccgccccacgtctgctacctaaatcttcaagaggggaaaacagggaggttccttaaggctgtccctctcggtagaggttggagaattatttaaaaatatcttgtaggcaggagcgcggggttcctgctcctctgttgactttaaataagagattagatttaaaaatcaggctggccgtgggcggaggaggaggaggagggggacagagggaggggaggggttctgactcctcctcctgcccaagatggggaagccctggattaaggaaacccaatgccccgacggcgacggagccccacaggacggcgagagctttggggggaaggcctgggcgtccggggtgcgtcccaagaggactcgaccctgtgttcactgcgccaggagccgctgcgcgctaagtgcgcccgggcagaaatgtgtaaaagtcgcagggctgagtggaaagctactgcagcccctggctagtcgcccagcgaggggaagagaaaaagcaaagggagatctccgagccggcctgtcccttcaaaccctcaggccgtggcccaggcatcccggtcttcc

SEQ ID NO: 42002 - DNA, 2248 bp, Artificial sequence
  DNA replication origin
gccgcgcacgcgcacttcgcgcgcctctgttcccggacggcccccagagcgggaacgccaggctgcgagctgctggcacctgtctgcctgccagacagaccctgggctccggcctcgtgccggcacgcgcacgcgcacgcgcctcgcgcgcctgccgtcggccctgggggcgggaccgcgcggcagcgagcgggcggggggctcgtggcgcgcgcgccccgcacccgagggctgcggagagatattttgggtggcaggaggcccctcgtcatttccgccgggcagctagtcgtgctcggggcttcactcccgcgcgtgaggcgagcgggcaagttggctgagggcgtgcggcagaggctgcttccctcggcgacgcgacccctcagcaactcaagctatgaactgaagctccctagggacggagaccggagcggagcggcggaggcagcagcagcagcagcagcagcagcagcagcagcagccgccgccgccgccgccttagcgggaactgagcagacccggcgcggagccacgactcctgcacgtttacctccctgtcgccgttcctgccggcggttggctaaaagacgttacagccgcgagacccgacacacaaaagccgctttctccgcgccgcccgcccagggaggctgcggccagcaagggaccccacctgagagcagctcgggctgctgagttcgttttgtgtctgagctctgcgctctgcacggaaccgaccccgtacccatggctctgataatggaaccggtgagcaaatggtctccgagtcaagtagtggactggatgaaaggtaatgcccgctgcggggagggtgaggcggcactggggcgcggggcaccagtgcgaggttaggagggggcgcccgccgcgccagagcccgccaccgcggcttccactggcggatcgtcgtacgcgtcggggcgggggtcctccaggactggcaggggcctggggtccccggtctccttttgtctccagctagaggggcgcggagcggccagagagctagagggcagcgggcgccaccccgttggaggcaggaagtcgggaggcagaataccggcgcatcttgcgtactcccctctccccttactgcccccgggccaggaggacgtggcgacccttatctcccagctcagggtggactcccccaggacctgctcccctggtcgccctttcctggcccctttgttcctgggaaagctgacgccccctcggcggccgcccttgccaggtgccttccccagcgccaactctcccaagcaacttttagcccacataatggggtcaggacgcggccgcccccattcggagcctggcatccccccacacccagatttggctgaggatgcccagggtgggggtatgtgctactttgagggtgaggacatcatgcttcccctgggacagcatccttgctgctgtctctgggctgcctccagcgcatcccctcgcatcctttgccttctctgctttctccctttcaagccagtcgaggttttggacctcacggctttttattaagggctcaacgccagatgtaaggtgatgcgcattcaggtaccttcacatttcttccatcttgaaggttcccccttttgtccctggcgatttataataaccacagttatagacactcaccctcctaatcgcaaacgtgagctttttttctgatccctgggctttcctgtctcactacctccctctgttgtctgagttaaggggcttgtagaggactcccccacccaccaaccccttggatcctcaggcccaactcttccctaagattttgggaattgaagaggggatggatgggatggaatggaataaaggatgcgtggccacacttgggaaatgttagcgctttgctcgaggtcatacctgagcaaactctaggtagatcagtcagggaccaaaggcttattatcgctgaaaatgcccgttcctacgatgaaggagccccttcttgggcttacttaacagtcagactttctaagctccagataatttagaacgaaaggtgaggtgattgggagggattgagagtgacagggagaaactgattttttttgctcattcttttccccagcctttttggccgcttgcttattcttgtggatttttctttattttgctttccttttattcccttacttgcccctttattcctcatttactttgcttttcttttctaatatgtggaaactgctttgtaactgctaagcag

SEQ ID NO: 42003 - DNA, 1433 bp, Artificial sequence
  DNA replication origin
gggcgcagggcacgggaggtggtgattgaggaggtcgcggccccgcagagggcagctaggggccaggtcgccgccccagagcccgaggaagaagaggaagagttggaggaagaggaggaggaggaggagtgggagctcacccagaacgtggtggccttcgatgtgtacaatcaccgctggcgcagccttacgcagctacccacaccactgctggggcacagcgtgtgcaccgcgggcaacttcctgtttgtcctgggtggggagagcccttccggcagtgcatcctctcccctggccgacgactcgcgggtggtcacggcccaagtgcaccgttacgacccgcgcttccacgcttggacggaagtgcccgccatgcgggaagcgcgggcccacttctggtgcggcgcggtgggcgagaggctcctggccgtcgggggcctgggtgcgggcggtgaggtgctggcctcggtggagatgtacgacctgcgtcgggaccgctggacggcggctggggcactaccgcgggctctgcacggtcacgcgggggccgtcggggaccgcggtgttgtgtacatctcggggggcaaggcagggagaggcgagggcggagcgagcagcctccgggacttatacgtcctgggccctgaggagcaggtttggagcaagaaggcacccatgggcaccgcacgtttcgggcaccacatggcagtgctgcgcggcgctgtgtttgcttttctggggcgatacgagcccttctctgagatcgagcgctacgaccccggcgccgaccagtggactcggttgcggccgctgccctacgaccgcttctgctatgggctggccgtggtcgaggagacagcgttgctgctgggcggcctcaagtggcgggactcgcgccaggtgcctacccgcaacgtagtgggctacgacctcgacctggaccgttgggaggacatcggctgcgcgttgccctgggcctggagcggcctgcggtgcgcagtgctgcagctggccgagggtggggacgacgagagggagggagaggttggagaggcgctagatttggtgctgggctgaatgggtcagtccggtttccttccgcaatggaggagaaagtcgcgcttggttagtcttacagagcaacggatgggctttttctaagaaagggattctgggagcagagtggcttctgaaggttaacaggcaaacaaggccttgagcaaagagaaacatttctccttgagctgagaatgggagacagcggggcggggggtcaaatagaaggctatatgaatcaacttcagtgagctggtgaaagaaaatttttagaaaggctcacgcaaggctagagaaggactttcacaaataaaatatgaccttattttccctcttacagttaaagtgtttccctaggtgcaaaacagtgattactt

SEQ ID NO: 42004 - DNA, 1204 bp, Artificial sequence
  DNA replication origin
cacctgcacgccaggggcggcggtggctgcacaccatcacctggaagaaccgagttgccggtggactccgggggtgctggatgtccgacggcgcagatgcggcgtcccgggagtgcagggcgaggactctgacctctccggggtggacgaggaggacgggttctgcgggcacccgcgaaggccggggacaactggtcacggggcagtgggggggtgagcttgttccgcgcggaggatcaactcaaagcctaggggattagggaggggagggcgcaggtcagagcggcgggtcagaggcgtgattgggcgccgcacataacatgccggtagctcacagcgacaggaatagcgcgccgcctcggcctcccgggcgcgccccgccccgtgccctgactgctggccgcgaaccgagggcacgggcgcgggtgaagcggcccgggccaagggcttgactccagtgaccctactggccaccagtgtcaccagagggtcccaggaacccggttggggttgcgggagccggagttcactggagaggcacgagtcgccggagcccctcgacccggtagtgtcggcggaggggcgtccggctgggcaggaggagtgtagacctcccggtgtccctgtgtctgggaaagaagccctggctcaactttctgctttgaagaggccctaattaatccagcgggagcgaggattaagctgcgactttgcgcgctgacacccagtaggccgctgcgcgctgaagaggcactggcgggaaccacgcccgggcgaatcccaagctccccgccagcggcgctaggtaacgtgtccctcacctggactcacccttgagagattctgggcctactctgagcccttcctgaggcagctcgcgtctcccaggctggctcgtttcacctttgttcccacgcccgttcccagacctcacctgagttttcccttcctattcttggaccctgccccgacccatccctttgcagcatgaacaaggaaactgtggttgacttggattttctgccactcattgtacacttcctttggggaaaaaaaaaaaaagtcattccttccaatttctctccccgattttccacgctctgatctaattactggctgctacatcctcgatgttatcccgggataatgagccgtacggttgcaagctcggtaaagctggaatttcgtagggcccttcctcata

SEQ ID NO: 42005 - DNA, 1253 bp, Artificial sequence
  DNA replication origin
cctccgcccgaccgccggtgcacgcggccccgcagcgcgctgtgcgtggcagtccgggagagtgcggcgccgcgcgggccgcccgcattgttcggcccgcggcgcacgccacgcccgacccccgccccagcccgccaggcggcgggagcggcggggatggccacgcaggtggcggcgggcgccctcacctttggcgccgagcatgaagtcgagcgtgctgtgccgtgctgctgccatagtgaggcgaggccctgtgccatgcctgggggagcagccgcgggagactggggggccgcgcggcgtgtcaggctgcggccggctgggagtgtgctgcgcccggggaggccaggactaggaggtgggaggggccgccgggagcgacccggggcgcgggggcggggccggtcccgctccgggagggaggaagccgggacgcctccagccccgaacttggagcgccgggtgtgaggcctcgctaatggtggaaacgtgggcgccgtgctccccggcgtgcgtcaccaatggccgcgccctgctccaaggctcgcgcggccgctcccgccatccgttaggtcaccttaggtttaaacagcgcagcaggatttccggggggcccaccccttacgcctccccacacacctctccccaagccaaggcccctcttatttcctggcggagtcgggaaaatcaaatgatgagatccacccctgtagtctaagagtactgcctgccttttcttacaatgctgcagttaaacccattcggattattaccattattagcaagggtctgctttgcatttgaggactgaatagaaagcgcttgggcatttacgttatccacagtttcacgcaaaataaaatgagggagaagccagtaagaggacagcattgttgttaatattgaattaggaaactgcagactccggagttgcttgtctagcaggactcctccatcactggcgcctctattaatggcaatagcctttgcggggggcttatttttgacactggggttatggctgctgttcaacaaaatgatggcaaaggggagacagcatgagcgtctgaactaaaattattctttactgcactgacaatatccctgggcaaatgcctccatcatcgtgtcaggcttttgtgcctctcacggccacaggaattgctgtaatggttagacaaaatttaaatccatgaactcatgtacctccacaaaagcaacgaagaacctggatattaaactcacctcttccc

SEQ ID NO: 42006 - DNA, 1845 bp, Artificial sequence
  DNA replication origin
tcggcgccaaaggtgagggcgcccgccgccacctgcgtggccatccccgccgctcccgccgcctggcgggctggggcgggggtcgggcgtggcgtgcgccgcgggccgaacaatgcgggcggcccgcgcggcgccgcactctcccggactgccacgcacagcgcgctgcggggccgcgtgcaccggcggtcgggcggaggccgcgctcctgctggctccgcgctccgtcccggccgcagctcggggcctgcaggggcagtcccgggtgcccgccggccgcgccgcccttccgggccctggccgtccacccgcgctcccacgcgggctcgccgccttcgcgctcccgctcggggagtccccgggctgccgggcgcgggcggaccccccatgggacgagggttgcagggactgcggcggagcgaggcgtgacccgcgcggcgagcccgggctgggggcgtgcgccgagcggggctgcccgcgcgaccttttcctgttcttgcaggcgggtaaatttccctcttgggggcgggggtttcccctcgtagggagctggggctggggaaaggtctgcggacgcgcagcgcttgcagaattctcagccgactgcgtaggagacggatcccccggaaaggaactgggggacgggaaaaggaaacgattattattattgggggtggggaggcatgaggtctgggcgcgggaatcgtttacaccccgaatcggggagctatcaaaagacagccggccgggcgcggtggctcacgcctgtaatcctagcactttgggaggccgaggcgggcggatcacgaggtcaggagttcgagaccagcctagccaacatggtgaaaccccgtctcttctaaaaatacaaaaattagccgggcgtggtggcacgcgcctgtaatcccagctactcgggaggctgaggcaggacaatcgcttgaacctgggaggcggaggttgcagtgagccaagatcgcgccattgcactccagcctgggcgacagagcaagaccctgtctcaaaaaaaaaaaaaaaaaaaaaaaaaaaaaaaaaaaaaaacccgaccagaagagagaggcctgctaaagtcggaactgtgtgcaggaaatttgaaggggaaggataatttgcaggcttcttttctcggggtgcctctgtcgtggggggtgggagtcgcgggaaggatagaactgccctttctttttctggtggcttttaaacctgtgactgccgcagacttgaatctgcacttcccataggttccacttggagtgtctcgctcataccttgcttttcccactgttttcctcgaattggatagagcaggcttttctcttaccatttttaacactgttcctttctttctgaatttctgagtactcactttgcattttctcccgcaaatttaaaggatctccgaaggcacaagatctagtgaagactgaggatttggagcaacacctgggtttgagtctggcttcttcctgatgggctctgcgtgtggccttgggtttatgttaacctttctgagccttccctgtccattaaaaagaaaaaaaaaagtgtacacctcttcgggcttttactcttaagggggtagctgtggagcacactgtagggtttttaagcaatgtcagtgtatttaggtggtctgaagtgacttagagaaaacaaagcatgttaattttagttcccacatttcttaggtgaggatggtagggcatggagactgctagagatgaaatggtgcttgagtggtggagctgaagagccaaggtttcattaataaccctgccagccttagggctgaatggttaatgaaagctctagcatactgaattt

SEQ ID NO: 42007 - DNA, 1328 bp, Artificial sequence
  DNA replication origin
gtccctattcgtcttccttcagctttgattaatatgcatgtctatgctccgtagtgcgggccaccgcctcccgttcgacccctggcactgggagactgagctgtagcgaccaaaggcttgggatggggaggctgagcgctcagagcgcggagtctgaggacccctcgccgcgccctgtatcccacccccctggctggagagagcgcctcagtgacccagactccgagatcccgctcggtctgcgttgcagtggacagacccaggagcttggagcgcgaaatgaaacgcgctaaattgtacctgtgcgtggccgttcccgccgccgccgcaggtctatcccggggccgaagccggcgcccgccttctcggggaattctccggagggggagtgcgaggggaaccacggtgactgcctgctagctcacggctggcgcgcacacgcacacgcccaactttgccaagccgtcggcgccccgcgggctcccccgcgccccctgcggctcaacacgctcggagacctgtatctctcctgctctgagataaggttccctccactctcacaccttcgcatgtaggggaggagagggcggagtgaggcagagaagggggttaatgctactgactccctggccagcctttctcaaacactctacgcccgcaggggcgcccgcgccagccacgccgcaccaggtcccccagacctgctggtgacgacagagagaggaggaggaagagaaggcagggcgaagaaccgggagccggggagccccggagctcgggagcccgggagcccaggcgacggacagttccatcgactgaccgtcattatcagcacttttattactaaaggactgggtgggaggttggggggtgtgcaacagagctggccagccccaatccactctggagcgaccctaaattagagccacagagaaagattctccacggataccttttgagtggacgtgctccagacacacacccggaccccgtggtcccgccgaagctgcagtgttgggggtattttaaacggttcttatttggaaggaggcgtgatttccacgttcgagcgtcttcgctccccaccccctctcggcaccagccagtgcgcgccaccacctgagcctggcgagagccgggacgcacgcagtcttcagcctgctcctttaagcctctggagagactcggctctgagcgggtccgcccgacacccgccccctccccccactcctgagaactctttactttttgtttggaaaatcggggccatttctttatttatctctgggtcttcccggaggagggcagagaaggggagagcgagcttg

SEQ ID NO: 42008 - DNA, 906 bp, Artificial sequence
  DNA replication origin
gggagcgaagggaggggaggggactgggtgtagcctggaattctccgtcctcgtgttcctgggcgggcgcgcagagtctcctggcgatagcgccgtcgccgctccccgcgccaccccgtcgttggccttgggggtcgggtgagtggggtcatgacgagccgcgggggctgccccgggccccgcccgcgctgagaggggacgcggccgcgcggcgcggagcccccctggcggggaggccgcggggggtggggagggcgcacgcggtagggcggagtgggggcggcgcagaggccgccaagctggggggctctccgggagggcgcggccgcgggcaggagggcgtgtctccggctcgaggggaccctcccgaggcgcggcgcgggactccccgatggtggtgccgcggctccgggagagctcagggtctcgccgccgccgccgtcgccgccgccgcgggcgccgctgccgccgccgccgccgccgccgccgccgccgcccgaacccgcgccgagcgtgcgcctcgccctcctcccgcgcccgctctgctctaggatgctgcggcaggttctgcacaggggcttgaggacgtgtttctcccggctcggccacttcattgccagtcaccctgtcttcttcgcctcggcgccggtgctcatctccatcctgctcggcgccagcttcagccgctaccaggtcgaggagagcgtggagcacctgctggcgccccagcacagcctggccaagatcgagcgcaacctcgttaacagcctcttcccggtcaaccgctccaagcaccgtctctactcggacctgcagacccccgggcgctacggccgggtcatcgtcacctccttccagaaagccaacatgctggaccagcatcacaccgacctgatcttaaaggtg

SEQ ID NO: 42009 - DNA, 1732 bp, Artificial sequence
  DNA replication origin
gtcgaggagagcgtggagcacctgctggcgccccagcacagcctggccaagatcgagcgcaacctcgttaacagcctcttcccggtcaaccgctccaagcaccgtctctactcggacctgcagacccccgggcgctacggccgggtcatcgtcacctccttccagaaagccaacatgctggaccagcatcacaccgacctgatcttaaaggtgagaggggacgggtgcgggcagactccgccagcgccgcggccgcggtcgggctggctctgcgctggggtcccggctgagagcgccacctctcctagcccaggcagctgccgcagggactctcctgcaccgcgcgccccagggcggccgactggagcctcccagcctcctggacaaggagcgtcggggtccgggtccggccctgcccgcgtcgcctctaccgccaccccgcagctgctgcaacagttggggcggcggcggccacagtgctgtggtcggtgcgcttgttttggtcgcagtgggcttgggggtggggaggctttggggtaactgggccagcaaggagcagaacgagagaagacattctggaaagtcctactacttgagaacaaaatactatgcttggaggggattccgagatacccctccctgtcctcagttttgtttctccctttttctggccccccggagtgtttggggaacggttgttggtgtgggatgttgggaaaggacaaaagaatgtgaggcgggatggtgatgaagatgcctcccacccacccagaaagaagtgtggtctctggcgaggacagggggctgccctgctgctctcttctccggagcgaggtagccatctctatcttctagggtatgaaattatgtttgtaattcgcagttccttcgtctttcacagtagctcctcaagaaatgccaaaactttgggaaaagagggaaccgatcaatccacttttatttgggtgcatctgagcatgggggtgaggggcagagcccgaagggtgagaacagaagccaggctgtgtgaccccgagaagagcacaggaaaccgagcagctggttagagggtgacactcgcagaaaccggttgtgccatcagcttgaggtgggaatttgatgtggaaagtgaggttaatggtggtaactttcaggaacttcctaagaaaagcagaggagtgaggactagagatggaaaagtggagacctcgggagagaaaagtaaaaataggtgagaatgttccatctgaatccctgatggggactgtggggcttgtttacttaaggttctcctttggggagggcagacaagaaccagtcccagctgggactctggtgcagagggatggaaggtgatcgttttgtgtgagtctctagtccagatctggtactagaggctggttagatttctagtctacttatcccaaggggagtctgccgggaaacctggggaactctttcctcttcttttcctctacaggtaatagtttatccctagagacaagctaattttcattattttcctatgtccgtttgttgacatgttatcaattagcaattagtaatgaggggaatctgactaggggctcaatggaattaggatcttcccacatggagtggctcatgatatttttaatggcacacatcacacatttactcatcacagaaccttaataacattaatcccgagatgtttgtttttctcatgattagacttccagcatcaaagtgg

SEQ ID NO: 42010 - DNA, 1417 bp, Artificial sequence
  DNA replication origin
gctatgatggtagtagtaggctgggtgggcctgtcctcatgtatccaagaggagtgcacagatgccaacagtagtggaaggagcatgcccctaggtggcatgtttgggtactgaagggggtggtaccaggctgggcaggcctgccttcaggccctccccagtggtccatatgggcacaggctgtggtgggcagggcagggtgattccctaggctccccagcagtgtgcttgggtggtggcacagcagtggcagcgagcggggatagtccatcttcagggtatgtgcaaatgcactgtggccctgctgcttgtggggaggatgggtttgctgtcagtggcagcagctgtaggcaggcagctcttaggctctggggagcctgtgcttcagctctggtagtggctgccatggtggtggcagcagcagcagctgggggagccagtcctcagggtacatgcaagtgtgtgttggccctgttgctgatggcggaggggggaagagggggccaagtcactgtcaatggtacctgcttttgtccttagtggtggcagcagcaatggctgctttgggggagaatctggcctcagggtgcatttaattgtcctgcagtcctgctggtgatgggagcagggttgctgtcaatggctgtggctccaggcaggcgagtttcaggctctgaggagcatgtgacttggctccctttgtctttggggcagcctcctgggtacactgcactgcccattcctggggtgcagggcagtgtgtgtgccagagtgctggggagcctgctgctttgctgtgtctagctggtgtcatattgctgcagacctctgggtggatgtgaggggatgttagtggggctccagggatgtacagatgcaggggctgttgggtcccggggcagaatgcagtatggtgggggttgggctctcaaaatggtgtcatgctacagctgcttaggacttggggagtgtgtgggacccagtgtgagcaacttctctagagcaatgccatcgcatggtctccaggcagctccccatgctagtcttagggcctgtgagggttgaggggctttattgtggctagcattataggagtctgtagagggaatgtggaccactggggatctctcacttaccctttccccacactggggagcctctgggctcccatctgatcctggctgagctgatttgtgtgcctctcctctccttccatgccttggatatttcctttcacttctctgttgaattccagtgttctctcttagatgctctattcatagtgtagctggattactttttatttcaccttgccatgcttgttggctgtgggcagttatggagcattgtgataatgatggtgactataaggtgataactaataatgtgttcctggtgtggccaggatgtctgaggg

SEQ ID NO: 42011 - DNA, 1292 bp, Artificial sequence
  DNA replication origin
attgatggcagcagtggcctgtctggagcggctactgtgaagatgccagctgtagtgtgggaggcacggtgggggctgcgtgctccgtggagctggccggagccccaccctcttctgagttggccgggtgggagccccacgctttccggcacagctgcaaccacccagccacagctgcagacctggacatccctgtgctctcgggggctgggaagaccccctgacccgcaggcttggaagtgcctgctcctgctgcctggcctctccttgctcctggagcccactctggggtggagcaaagttgtggctgaggccaagcgctgtctagacccagctgggtgtgcgtgcgcctggggcgccgctgacatgccagccccctgccaccctggccccctctaggctttgggcactgagaagcacaggagagaggctggcggcgtggggtgggggagctgagggcactcggtgcgggctgccggtactcctctgcaggaacagcctgggcgctgtggatgacatgattgatggtggcaggaggcagacaggctcctgggcggaaagaggtgggtccccggtaaagccccaccatcaagccagggaggcctgaagcccaggggctaggctgtcagtcccgggtgaagtctgtggcccggagtgagaacttatggtgatttttccgggtcagcccatggccacccatgggccaatcagcatgcacttcctcccttctgagcctagccagactcacacagacgctgggactaccagctgtgggaaggagctacccaattcaggtctcctcgactcatcaagacaacctgcctgaagaagggagctacccactctgggtctcttctccactgagagctggacacttactgggacaacctgcctgcggaaaggagctacccacttcaagtttcccgagagctgttctgtcactcgataaggctcctctccgccttgctcaccctctagttgtccgcgtacctcattcttcctggatgtgggacgagaactcaggacccactgaatggcgggactgaaagagcagtaacacaaacagggctgaaacacgccctcctcccgtccccacacccccgcgacttgccatgttgcgggtgatgtgaaggagagaagtgctgtggcccttcagggagcacagacctaggggctccctgagccagggctgtgacaccctctttggggctctgcggtttctggtatcttcaaacttccgggcaccactgcattccccttgtccagacacaggtgcccacagcagaagccgc

SEQ ID NO: 42012 - DNA, 1031 bp, Artificial sequence
  DNA replication origin
ggcgaaaagcgcgagtagcgctcgatctgcttgggcaccggctgcttcagcagccaccggaacagccgcatcctcgcccgggcggcgcacagacccgcctagacgcccgggtggccgcaagggctggcgcagccaagccgcacggatagggcacgtttgcgaagcgcgcaccccggcctcgatctcggcctcggcgccgccggtgcagccgccgcagcagcagcagcagctccaggacagcggcgggccgcccgcggcttccctaggctccgcctcgctgggcggagtcggttgctgcacgtacgcggcgcgcgaggggaggcgaggagcgcgaggggcacgcggccgcgcgcgccctccactgattggccgccgctgcctctgtgacgtttgtgttttgtccgggcgcggcgccagagacccccctccctggctcatgggactcagcccagcccagcaagtgcagccgctttcagctccgcctctggctgggttctccgctgccgaaaggtagccgaggtgcccgcggaccgggaagaggccaggagcccggaatccgatcctccgcgctgctcaagacccttctcaaccgcaggcgccttttccgggaggaggacttgccgttcgctgcatcctgacacttagattttacagcctaactagactgactctgtttcgtggcccagccccacccccacctccctgcctgactcccaagagaacacctttggaacacctttggactggattgttagttcgctgattctctttttcgtggttcctttcccctccttcccgcacaagattaagtgactgattgcatttcatgtccccccaccaccaccgttggacgggatccattgtgaggtcaagggtcaataacaccccctacctccccaatgccagtggacaggataattgcaaggtcactgactctgtttcatacccccccaccccactactaccattggaaaggatcaaatgtaaggtcactggcactttctttcataccccttctctacaccaccacc

SEQ ID NO: 42013 - DNA, 927 bp, Artificial sequence
  DNA replication origin
cagccgtgctgtccgggagggaggtgggggggtcagccccccgcccagccagccgccccatccgggagggaggtgggggggtcagccccccgcctggccagccgtgccgtccgggagggaggtgggggggtcagccccccgcccggccagccgccctgtccgggagggaggtgggggggtcagcccccctgcccggccagccgccccgtccgggaggtgaggggcgcctctgcccggccgcccctactgggaagtgaggagcccctctgcccggccagccgccccgtccgggagggaggtgggggtgtcagccccccgcccggccagccgccccgtctgggagggaggtggggggggtcagcccccctgcccggccagccgccccgtccgggaggtgaggggcgcctctgcccggccgcccctactgggaagtgaggagcccctctgcccggccaccaccccgtctgggaggtgtgcccaacagctcattgagaacgggccaggatgacaatggcagctttgtggaatagaaaggcgggaaaggtggggaaaagattgagaaatcggatggttgccgtgtctgtgtagaaagtagaagacatgggagacttttcattttgttctgcactaagaaaaattcctctgccttgggatcctgttgatctgtgaccttacccccaaccctgtgctctctgaaacatgtgctgtgtccactcagggttaaatggattaagggcggtgcaagatgtgctttgttaaacagatgcttgaaggcagcatgctcgttaagagtcatcaccaatccctaatctcaagtaatcagggacacaaacactgcggaaggccgcagggtcctctgcctaggaaaaccagagacctttgttcacttgtttatctgctgaccttccctccactattgtcccatga

SEQ ID NO: 42014 - DNA, 1238 bp, Artificial sequence
  DNA replication origin
ggacctttggggagaggggcaggcgggaggggtgcgggggtgccgcggcgtgactaccgcgattgcggagctggggccggcagccccgccacgccgccgccgccgccggccagtcggtcgccgcggggggcgcgggtgcctctctgggctggggccgtcgggctccgcgcgcgccctggaggaggggggccgggtcccctcgcggcccagggcgcaagtgtgcgcggccgaggggagggtgcagggttgggcagaggtcagcggcctgccaggcgctgtgcccacctgggtgtgggcagcccgcccggcagcttcggcgctggagcccgcacgtcccgggctcgcctcctatcctgcaccccccttcacccccaacttcaatcccctcctctccaaccccgggtccagacgcccggagaccccgcccgcccgaaacgttggagagctcacggaaccggctcgccggctggtggccgcttctggcacttgggtcgtcgggtggatcaccgccacccaacgctagccctggactcacgggggcggcactcgcaagaagggccccggcctggggtatggggagcggccgccaactaccattcctaccacacactccgttcccgggtttagtaggcccggtgggaactttctagggccttactggaggtctgagagtctaaaaccctcagactccacatccacaggctctccctgagtgaaagccgctttcctggggtggtcagggccgctggagagtttggggaggagacgggactgctggagaagactgagggaaaggagttgggtgtgtgtgtgtgtgtgtgtgtctgtgtgtgtgtgtgtgtgttgtggtcgatatcaattttgcgtcgattttgcctttttgtttagtagggcttcttttcccccctctaggctgctagttggatggtatacgagaaacagtaccattcttcctgttaatgaactcttttttaagtcattttttctcatttgacccttccatggaacagaagcaaattgcgtgaaattacctccaaggattacatttattactggccaatgagaacccctcgccttgttttacaaactcttaatcctatgtcattctgatgctgcaaacaagcccagtcctgggcctcctattctttcaactttccccagctggagggacctcattctgcacttaatattccccataaatatcacacgctaaagaccccctgacttccagcaagtcc

SEQ ID NO: 42015 - DNA, 894 bp, Artificial sequence
  DNA replication origin
tcccgtagattcttactgtgttgtagatacggtagggttcctagacaaatatttatgtactcaagccctttatttaacttattaactgtagaggcttccgaaaccttcaagataaaggcaatggtacagtacttttgtgtaatgtgtaattgttaccacttttccttgctatctagtggagaagtgtcacgctcaaaataaaaaaattatatgtttaacaaaacgaagtgtgaatgctccatacaggcgctgaggggacagtagaagcccccacccccaccccccgggagtcaagggtgggctccagcgtccaggcatctcctgggattatctgcacacgcgttttcctggcagaggcccctggtttgaatccgatcctcaaagggaaccggatttcctacgaaggttaaggacgccgccgcggtactttccacgcgcacctgggctctcccgggtcgtgtcacagcgggagctgggggtcccgggccacggaggtggggtgggttccaggatgggtgggtggatggtgggcgttgttgacggtggagtcagaaatttgaagcaagcgggagtcttggctcggaaggcgaagggagctgttggaaagtgccacgtagccaggaagtgaagtgcgcagtccgagatgacaggtaatggcgagagcgagaagcccaggcgctcccttccgagggggcgggctccacggcatgttcgcagggaggagggagtgtgtgtgtgtattgtgttgtgtgtgcgtgtgtgtgtgagagagagagagagggagggagagagagagaaacatgcgggagcagtagtgatggaaaggcagcgaggggtatccaaatggcagatcttaactcgacaaatgtcattacatcacttatccaggcattg

SEQ ID NO: 42016 - DNA, 1580 bp, Artificial sequence
  DNA replication origin
gcggggaggcccctccgccgccaccgccaaccgcgcggcccggggaacggccggacggcgcaggggccgccgcggcagccgcggccgcggccgccgcggcctgggacacgctcaagatcagccaggcgccgcaggtgagcatcagccgcagcaagtcgtaccgcgagaacggggcgcccttcgtgccgccgccgcccgcgctggacgagctgggcggcccggggggcgtcacgcacccggaggagcgcctcggcgtggccggcggcccgggcagcgccccggctgcgggtggtggcaccggcaccgaggacgacgaggaggagctgctggaggacgaagaagatgaggacgaggaagaggaactgctggaggacgacgaggaggagctgctggaggacgacgcccgcgcgctgctcaaggagccccggcgctgtcctgtggccgccactggcgccgtggccgcagcagctgccgctgcagtggccacagagggcggggagctgtcacccaaggaggagctgctgctgcacccggaagacgctgagggcaaggacggcgaggacagcgtgtgcctctctgcgggcagcgactcggaggaggggctgctgaaacgcaaacagaggcgctaccgcaccacgttcaccagctaccagctggaggaactggagcgggccttccagaagacgcactacccggacgtcttcaccaggtatgcgcgtagggtggtcgcggtcgcagcggcagagagcgcacgcgggccccagggagggacagcgggctggcaggggccccggcctcggggcggacgcttggctcctggactctgtggaagagcgccctcccaacacacccacccttgctcacccaaactacccactcccccgacccccaccccggttcgggctttaagtttaggctggaatggtttatcttcttcccaaggtcgttgcagtttaatgttttcaaattacaagttttagttagagagaggaaaagaaacagcctctccaaagagcgcccgaaagcgccaccttggagacgcgcgcacagcagagggcacagacacaaggcctccggagctgcggtcccggctaggtccccggcgaggctcaggaagcgctgtccgcagacagagcaaagcaggggctatttttggtcgctgtgctgtgcgctcgccacccccgcctggtgccccaggggcctggtgggtatcagttacgcagttcgcagtgaagctggagcccgtgccagcggagaaggcctttaaaaagatccgagttctgtcgtttcaggactcctgaaataaccaaaggaagtcagaactgggcagtgtttggtgtctgaacacctgaggggccccagccagaatctccccttctactctctgtcctctcccgacacacatattaaacccaccgtgcgtttaatgtaaacgggtttaccgggtggacaatgattgctggaagcctggcagggagtagacaaagcagttgggggaattttctctttggatcagtgtccaagccgggtgttcgacctggtcacgctccacctcccacttgtttttctgggaaacatgt

SEQ ID NO: 42017 - DNA, 976 bp, Artificial sequence
  DNA replication origin
aacaaatgtccttttaccccgaacctgttatcctcaagtttcgcctcgagcttgctgcagaggtgtcgcagggaaaggaaagaactgttggtttcttttaaaatccaaaaaccagcggtccggccatagcgcaatttggatggcaggagcagacggttgagaagggggcatttaaataaaactgacttttttcttttctttttttagcctgcagtggcacctatgccaggcgcttcctcaaaaggaaggagcggcctgcgcctgctgcactcccactccctctctgccccagacctttcccagaacatttttgccaggatgatttttctttgcctttttgtgcaagaagcccccccaccctctcccgctgtgggctgttggggcgcggcctgcacttggggccacagggccgctttcccccaccccgccccgcagcggtcgccttcagggctgcacccctcttgccaacccttgccctcatggtggagcagcgggcagaggtcatgcgcaaagttttcaggatagtggtgattttcttttaaagttgtagaatgttttcggattttcctctgccccgacgtgggaagggaaataaaaatgagagagtaggaaaggggaaagagaaaggaataaagaagaaagaaggagagaggggagagaaagcctgcaaaaagagaaagaaagggggagagaaggagaaagagaggtgaggaaaagaagggagggggagaaagaaaaagaaaaaaggtaaggagagaaaaggaagggagagaggggcaagaggaatagataagggaaggaagataggaaataaaagggggagagtgagagagggaacggaaagaagggagaggaaaggggaaaaaagaaggaacccagagaaagggagaaggagagaaagaaagaaaaagaaaaagcaagaaaagtggagaaagaggccaaggcgtcgaagtctggtggtgcgcggtccccgcac

SEQ ID NO: 42018 - DNA, 1206 bp, Artificial sequence
  DNA replication origin
gcggagaactggggcactcacggcctaggggcctcgtggggccgctgaggccgggcctgttcggcaccgacggcgtcacctcctcttctaaccggtcaccccgggcagggccctcctcagggcaccgcttgcccgaggcggcctcggtttccctgtctggaaggaggtgcaggagcccgggggcaggggagctccgggcgccctgctggggccgcgctacttgggggcgttgcggcggcggccccgacgccccttgtcaaatcgcctccagggtctcggggacccggtgaacaaagccaagacccgacccccggtggccccaatggcgcgggtgaatgaggacgctggacttaggggcgcccgcgagagggcgcaggctgggagggcctgggaggagaggcgccgggctccgcgtggggctcgtgaccgaggggcccccaggacgcacagactcgatcgcgcctcgaaaatgaccgtggtggtagcaggtgcaggcggagagtggaggcagaaggagtgggaggaggagagcaaatacatctactcagatgctaatgcacagaaagtgagccttagctgttttttctttggagattaaatgaaatctcaaacggatttgtttttgagtaggaaattgtagatttctcacaatcgcatgaaattttgtgttgcacgcctctaatcaacatcacattctttgcccccactttaggctttgcaggtcttagtacagttctggtacccaggaacatctttcccgaaccagaaaattgcactgtggctgtgggagtgtagtaggtacttttatttgggcaaatggcacttgatgtttcatcctcatgaggtgggcgctgattgatcttttcccttatttaaccaggcctcattcttttccctcaattctcccattactgctgttggggccatttcattgttcattactcctacggtttaaggcttgcaagggactaaaaagaaattaaaagcaacgtattttgcttagagaatcccagaaaggctggaaagaaaggcgattgaaacccacggttcaagtgaagtttagacataggagtgatttttacatatttctttttcatggataatagggagttggcgttatctgtcactgtacgttctacctaataaatagctgcaagactataatctaacaggtgtaaaatttcccttttctgacaaatgaagaga

SEQ ID NO: 42019 - DNA, 1345 bp, Artificial sequence
  DNA replication origin
gattaacagcatcccaaggcagaagaatttttcttagtacagaacaaaatggagtctcctatgtctacttctttctacacagacacagcaacaatctgatctctctttcttttccccacattcccccttttctactcgacaaaaccgccatcgtcatcatggcccgttcccaatgagctgctgggtacacctcccagacggggtggcggccgggcagaggggctcctcacttcccagacagggcggccgggcagaggcgccccccacctcccggacggggcggcggccaagcggaggcgccccccacctcccggacggggcagctgccgggcggggtctgccccccacctccctcccggactggacagctggccgggcgggggctgccccccacctcctggacggggcggctgccgggcggagacgctcctcacttcccagacggggcggctgccaggcggaggggctcctcacttctcagatggggtggccgggcagagacgctcctcacctcccagacggggtggcggtcgggcagagacactcctcagatcccagatggggtcgtggccgggcagaggcgctcctcacatcccagatggggtggcggggcagaggcgctccccacatctcagacgatgggcggccgggcagagatgctcctcacttcctagacgggatggcggccgggaagaggcgctcctcacttcccagactgggcggccgggcagaggggctcctcacatcccagacgatgggcagccaggcagagacgctcctcatttcccagacggggtggcggatgggcagaggctgcaatctcggcactttgggaggccaaggcaggcggctgggaggtggaggttgtagcgagccgagatcaagccactgcactccagcctgggcaagattgagcactgagtgagcgagactccgtctgcaatcccggcacctcgggaggccgaggcaggcagatcactcgcagtcaggagctggagaccagcccggccaacacggcgaaaccccgtctccaccaaaaaatacaaaaaccagtcaggcgtggcggcgcgtgcctgcaatcccaggcactcggcaggctgaggcaggagaatcaggcagggaggttgcagtgagctgaaatggtggcagtacagtccagcctcggctcggcatcagaggcagaccgtggaaagtgggagacggagacggagatggagagagggggagggggagagggagagggcaggatcaaagtgttaaatgtagggatggtactccagggactctttattggaggattcaaaataaaactgtgctgatttcttaattgctggcaatggcaatg

SEQ ID NO: 42020 - DNA, 1788 bp, Artificial sequence
  DNA replication origin
gtgcttttagcattgtttagctgtcaactttgagatggtatcagagataggtttctttctctcctttacagcagttttagaaaacaattcctcaaattcatgacaatctatagatggctcttcaattttttttcccaaataagtgaagcactggagtctcttttactatgtagttgaattcttgtctagtaaagaggcttcactggtcgacaaggctctatgggctgcttcctactccctttgtcctgattcatccctaatccaaacaagccatttgtcaatggaggaggaagaaacccacacacctgtggtgttagtaaaatgctcctcccaacttgtgggaggagtggagggcctgatggaagaagcagagtgggtggggggattcctctctcaggtgaaatgggagggggagctggagcaggtggaatccccatacctggcaagggaagaggtgggggaatcccagcaccaggtagagggggcagaggaggtattcccacttcaggtagagggggtggagggggtattcccactccaggtagagggggtagagtgggtggaggatgtattcccactctgggtagagggggcggaggaggtattcctgctccaggaagttggggtggaggaggtattcctgcttcaggtagagggggtggaaggggtattcccactccgggtacagggggcagagagggtattccagctccgggaagaaggggaggaggcggtatgcccactctggggagtgggggcggggaggtattcccactctgggtagagggggcagaggaggtattcccactctgggtagaggagggggaggggatggcagcatttctgtacctagcagaggaggaggtaggggaatggctgtactgggcagagtaagcactgtcatgccagggagaaggggaggtgggggaggcactatgcgcaggccaggcatggagctggaagactctgtgcaaggcagaggtggtggggatgggttgttacagctgttttcaaagtagagaaaacagagtgttcgtggctggtgtgaaactcagtagagagagaagtatggggcagctgtgacccaggctgtccttgaccatcagaccacagaagggatgggggtggtggaggctgtgagatgctctgcgtgggctgatggctgtcgagctggactgatacttgctttggagacacagtcaatgaaatctctgaacaaaattttgtctgaggtccactttcagccccagggggggcatggaggaccccccagcagtgcatccccaggaggcagtgtcagtaacccgacctattctgtccaggaagcctgtatcgattttgcctctaaaaaatggataggggcgaagaaggggccctgcagtggtagtgtcctccagaggggaactctcttggccagccaaagggtcagtgggtcggtcccggagtccttggtagaagttgttagttgagctcatttggggttccatttgtaagaccatctgtagctcgatggcatcgatcctggaggagacaaatttgacaaggaggttaaaagagccccaaggcaagtaatagcaagatggctgtcacaggacctagaaaggggagaagccatgtcgcccaactccagaggttggtataagagtttgaatggcattgtctgatttcagaagccttttcctgtaaacgctgggcagcatctcttactatgcctgactggttagtgtaaaaacaacactctttctctaagaaggtgcagagttctcctttctcagtagtgaggaggtc

SEQ ID NO: 42021 - DNA, 1595 bp, Artificial sequence
  DNA replication origin
cggcggcggggggggggcgggcgggggggggggcgggcggggcggggggggggccggcgggggggtggtggttggggcgggggcgggcggggttggggggggctggcggggttggggggggctggcggggttggagggggctggcggggttgggggggtgggagaggctcaggaatggcgggctgcaggtcctgagccctgccccacgggaaggaagctaaggcctggcgagaaattgagcacagcaactactggcccaggtgctaagcccctcactgcctgggccggggggcctgccagctgctctgagtgccgggcccgccaagctcatgcccaccgggaacttgcgctgtcccgcaagcaccacgtgcagccctggttcccgcccaggcctctccctccacacctccctgcaagctgagagagccggctccggccttggccagcccagaaaggggctcccacagtgcagcggtgggctgaagggctcctcaagtgccaccaaagtgggagcccaggcagaggaggcaccaagagccagcgagggctgtgagggctgccagcatgctgtcacctctcaataggactccttcccctgctgcccgaggcagacaccgtggtccaataccctcatctccttgagaggttaaaggtggaaattccagctacccctacttaggatcacccaggcttgagagcagaggctgggctctgtggggaccggtccgctatggcagaaagggagttttatggaactcaccctttattgactcctggagggttctaagacccttatctcaggtggcttgatgccaacaccttagtccaatgctatcacttccctgactctccagaagaataatgcagagtgcgatacccaagaggatccctgcccggggttttttcggcttaaggcagaggctggacggcatggcgttctttcttttgcggtaggggttcccctcaaacattattcagtgtctttgccttacctcctggcagggcctggatgccttcctctgctgaccagataccaaccgcctcactgcaaggcctcacctcccacggacggcagaagcggaagtgtgtgtgacatccgggcatcctgcccacggaccgaagggctgccagcaagggcggtgtggcgtgactttctgtggcgccccctttgttatggagtagtagtaatattaagtcctcctctaggaagtatatccatgttttcgctcctaattcattgattaaaggccccttagggaaataataaccctttattgactactggagggttctaagaccccaatctctggtggcttgatgccagcaccttagcccaatgctatcacttccctgactctccagaagaataatgcagagtgcgatacctaagaggatccctgcccggggcttttgcggcttaaggccgaggccggacggcatggcgttctttcttttgtggtagtgggtcccctcaaatgctattcagtgtctttgccttacctcctggcggggcctggatgcctttctctgctgaccagataccaatcgcctcactgcaaggcctcacctcccacggacggcagaagcggaagtgt

SEQ ID NO: 42022 - DNA, 1469 bp, Artificial sequence
  DNA replication origin
gccctccttttgcttacctgaaacctatcccctccaagcaaggccttcacatccctgacattcctgataaagatattagggaggcctcagatgtatcttccccagggacccctatcaggaaagacagcactcttagggctctatgaatcctcttttacttctggaaattcaggttcctcctaatgactcctcaccttgacagcctcataccttcccctctgaggacttgaggcctataccaatcagagaaaggccctcttccacttgatatcccagagtatgcagttggagggagggggtggggtgcgttcagaatgacaaatctgcccagggcttcccaaggctgaccacagaggcagtgcctagccccatcagtcctcactttgacttccataagggcctgagtcacctccctctaatgacctgccactgactgccctatcaaatctatgtcctcatcaccctgtgaccactaaggataaattgagggataccttagccgagagtcatgctgaaaggctaccaaggctcatagtagtggtactctgttgggtcccctttgttctgggaagaaaatcccttcagtctttgctctgggttctaaactaaactcctggttacccccaaagactccttccactgctgacctcaatgcgctagccttagtttgtacccttccccacgaccaccaccagaatatgaagcgaggggtcacctgggccttacagccacgctagggacctcccagaacttacaggaagggcaggattctctaaggccgccatctttatgggaagctagtttcccccacagcccacactggggcatttcattaacacgtggcagagcatagtgtgtccggaattggtgggttcttggtctcaaaagctgcggaccctcgtggtgagtgttacagttcttaaaggtggcgtgtccggagtttgttccttctaatgttcggatgtgttcggagcttcttccttctggtgggttcgtggtctcactggctcaggagtgaagctgcagaccttcgctcgtggtgttacagctcataaaggcagtgtggacccaaagagggagcagcagcaagatttattgtaaagagtgaaagaacaaagcttccacagtttggaaggggaccccagcgggttgccaaggctggctcgggcagcctacttttattctgttatctggccccacccacatcctgctgatttgtccattttacagagagctgagtggtctgatctgacagggtgctgattggtgcatttacaatccctgagctagacacaaaggttcttcacctccccactagattagctagatacagagtgttgacacaagggttctccaaatccccaccagagtagctggatacagagtgtccattggtgtattcacaaaccttgagctagacacagggtgctgattggtgtgtttacaaaccttgagctagatacagagtg

SEQ ID NO: 42023 - DNA, 1002 bp, Artificial sequence
  DNA replication origin
ggagggaggtgggggggtcagccccccgcccggccagccacccagtccgggaggtgaggggcgcctctgcccggccgcccctactgggaagtgaggagcccctctgcccggccagccgccccgtctgggagggaggtgggggggtcagccccccgcctggccagccgccccatcctggagggaggtggggggatcagccccccgcctggccagccgccccgtccgggaggtgaggggcgcctctgcccggccgcccctactgggaagtgaggagcccctctgcccggccagccgccccgtccgggagggaggtgggggggtcagccccccgcccggccagccgccctatccaggaggtgaggggcgcctctgcccggccgcccctactgggaagtgaggagcccctctgcctggccaaccgccccgtccgggaggatggtggggggggtcagccccccgcccggccagctgccccatccgggaggtgaggggcgcttctgcccggccgcccctactgggaagtgaggagcccctctgcccggccacgaccccgtctgggaggtgtgcccagcggctcattggggatgggccatgatgacaatggcggttttgtggaatagaaaggcgggaagggtggggaaaaaaattgagaaatcggatggttgccgggtctgtgtggatagaagtagacatgggagacttttcattttgttctgtactaagaaaaattcttctgccttgggatcctgttgatctgtgaccttacccccaaccctgtgctctctgaaacatgtgctgtgtccactcagggttaaatggattaagggcggtgcaagatgtgctttgttaaacagatgcttgaaggcagcatgctcgttaagagtcatcaccactccctaatcttaagtacccagggacacaaacactgcggaaggccgcagggtcctctgcctaggaaaaccagagacctttgctcacttgtttatctgctgaccttccctc

SEQ ID NO: 42024 - DNA, 1253 bp, Artificial sequence
  DNA replication origin
ccgggcggggggctgatccccccacctccctcccggactgggcggctggccgggcggggggctgaccgccccacctccctcccggacggggcggctggccgggcagaggggtcctcacttcctagtaggggcggccgggcagaggcgcccctcacctcccggacggggcggccggccgggcggggggctgacccccccacctccctcccggacggggcggctggccgggcagaggggctcctcacttcccagtaggggaggccgggcagaggcgcccctcacctcccggactgggtggctggccgggcggggggctgacccccccacctccctcctggacggggcgactggccgggcagaggggctcctcacttcccagtaggggcggccgggcagaggagcccctcacctcccggacggggcggctggccgggcggggggctgaccccccccacctccctcccggacggggtggctgccgggcggagacgctcctcacttcccagacggggtggctgccggacggaggggctcctcacttctcagacggggcggttgccaggcagagggtttcctcacttctcagacggggcggccgggcagagacgctcctcacctcccagacagggttgcggcccagcagaggcgctcctcacatcccagacagggcggcggggcagaggtgctccccacatctcagacgatgggcggccgggcagagacgctcctcacttcctagatgggatggcggccgggcagagacgctcctcactttccagactgtgcagccaggcagagaggctcctcatatcccagacgatggggggccaggcagagacgctcctcacttcccagacgggttggcggctgggcagaggctgcaatctcggcactttggggggccaatgcaggcggctgggaggtggaggttgtagcgagccgagatcacgccactgcactccagcctgggcaccattgagcactgagtgaacgagactccgtctgcaatcccggcacctcgggaggccgaggctggcggatcactcgcggttaggagctggagaccagcccggccaacacagcaaaaccccgtctccaccaaaaaaaaaacgaaaaccagtcaggcgtggcgtcgcaggcactcggcaggctgaggcaggagaatcaggcagggaggttgcagtgagccgagatggcagcagtaccgtccagctttggctcggcatcagagggagaccgtggagggagacgga

SEQ ID NO: 42025 - DNA, 974 bp, Artificial sequence
  DNA replication origin
caggggtgaattctcaggactggtcggcagtcaaggtgaggaccctgagtgtaaactgaagagaccacccccacctgtaacaaagagggccccactaagtcccgcttctgcatttggtcctgagaggctccggtaaagccgtccggcaatgttccacctggaaagttccagggcaggggaagggtggggggaggggcagtcgcgggggaaggaggtttggacgcagggaataggcctcattctgcacgtagggtgggtgtaggccctaactgaaatcaatttgagggccctaaatgtggactgaagagaacatctcctacccttaacaaaggtggcctcactaagtctcgtccctgaagacggctctgggaggccccagcaaagctgtgcctggaaagtctcagggaggggagggccttgaacctaggaagcagccctgcttctgctcatatggcatcaacctaaaacctaactggggttaaggtgaggactctgagtattaatgagcggacctctacccaaaagaggagtcatgctgggcagttcccaggccgaggtgacactgggttttagatggtcccaggctgacatgacaaatgcagagcaacctgacttcctctcccgggactaaagaagttgagggctacatccaagacccacatctgctgccagcaataggaaggtcagggcaaagctagcaagctgagatgctctctagtttcctctggaggtggtctcagggaggtgagggtcttggtgtaatggggtaggtctaatgcgacagagaggcccagtctctaacaggaagcaaggatgtgacactgagtgatgaggaggggactccaaccagaaagaagtgccatatagagcccactcttgttgtcagaccagggagacctgagcatggcatgttgagttgtactcactctccccaagacatctcagagaagtgaacgaccccattaaagagggca

SEQ ID NO: 42026 - DNA, 980 bp, Artificial sequence
  DNA replication origin
cggttaggggctggagactgcccggccaacacagcgaaaccccgtctccaccaaaaccagtcaggcgtggcggcgcgtgcctgcaattgcaggcactcggcaggctgaggcaggagaatcaggcagggaggttgcagtgagccaagatggcagcagtacagtccagcttcggctccgcatgagagggagaccgtggggaaaataacccgttctaaagtattttgttatagtagagtccaaagggactaagacacaccttcatccagttggcttccttacagcttcaactggcacatgagctaagttgcccttcctgtgagtttgcataaccttttagttctagttctcagaggtcaccggtagactgccctctcataaaaatttaaaaaagaaacgcagagcctggccggccacagtggctcacatctgtaatcccaatactttgggaggccaagatgggagaattgcttgaagccaggagttcaagacgagcttgggcaagtagtgagatcctgtctctcgagcacttggccatcgatctgccttcctcctggacagcagacactgggcaacatcaagtgtgcagtccctaaaatacatcaaagctgggatcacttcccctcctgggtagcttgggacctccagtccctttggaagagttggttcattttctttttaggaggccttcttgaatctctagtcgtcgtcaggcttaggtcacactacccatgcactgatcagccctgccacgtgggggaggctccaaaaaatgaagcggttccaggggtgccaaggttcagagcagagtcttgagagcctgaggggcaggaggaggcaaaggtctttgaggacgaaggggtttggccacagtcccggaagatctcaggtcgtggggcttctgtgagcgggcacatcccctgtgcctgtgtgattgtgagcttgtgtgcttgtgtggttgggggtccttcctggaggaggca

SEQ ID NO: 42027 - DNA, 1482 bp, Artificial sequence
  DNA replication origin
cccggacggggcggctggccgggcagaggggctcctcacttcccagtaggggcggccgggcagaggcgcccctcacctcccagacggggcggctggccgggcggaggctgacccccccacctccctcccagacggggcggctggccaggcggggggctgacccccccacctccctcccggacggggcggctggccgggtgggggggctgaccccccatctccctcccggacggggtggctggccgggctgaggggctcctcacttcccagtaggggcggccgggcagaggcgcccctcacctcccggacggggcggctggccgggcgggggctgacccccccacctccctcccggacggcacggctggccaggcggggggctgaaccccccacctccctcccggatggcatggctggccgggcgggggggctgaccccccccacctccctcccggacggggtggctgccgggcggagacgctcctcacttcccagatggggtggctgccgggcggagaggctcctcacttctcagacggggcagctgccgggcggagaggctcctcacttctcagacggggtggttgccaggcagagggtctcctcacttctcagatggggcggccgggcagagacgctcctcacctcccagacggggtctcggccgggcagaggcgctcctcacgtcccagagggggcggcggggcagaggcgctccccacatctcagacgatgggcggccgggcagagacgctcctcacttcctagatgtgatggcggctgggaagaggcgctcctcacttcctagatgggatggcggccgggcggagacgctcctcactttccagactgggcagccaggcagaggggctcctctcatcccagacgatgggcggccaggcagagacactcctcacttcccagacggcgtggcggccgggcagaggctgcaatctcggcactttgggaggccaaggcaggcggctgggaggtgtaggttgtagtgagccgagatcacgccactgcactccagcctgggcaccattgagcactgagtgaacgagactccgtctgcaatcccggcacctcgggaggccaaggctggcggatcactcgcggttaggggctggagactgcccggccaacacagcgaaaccccgtctccaccaaaaccagtcaggcgtggcggcgcgtgcctgcaattgcaggcactcggcaggctgaggcaggagaatcaggcagggaggttgcagtgagccaagatggcagcagtacagtccagcttcggctccgcatgagagggagaccgtggggaaaataacccgttctaaagtattttgttatagtagagtccaaagggactaagacacaccttcatccagttggcttccttacagcttcaactggcacatgagctaagttgcccttcctgtgagtttgcataaccttttagttctagttctcagaggtcaccggtagact

SEQ ID NO: 42028 - DNA, 908 bp, Artificial sequence
  DNA replication origin
tgcccggccagccaccccgtccgggaggtgaggggcgcctctgcccggccgcccctactaggaagtgaggagcccctctgcccggccagccgcccggtccgggagggaggtgggggggtcagcgccccgcccggccagccgccccgtccgggagggaggtggggggggtcagccccccgcccggccagccgccccgtccgggagggaggtggggggggtcagcccccctgcccagccagccgccccgtccgggaggtgaggggcgcctctgcccggccgcccctactgggaagtgaggagcccctctgcccggccagccgccccgtccgggagggaggtgggggggtcagccccccgcccggccagccgccccatccgggagggaggtggggggggtcagccccccgcccggccagccgcctggtccgcgaggtgaggggcgcctctgcccggccgcccctactgggaagtgaggagcccctctgcccggccaccaccccgtctgggaggtgtgcccaacagctcattgagaacgggccaggatgacaatggcggctttgtggaatagaaaggcgggaaaggtggggaaaagattgagaaatcggatggttgccgtgtctgtgtagaaagaagtagacatgggagacttttcattttgttctgcactaagaaaaattcttctgccttgggatcctgttgatctgtgaccttacccccaaccctgtgctctctgaaacatgtgctgtgtccactcagggttaaatggattaagggcagtgcaagatgtgctttgttaaacagatgcttgaaggcagcatgctccttaagagtcatcaccaatccctaatctcaagtaatcagggacacaaacactgcggaaggccgcagggtcctctgcctaggaaaac

SEQ ID NO: 42029 - DNA, 1238 bp, Artificial sequence
  DNA replication origin
cttgagattagggagtggtgatgactcttaacgagcctgctgccttcaagcatctgtttaacaaagcacatcttgcaccgcccttaatccatttaaccctgagtggacacagcacatgtttcagagagcacagggttgggggtaaggtcatagatcaacaggatcccaaggcagaagaatttttcttagtacagaacaaaatgaaaagtctcccatgtctacctctttctacacagacatggcaaccatccgatttctcaatcttttccccacctttcccccctttctattccacaaaactgccattgtcatcatggcccgttctcaatgagctgttgagtacacctcccagacggggtggtggccgggcagaggggctcctcacttcccagtaggggcggccgggcagaggcgcccctcacctcccggacggggcggctggctgggcagggggctgacccccccccacctccctcccggacggggcagctgctgggtggaggggctcctcacttctcagacggggcggccgggcagagacgctcctcacctcccagacggggtcgcagccgggcagagacgctcctcacttcctagatgggatggcggccgggcagagacgctcctcactttccagactgggcagccgggcagaggggctcctcacatcccagacgatgggcggccaggcagagatgctcctcacttcctagacaggatggcggccgggcagagacgctcctcactttccagactgggcagccaggcagaggggctcctcacatccgagacgatgggcggccaggcagagacgctcctcacttcccagacggggtggtggctgggcagaggctgcaatctcggcactttgggaggccaaggcaggcggctgggaggtggaggttgtagcgagccgagatcacaccactgcaccccagcctgggcaccattgagcactgagtgaacgagactccgtctgcaatcccggcacctcgggaggccgaggctggcggatcactcgcggttaggagctggagaccagcccagccaacacagcgaaaccctgtttccactaaaaaaatacgaaaaacaggcgtggcggcgcgcgcctgcaatcgcaggcactcggcagactgaggcaggagaatcaggcagggaggttgcagtgagccgagatggcagcagtacagtccagctttggctcggcatcagagggagactgtggaaagagagggaga

SEQ ID NO: 42030 - DNA, 1132 bp, Artificial sequence
  DNA replication origin
agcgacggcgcccgacggaagccctgaagccagagcttgcttgccaagctctcgctcagaccggatctaggaaatacgaggcgggcctcggtgggagggacgcactgagggaggagggaggaaagggggcggcggcggcggcggcggctcacaccggatcccggccctgcacggcgcgtaccctgggggttcgggcggggaagcggcgccggcccggaccccccgcgggagtaggcgacgggcgtgagggcgaggcggcggcggcggcggccagagagcagcagccgcctggtgagtgtccgcggggaggcccggcacctgcccgagcagggacgtcgggggcgcccccgggatcgtcccagtgaccctgtgcctgagacggtgggcgtgtgcgcaactgcggcgtcccggggactcaccccggcccgggactgcggctgacagcgggaactgcggggctgccggaggtttgcgcagggcctggcgcgtccgcgcccgccccagacgccccgagaggccgaggggagagggagtggctggggtggggtgtcgacttgattggccttggtcccccaaacggaggggacgatgcccttcctcgccggaccctaggcattgcggagagtgagcctctgtggaccggctttaagcccccaggaaggtgtttgaggatgaggactagcagcaccagcgtgggggccgttgagggtgttgagagatgtgaaggttagtagcagtatagtaagaattgttggagaggaggtttccagatgactgttggtaggtgttgagtaaggagaaaacactgctttcctttaaagatcgcacaagcagtcctctgaggtccaacaacagattagagttattcccagttggagttctgtagtttactaccgtgtgccagctcataaagtgcgtaaaagcaggatttgaagggtgagggacaggtgaggcataaagtaagctgcataaaaagatccaaagtttgttaatgtgttaaagtgtaaatccttctgtttctactgaaatgtaacttatttaaattatttaagaaaacttgccacctttggtccagaccgggcttgtcagttcgatgtgtttcttcagtgacgtttgtcaatcaggcagtcat

SEQ ID NO: 42031 - DNA, 1310 bp, Artificial sequence
  DNA replication origin
gcccagggtgagcttgtcgaacaggtactcagccaggccggcttccggggaacaaatcttgcgcaggttgctcacgtagccacccagctctttgatggtcttgacttgctcgtgcaggtagtggctctccaggaagtggcacagctgggggtcgcccttctccacggccagctggtacagatccagcaggctctggttgacgttcttctccaggtggaaggcggactccatggccacgagcccgctctcccagccttggcactctggcttcctgatatcgtgaaggcagatgtggccaccgcgcaggttctgcagcctcatcagcttctgggcatgctccattttgtcgtccgacaggcgcaggaagtagcggaagaagttctccagggccacgtcgtcccggttgaagtagaaggccatagacaggtacaggtaggaggtgtagagctccagcgtgatgtggctgttgatggcggcgtcgcagttggtgtcgtacttctggcgcacctgcgacggctgggcggtggccatggcgggcagcgcaagtgcaggcgagcacacgggcgaagtcggtgcggtagcgagggcagcagctgaggtgacaagaatggcggatagtgaaaggcgggtgtgcgatgaaaccggaagtgggcagtggaagtgggcagtggcgaccgttagggaggagcgcgctctgtcggtggggggaggggcggcgggggacagagttgcggggcaagggggtgggggcacaagcgctgacttccgtcggaaatcccggccacttggcgctgaatgtttcaagaccatcttttaaaaataactgctctaggccgggcacggtagctcacgcgtgtaatcccagcactttgggaggccggggcgggcggatcacgaggtcaggacatggagaccaacctgaccaacatggtgaaaccccgtctctactaaaaatacaaaaaaaattagccaggcatgctggcgcgcgcacctgtagtcccagctactcgggaggctgaggcaggagaattgcttgaacccaagaggcggaggttgcagtgagctgggattgtgccgttacacgccagcctgggcaacagagcaagacttgtgtcaaacaacaacaacaaactgcactattgagatacaattcctctgccataaaattcaccctctgaaacatttccatggtttttagtatattcatgaagttgtgtaactatcaccccatcaccaaaaatctaatttcagaacgttttccttattccaaaatgaaatcccctacccatgagtagttactgcccatctcg

SEQ ID NO: 42032 - DNA, 831 bp, Artificial sequence
  DNA replication origin
tctgcccgcagcgccccctccccggcccgcccgcgccggctcctccgcagtgctttcagctgtgagcttgggcggcggcggcggcggcgctccactttcggggagcccggcggctctgggaagctcactcctccactcgtacccacactcgaccgcggagcccttgcagccatgagggaacagctcaaagggtaagtggatcgcggccccggccccgtctgatggccgcaatccgtgcacttgtggcgcgagcagggggcaagctgaggcggtcaaaacttggacaggcgcggcggctggacccggggcgccgggcggctgggcgtctaggaacctctcccgcgggttcccgcggcgcggctgcaggtgcgcccccggggtttctccccaggcgccgggctagtgggggaacctcttccctcggctttgggacgggctcggagagaaaaagctgatttctccccgtccccagaggggataacgcgttcctcacgcggggattggggccgggggagcttttcactcctttccaggctgccagtgtggacgtgagcaaggctggctgttcctaaatcgtcgctcttactcgtagaaggaaggggcgcacgcggcgctaccttccattgcactgcaagtgccaaaaggtcaactttctgcctgatttcttccgaggattccaactgacatttccctcgctgcattttctaccgtgctcattccatgccccaagacctgcagaaatcaggaaagaaagaacaaacaactaaagcccagaagtcaaagatttcagggggtggggatttttgtttgtttgggctttttttttttttt

SEQ ID NO: 42033 - DNA, 1120 bp, Artificial sequence
  DNA replication origin
agaaaatcagatttttgtggctttttgtgctatttcaactttgttacaacttgaaacgtttccaggaaagctttataaatagtcccagagaagacatgaaactggaaggaatgtaatgagtttctcaggtgtctatgtgtgtgtgtgtgagtctgtgtatgtgtgtgtgagagagagagagagaaagagagagaaagaaagaaaatcgccggcaggtcctctctctttatttccctttctcttcgctgacaccagcagttgaagaatcaaaattagaaaggaaggggtttgtagcgagaaatcataagttgactgatttttgctaagggcataactggggcgccggggaaggcaactggagggtcagggagggcggaaagcagtaaagccccctgggactggtagcctcagtagctaccttattctccactccccacccccatcttatccatttgcagctttcagcgctggcggaataaagcacaactttctaggcatctgtgagtagctcatggagaaaagaaaggtctggaggagagaagagttacttagagtggcagagaaagaaaggcaactcacaatcaacggcggcgtcaccaaaaaaggaaaggaaaacaagcctgtccctctctcaactcttcatatccatcaaaaacgtaaggaaataaaatccaaaccgaaatacattggtgaaaacgcagataaggtggagtggaaccggcagaaatgtgaacactaggcaaattcgtcctcgagagaggaaggaaaaagagtggggaagaccgaacagcgaacccccgcagcatctcggtggagttggggcgtttttgcctgcttcttttttaacgggggtgtggaaggcgtcgcatttttttacacagccacatggctctcgcctcaaatgataacaaatacccaaaatagcgtacgtgttactccagaacaggaggaatggccacggggaagggagagggcgtgggctgtcgctttaggtttggcgaccagggatggggagggaagaggggtggatgccagggaggtggcgggagccccaggatccgagaagggcctggacggggtgggacgggccagggcagaggatgcggggacgtggggacag

SEQ ID NO: 42034 - DNA, 949 bp, Artificial sequence
  DNA replication origin
cagggggcggcgctcctcggggaggctcgtgccatgcaggagcggggggagccgggggagcggggggagcgcgggggggggggggggggcggggcggggcggtaaggctcaggcatggcgggctgcaggtcctgatccctgcccggcggggaggcagctaaggcctggcgagaaatcgagcacagcagctgctggcccaggtgctaagcccctcactgcccgggatcggcggggctggccggcagctcccagtgcggggccctccgagcccacgccccaccgggaactcccgctggctcgcaagcgccgggcgcagccccagttcccgcccgcgcctctccctcctcacctcccagcaagctgagggagccggctccggcctcggccagcccaggaagggactcccacagtgcagcggcgggctgaagggctcctcaagtgccgccggagtgggcgcccaggcagaggaggcgcccagagcgagcgaggactgcgaggacttgccagcacgctgtcacctctcacttccaggtaatataaaatacgtagtatcctctgccttcttgttatgatgaacgtgtgggttatttgtggttatatttgttatctttgttgatctgtatgacttttcatagggtttgcagaaatcttgtaaactaagatttagctaaccaccattatcttaggaaaacccagaacacatctttgtgatagaggcaggtgacagacaaatcttaggcagacaggatcgggtccccagtgaaacctcaccttcaaaccaaaaacagcctgatgcctgaaaactgggttgctggtaccaggtgaagcctgtgacctggagtgaaaatttctattcctatttgcctgctctttcctgattggttctttctgaataagtgtttaaattcaagttaaacaattgaatgttgccttttccagtgctacttgt

SEQ ID NO: 42035 - DNA, 879 bp, Artificial sequence
  DNA replication origin
tttttttggggggtaaaaagatactgtgacttttagagtttccagagttctgtgctggttctttccatctgtgagggctgatgttcctttatcatttgaaattgctgtcatttggatgggctttatatttttatggtcattattgcccttgaaggtgtgactgcggtacaagttgtgtatagttgaatgacttagtttctggatgctttcagagggccagtgctcaattccacattgctgggctatgtactctatccatgagtgactggtactgggtccatggctttgtccactgttcccttgaggttaagcccaagctgggatggaggagctgaggcactgccagattattggcaacagcactccataaggaatgatgggggcacggtgggtgtaaatgctccagtgggggtggcgagagcactatgagtgggaagtgctctggtgggggacttgggagcaccacaggtgacaggctcttcagcaggggtgccatgggtgggatgcactcgggctgggttgatggtggcaccactgatgggacacactgtgacggggtggcaggggtgccacaggtgggatgcactccagcaagggtgacaccagaaggaagtacttggggaggtgggtggccatgggctggaagtgctccagtgggcacagcatgggcactatttgtaggaggtgctctggcaggggcactgtgggtgggaacccttctggcaggggatgccatggtcagaaagtacttcggtgggacagtggtgatgccgcagctgattgtgacccatagggacagtggtgaggttgcagacaaatgccttctggtgggaggatgtcagcaaaagtgctccagtggggtgacaggaggatctggtt

SEQ ID NO: 42036 - DNA, 1714 bp, Artificial sequence
  DNA replication origin
actcacggcaaataaacggcatcaggtgctcaccatccacaacaagagggcgttttattttcatgcatgtggatgaaatacaatttcttcagcaaactcagcaaaaactgttcaggggcaaaaatgaactctgcacttaaaagaaaaataaaaaatgaaagcacaaaatactaaaaagtaaataaacgctctgcatcagcacactggtatcaaaacacacatccacagcacgtcctaatcctacaggaaacaatccttgcttatcagaggtgcatatctaaattaaatagcttaccaatatcttcttgggagtaggacaaaaggaaacagaaaacctacattaaaaaaaaagtttcttttccctaaatgttttcctgaagctgaatttgaagtggggaggacgtcagtcgtccttgtcattctcgttgaagtcatcatcctcctcgtcgtcctccccgacgtaggacaccggggtctccaccctggagccgctgtactgagacctcttggagcttgtggccagcatcccatctgcaccgttggtcaggtcactggcagagaacctcgtgcctttagacgtggaacctgccgccgtgatgaacacgcctccaacagttccctgagccatttctgtcacatacggctccagcgcctttgggactagacttctggccattttaaggtcttcagcagagcagctcccagactccagccagcaagccatgcccatccgcttcagcacttctatgtcaccttggatttcaaatgtgttgtcaaaattaaacagatactcgagtttgtcgttggagatgctgcagtcgatgacggtcttcttgctggtgttgacgacgatgaagggcaggtggatgaccgagttgggtggtggcggccggctggcctgctgctctgcgtgccggtttctctgcaccaggttcttgaaggcaatttgctgtagaataagttctcgaagttgagactgtttctgttttattctttcaagtctcctctgtctttccacctctaagttctgacattcctgagccgagttggtgggcagaccaatccacttaatctccttcttctccttggagatgatgttcatggccatcagcacgtttaaggcatcatagacgcgccgtcttatgttcttctggtcataagctgactcgtttggtaagatgtggttgtcggcagcactgaactctgctaccagctcgtccgccacttcgttgtaggaagtggtccctttcctctgcaccttctcgcagaccttcatggagaaatgccgcaggcccttgcaattctctcctttcctgttgcgcttccctgcagaccgaggtgaggagtcagaaggctggttctgagaggcaaagtgagtgctgggggtgtgtgagcttcctaccaccagggtgtttgacgctgcaggtctctgaggcataccaatcaccacttgctgggcaatgctgacattggactgtccaaaggtttttggcaagagctgtttcccgagcgggttgacggtggaggggtgaacggccacgagggacaccacgccttttccggaactaaggttctggtctatgaagaccttgagttctccgttggcttcaattagaccggcatcttttgccatgttaccagatccggaaaatcaatgctacaaatgttcaccttcccagagaagaaaaatgatttttctgggcgcagccccggg

SEQ ID NO: 42037 - DNA, 1180 bp, Artificial sequence
  DNA replication origin
agctccaggaggctctggttgatgttcttctccaggtggaaggcgcactccatggccttgagcccgctctcccagccttggccctctggcttcccgacgtcatgaaggcagatgcggccaccgcgcaggttgtgcagcctcatcagctcctgggcgtgctcccttttctcctgcaactggcacaggaagtagcagtcaaagtgctccagggccgcgtcgtcctggtcgaagtagaaggccatggacaggtacacataggatgcgtggagctccaggctgatgtgggtgttgatggcagcctcacagctggggtggtggtaccgttgcacctgcgacagcgggcccagggcgggcagcgcgggcgctgggaggaggggaaaagcagtgggtttgccaggggcccggagcgggtagcggcatcggcgtgggcagtggcggcagcggtggggtcctcggagcaccaccatggtggacgacagcggcggctggtggagggcggggtcctccgggcccggcggtagtgtggtcgctgattctgtgaagggaccagaagtgggcggtggagaccgttatggggggaggggcgcacgaggtcgggcgggtgtgggctggtgcggagccatgcgggacttccgacaggtgggggtgggggagcacgctgagttccatcggcagcccggggaactgggcgctatcagacctctgcgctacgtcaattctgcagtaacttttctagtgtgcaaggacttttgcctgtcccctgattgttcccctctatgacagcttgttctcattttataaacctcttgtctttcttaaactctgagagtatgttctggtaacgttttcttctgtttcctgtattatatcctttttttccctcctctagaattagttctatttgtgcatcttcctcactttccttaaatatctggaaaacgtttgtctattcatgattggaatcaaggactgggttagcctcagtgataagcatggatcgaatgcacagctgtgagtctgggtgaccagtaggattctcccatgaacaggagggtggagtgtgttaattagggagtgctcatctcctttggagataaaggtatagagctcccaggcagagtaggaactattctaaatgcccaaagcatggcatttctctggcactggaaaactttagtgg

SEQ ID NO: 42038 - DNA, 1029 bp, Artificial sequence
  DNA replication origin
agaggcaagtaattgtaactcagaaatgcgttgctgtctggctgtctcctctctattattgtacaccttgaaggtgaggttgattaattcctgttgtggggtttgagggctggattctaatttttgaagcttttttctaatgtcaggagctgactgggtgataaaatgcatatttagaatgacacggccttctgacccttcagggtctagggctgtaaagcatcttagggttgctgccaaatgagccatgaactgggctgggtttttatatttgatgaaaaagagcctaaatgctcattgatttgggagaggtcggataaagaaaaaggaatattatccttgactatgcctttagctccagccacctctttaagaggaaattgttgggctgattggggagggctagtggcagaacgaaactgtaagccggactgggtgtgaggaggggaggtgatagaaggattatagggtgggggagcagaggctgaggaagaattggagcctgattcagcctggcagggagcgacctgaggaggagcagtctggggaggaggggagaggtcagatgggtcggtagaaaaggaagattgaaaagactcgtgatgcttggggttgggacctaggggacaggcgggagggaaagaaggaagatttgggatgagttgcattgggaacagagactagggaggggccgatgtgtaaaagaatgcctggatatcaagcaccttagaccatttgcccattttatgacaagaattatctagatcttgtaggatggagaaattgaaagtgctgttttctggccatttagagccattatcaagtttgtattggggccaagaggtgctgcagaagaaaataaggcatttaggttttaggtcaggtgtgagttgaagaggttttaagtttttgagaacacagactaagggagaagagggaggaatggagggtggaaggttgcccatagtgaaggaggcaagcccagagaaaagagagggtagagacacgcagagaaggggtagagggtgc

SEQ ID NO: 42039 - DNA, 1322 bp, Artificial sequence
  DNA replication origin
gccagctggtgcagctccaggaggctctggttgatgttcttctccaggtggaaggtgcactccatggccttgagcccgctctcccagccttggccctctggcttcctgatgtcatgaaggcagatgcggccaccgcgcaggttctgcaggctcatcagctcctgggcgtgctcccttttctcctgcgactggcgcaggaagtagcggtcaaagtgctccagggccgcgtcgtcctggtcgaagtagaaggccatggacaggtacacataggatgcgtggagctccaggctgatgtgggtgttgatggcagcctcacagctgggatggtggtaccgtcgcaccggcgacagcgggcccagggcgggcagcgcgggcgctgggaggaggggaaaagcagtgggtttgccaggggcccggagcgggtagtggcatcggcgtgggcagtggcggcagcggcggggtcctcggagcaccaccatggtggacgacagcggcggctggtggagggcgtcgtcccccgggcccggtggtagtgtggtcacaggctctgcgaagggaccggaagtgagcggtggagacctttatgcggggaggagcgcacaaggtcgggcgggtgtgggctggtgcggagctgcgagggacttctgacaggtgggggtgggggagcacgctgagttctatgggcagcccggggaattgggcactatcagacctctgtgctacgtcaattctgtagtaacttttctagtgtccaaggactttcgcctgtcccctgattgttcccctctatgacagcttgttctcatttcataaacttcttgtctttcttaaactctgagagtatgttctgataacgttttcttctgtttcctgtattatatccttttttccctcctccagaattagttctatttgtgcatcttcctcactttccttaaatatctggaaaacgtttgtccattcatgattggaatcaaggactgggttagcctcggtgatgagcatggacctaatgcacagttgtgagtctggatgaccagtaggattctcccatgaacaggagggtggagggtgtcaattagggagtgctcatctcctttggagataaaggtatagagctcccaggcagagtaggaactattctaaatgcccaaagcatggcatttctctggcactggaaaactttagtggatctgtcttctaggtagatgtcaacttccctttaaatgctcacccatgtctgctgcaccctgaagcttaattctgtctgcaggagggatgactccacatgatagggaatgtgatttcagatatgttttcag

SEQ ID NO: 42040 - DNA, 854 bp, Artificial sequence
  DNA replication origin
catctctgcccggccgccccgtctgagaagtgaggagcccctccgcccggcagccgccccgtctgagaagtgaggagcccttccgcccggcagccgccccgtctgagaagtgaggagcccctgcgcccggcagccgccccgtctgagaagtgaggagcccctgcgcccggcagccaccctgtctgagaagtgaggagcccctccacccgcagccaccccgtctgggaagtgaggagcatctccgcccggcagccaccccgtccgggagggaggtgggggtcagcccccgccaggccagccgccccgtctgggagggaggtggggggtcagcccccgcccggccagccgccccgtccgggaggtgggggtcacctctgcccggccgccccttctgggaagtgaggagcccctctgcccggccaccaccccgtctgggaggtgtacccaacagctcattgagaacgggccatgatgacaatggcggttttgtggaatagaaaagggggaaaggtggggaaaagatagagaaatcggatggttgctgtgtctgtgtagaaagaagtagacatgggagacttcattttgttctgtactaagaaaaattcttctgccttgggatgctgttggtctatgaccttacccccaaccctgtgctctctgaaacatgtgctgtgtccactcagggttaaatggattaaggggggtgcaagatgtgctttgttaaacagatgcttgaaggcagcatgctcgttaagagtcatcaccactccctaatctcaagtacccagggacacaaacactgcagaaggccgcagggtcctctgcctaggaaaaccagagacctttgttcactt

SEQ ID NO: 42041 - DNA, 1162 bp, Artificial sequence
  DNA replication origin
ctctatcttttccccacctttcccccttttctattccacaaaaccgccattgtcatcatggcccgttctcaatgagctgttgggtacacctcccagacggggtggtggccgggcagaggggctcctcacttcccagaaggggcggccgggcagaggtgacccccacctcccggacggggcggctggccgggcgggggctgaccccccacctccctcccagacggggcggctggcctggcgggggctgacccccacctccctcccggacggggtggctgccgggcggagatgctcctcacttcccagacggggtggctgcgggtggaggggctcctcacttctcagacagggtggctgccgggcgcaggggctcctcacttctcagacggggcggctgccgggcgcaggggctcctcacttctcagacggggcggctgccgggcggaagggctcctcacttctcagacggggcggctgccgggcggaggggctcctcacttctcagacggggcggccgggcagagatgctcctcacctctcagacggggcagcggggcagagccgctccccacatctcagacaatgggcggccgggcagagacgctcctcacttcctagatgggatggcggccgggaagaggcgctcctcacttctcagagtgggcagccaggcagaggggctcctcacatcccagatgatgggcggccaggcagagacgctcctcacttcccagatggggtggcagccgggcagaggctgcaatctcggcactttgggaggccaaggcaggcggctgggaggtggaggttgtagcaagccaagatcacgccaccgcactccagcctgggcaccattgagcactgagtgaacgagactccgtctgcaatcccggcccctcgggaggccaaggctggcggatcactcgcagttaggagctggagaccagcccggccaacacagcgaaaccccatctccaccaaaaaaatacgaaaaccagtcaggcgtggcggcgggcgcctgcaatctcaggcactcggcaggctgaggcagtagaatcaggcagggaggttgcagtgagccgagatggcagcagtacagtccagcttcggctcggcatcagagggagactgtggaaagagagggagagggagaccgtgggga

SEQ ID NO: 42042 - DNA, 1010 bp, Artificial sequence
  DNA replication origin
gggggtgagaaagtagcaaactagtctgcggccaaactttctctgtggagcctcctacaccgaaaagggtttgattggaactctggaagcccggacgcagaaggtgctagggctcccgtcgccgcgagggcgccccgcgcctggagatgggatggtcagttcttcccggcgcgtgcccagacaccagccccgatccgcatcatccccaccctcgggctgcgaaagaggagttctgcgcaaacaaagggcgcccccggcacctccctctatcccgagcgaagggtcccaacggcgactccgggggtctttggtgcccagctgaggaggcagccacgcctccgatcctacctgggaagctgcggctgggcgggacgcgcagcagcagcagcagcagcagaggcggcagcagcagcagcagcgcgggccgatgtgcggggctccccatggcgagcgggcgcttagctcgcctcggcagcgcagcgcgcttcccgggggcggcaggagaccgaagagaccaagggactgcgtgctagcgggcgggcgaaggccgggctggaaaactcctcctctcgcctctttccctccctccttcctgcctggggcctgccctcctttctccgccccccctggaacactgcgcggttcggggctctgacccacccacctcctccttttgtgccagcgctttttctggccagagagcgctggagacaagccccagcagagcgaaatatcctgaagtagctttctttgccccaatttgcgcgccccctcacccggaatacacacacggtattcaatacaaccgcctcgaacatcccagacgtctagaaggataccatctgtgcagaaagctgcgtgagtcacacggaaacagaaggggcaaccgaggggattcagagtggcccactgcggccggatactatggccatgttctctgttttgatcctcacgaccatgccccaagttcgctattaccatgtccactttctccaataagacaccgacgc

SEQ ID NO: 42043 - DNA, 1644 bp, Artificial sequence
  DNA replication origin
tttacagaaacaacaaacaattggggaactgacgcaggatacagctcttactgaaaacgatgatagtgatgaatatgaagaaatgtcagaaatgaaagaagggaaagcatgtaaacaacatgtgtcacaagggattttcatgacgcagccagctacgactatcgaagcattttcagatgaggaagtaggtaatgacacaggccaggtgggacctcaggctgacactgatggagagggtttacaaaaagaggtatatagacatgaaaataataatggtgttgatcaacttgatgctaaggaaatagaaaaggaaagtgatggaggacacagtcagaaggaatcagaagcagaagaaatagacagtgagaaggaaactaaactggcagaaatagcaggtatgaaggatttaagagaaagggaaaagagtacaaaaaagatgagtcctttctttggcaacttaccagatagaggtatgaatactgagagtgaagaaaataaagattttgttaagaaaagggaaagttgcaagcaagatgtgatctttgacagtgaaagagaatcagtagaaaagccagacagttacatggaaggtgcaagtgagagtcaacagggtatagctgatggattccagcagcctgaggcaatagaatttagtagtggagagaaagaggatgatgaagtggaaactgaccaaaacatacggtatggcaggaaattgattgaacaaggaaatgaaaaagagactaaacccataatatccaaatccatggcaaagtatgattttaaatgtgatcgcttgtcagagatcccagaggagaaggaaggagcagaggattcaaaaggaaatggaatagaggagcaagaggtagaagcaaatgaggaaaatgtgaaggtgcatggaggaagaaaggagaaaacagagatcctatcagatgaccttacagacaaagcagaggtgagtgaaggcaaggcaaaatcagtgggagaagcagaggatgggcctgaaggtagaggggatggaacctgtgaggaaggtagttcaggagcagaacactggcaagatgaggagagggagaagggggagaaagacaagggtagaggagaaatggagaggccaggagagggagagaaggaactagcagagaaggaagaatggaagaagagggatggggaagagcaggagcaaaaggagagggagcagggccatcagaaggaaagaaaccaagagatggaggagggaggggaggaggagcatggagaaggagaagaagaggagggagacagagaagaggaagaagagaaggagggagaagggaaagaggaaggagaaggggaagaagtggagggagaacgtgaaaaggaggaaggagagaggaaaaaggaggaaagagcggggaaggaggagaaaggagaggaagaaggagaccaaggagagggggaagaggaggaaacagaggggagaggggaggaaaaagaggagggaggggaagtagagggaggggaagtagaggaggggaaaggagagagggaagaggaagaggaggagggtgagggggaagaggaggaaggggagggggaagaggaggaaggggagggggaagaggaggaaggagaagggaaaggggaggaagaaggggaagaagg

SEQ ID NO: 42044 - DNA, 1675 bp, Artificial sequence
  DNA replication origin
tggttggcgggcaaccaggagctaaccacaaaagcttgttagctggtcccagaagcgagagataattgagcagatagtcacggaagttgtgagtggagaggcagggttagagggtggggagaggcagcatggggagaggcagattggggaaggtggggagaggcggggtggggaaggtggggagaggcggggtggggagggtggggagaggcggggtggggagggtggggagaggtggggtggggagggtggggaaaagccgggtggggagggtgggaagaggcagagtgcggagggtggggagaggggggtggggacggtggggcttggtggggttgggcgggatcacagggcacagaatctctcagcctagcttttctttttttttttttttcttgcatgtaagatttattttgatgatatcattcagccaggaccctggtttattagtaacattgtacatattcaaatttcttaaagaaatttaattttttaaatagattaaggggctacaaatgtgcttttgttacatgggtatattgcatagtggttaagtctgggattttaggatacccatcacctggatagtgaactttgttcccaataggtaatttttcaaccctcaccaccctcctttcccacttgggagttccaagtgtctattgtttcgctctatatgtccatgtgtatccattgtttagcttccacttataagtgagaacatgtggtatttgattttctatctctgagttactcaggataattgtctctagggccatccatgttgctgggaaagacatgatttctttttatgtctatgtggtattccatggtgtagatatatcacattttctttttctaaccatccattgatggacacttaggttgattccatgactttgctattgtgaataatgctgtgataaacataggagtgcaggtgtttttttgatatcacaatttatttttctttgggtagacacctagtaatggaattgctggatcttagtagttctatttttagcttttcagaaatctccaatctgttttccatagatgttgtactaatttacatgtccacaaacagtgtatgagagttcccttttctctgcatcctctctaacatctctcgtttttctgactttttagtaatagccattctgactggtgtgcgagggcatctcaacgtggtttaaatttgcattgctctgatgataagtgatgttgagcattttcatatatttgttggctgcttgtatgttttttattgagaaatatctgttcatattatttgcccacttttaatggggttatttggttcttttctttttgaatttttggagttccatgtacattctgggtattagtcctttgttggaagcatagttcacaaatatatttctctcattctgcaggttgcctgtttactccattgattattttttgctgtgcagaagcattttagtttaattaaattccatttttctatttttgtttttgctgcatttgcttttgaggtcttagtcataaattcttcgacttgggcaatatccagaagagtttttcctagattttcttgcaggatttttatagtttcaggtcttacatctaagtgtttaatccatcttgagttaatttttgtatatggtgagagatatgggtccagtttcattct

SEQ ID NO: 42045 - DNA, 1154 bp, Artificial sequence
  DNA replication origin
agccccttgcagcctgcgcggagcgaggtctagggttccagcagccccgacccgcaccctgccatcctgcagccccgacccagcaccccgcgcctgtctccttaaagaggggtcccagatttgatttttggtttgggttttcctccccacttcttttctcagagcatcatcatacggaccgatggacagcgactcggccaccggcccggcgtgggcacttacccagaagacgaaggagtagatgatgaggagggttttgagacaggttatcacaggtttggtctccattctcctcgatgccatactacagagctccggcggcggcggcggcggcggcaggcggcgggcgggcgcgcgggagggggaagaggcggggcggggcggggcggcgcggggcgggggcgcgtgccgcgagaggcctcgtgagcgcgcaggcgaggccgtgcgcgtgcgtgagcgcgcaccgcgcggggctcctactgaaaaagccgggccgggcagtgactgcgcatgcgggaaacgccgcccgcgttcgcaatactgcgcaggcttagacccccagcggaggagggaggcgaggccaggcgaggccaggcgaggcgacacggggcgcggcaggacagtggggagggaatgggagaatttagaggccgggtcagaggtcacgggaacctctcccagtccgccctggcatttagatttctgctttgtacacagttgggcgttacatttgcaggtatgcctgcacctggctatgggaagtttatgggtgccccgctgcccatcagtcacgtttctgcattttgacaccccccagggccttctcacatggaaatggccccgtagtcatgtccttggcaaccagcaggccttgtttgtgccaggaacagacaggtggccagagatacagctggagggatgggcaggaacgccggagctcagacagaccccaaatcctcgccaccacaggtatctgcaggctcctccatttttcagatttgtcttacattttgaaataataaaacgaaatgacaagaaaggtctgtatgaggcgtcattcttgctgcgcatacaatgtttaacagaatacagaaaaatgtttaatatgcctgagaatcatttgcagcgcgctaacaagtacagtccacctccct

SEQ ID NO: 42046 - DNA, 819 bp, Artificial sequence
  DNA replication origin
ctccttcgtcttctgggtaagtgcccacgccgggccggtggccgagtcgctgtccatcggtccgtatgatgatgctctgagaaaagaagtggggaggaaaacccaaaccaaaaatcaaatctgggacccctctttaaggagacaggcgcggggtgctgggtcggggctgcaggatggcagggtgcgggtcggggctgctggaaccctagacctcgctccgcgcaggctgcaaggggctgcggagtgtcggtgactgcaggttgtcgaccttccaaaaaaaaaatgttaatgcattagtttcttttataatctcccgggatagggtcagctcctggggaaagttgcgggtttattcgtctgttttcctcgctgtacacctttctctcccttcccctaccagccggttcgcggcgcctcttggagctaacctgtggcgggctaggagaggacacgggagcgtggggtttaatctcagattcccagttattcctgaccccacggggctgcgggagggaggcaccagaagcaccgtgcctgcctggctgggcaagggcgaccgaagtctcccaagcgcacgatggggagcaggcgttgtcaccgcgtggaggcgcacgaaagggagagggtcttacataagccgggggcatctttgaggtttcttggtgacccaagagatgagtctttggattcctttcccacctccctgcatccttacactccctatctggtggttctgtcactgcatgagcacaatccgcagcgccctggcagagggtcccctccacttggtgatagagatagcgccccaactctactccc

SEQ ID NO: 42047 - DNA, 1007 bp, Artificial sequence
  DNA replication origin
aagcgcacgatggggagcaggcgttgtcaccgcgtggaggcgcacgaaagggagagggtcttacataagccgggggcatctttgaggtttcttggtgacccaagagatgagtctttggattcctttcccacctccctgcatccttacactccctatctggtggttctgtcactgcatgagcacaatccgcagcgccctggcagagggtcccctccacttggtgatagagatagcgccccaactctactccccatctatccagtgctgccgccggtccttgaagctcaatgcagaagggtgacgtcacccctcagccagggccgcggggggctgcgtggtgcacctcgcggagggatgcgcctttctgcgcgggggaggggggaggaggaggagggggaggaggaggaggaggagggggctccaggcttgtgccttacctcatcctgtttggcaaatcatggaatcagtgcagggctgacactgcagtgattcactgagagaggtgcgtggtacttaaagaccattccctgttatttctcttttcatgtcggtgaccccgtcttccctagttccttacgcccataatcaagctacagctaccccgcaggggaatgaatatcgaccctcttccccccttgtcccccaaatctgggtcattttagcttctacggcagtcattttgaaatctgaggctctgtaggaaaagccagttcaacctttgcttgttttcttcttgcacccctcacccccgcccctcacccaccaccatatattagccctatttttgctttgaaactggagcacagtgctgtatgaggtaccgagaatcagctagatggcaaaccggactgtttgcaatggtcaaggaagaagcagagatttattgaggatcaaaaatattcctaatgcacccggacatttccttatcgctggcgttggtggttcttcaagtcagggaaggtatggactccccagaccacacataccaggagctctgcaatgagcta

SEQ ID NO: 42048 - DNA, 1393 bp, Artificial sequence
  DNA replication origin
caggagagactaccacttcccaggtgatgttagtgagccctgacctctctgggatcagctgaaattacagatccataccccacgcccagtccactctccatttgaaggatagagggcagttttgcccctgtgttatctagacagttggaggcatgacttgtggtggaggagagctggcccatggttaaacattgtccagagccccagcgggacatgtctgacagggggacttccttcctgcaatagggccaagggcattgccttgggtcatgagtgtgctacagtgtgtaagtggctggggcggtgggacagttagaaagagctcaaggggaatttaatgggcaaagtcacagtggagtagaaaagatgaagcaaatgaagaattcaaagtatcccatggtgctctactctaattgagaggttgaagagcctgggtgtctgcggggggtggggggcaagatagggggtgtggatggaaggaggagtgaggagggagagaaagaagaaagtggagagtagggggagggagagagagaggaagaaggagagagagagaaagagagagtgagcaaaggaaggagggagagaggaaaaaggagcgaggtcagggagagagaagaaaagacagagacaaggagacggaagaggaaaggggagaaaaggagtgagggtggggaagagagagtgaacagaagaaggaggagaaggaggaaagaaagggaaaggaggaggagagtgaagaggggaggagggaacagagaaaagcagtctgcccagaggcagagctaaagatttgactgtgttggttaggcaaaggaacacttcagcaggattttgaacacgactgtttttaaaggaagtgatcccacaagttgggggaacctggtagagggaaaggaaggaaaacacagcctctacatgcaaacaggcctaggtttgagttctatctctagcactgacttgctgtgtgaacttgggcaagttgtttaaattctccgtatctcagaatccttatctgtgagaggaaataataaaagccagttctcagggttgttgggagacttaaaggaggttcggatgtgtagctcctggcacttagttggcacccagaaaatgtatgctcctgtgctatgtatgtcctctcttggaatccagagaactcagccacgacccccatcaagctgagaagaactgaaattccaaggctgaaaaagttgatggagggaactatctcttgctttgaccctctgccaaactgagagtgtaaatgttcagttgttctgtgagctgactgtgtgccttggctcaaagtggcaggtagcctgggaatgctgggagagaagaaagtctggtgctcagagaaatgaactcagatagagaaagtgtccccctt

SEQ ID NO: 42049 - DNA, 1004 bp, Artificial sequence
  DNA replication origin
tgggctgcctggtggcaaggctgttcccacgaatcaagataaagtgattcccccacctccagccgctcttctctcccactcagctcgtgttcttcgccttcccccagcgagcgaggccggcgagctagactgcctcaccgaggcggctcccggtaccgtctgtggctctgctgggacctctggaagccccgcggccccggcgcgccacgtgtggttcccgtacttaaggcctcccgccagcccccacccagcctcccttcccgccccagctggcgcaggagggcgggtaccgccctttggaaacacccagcgccctgagagggcaagacaagccgccttccccgcgccacaggagaatccgccctgagctgctcaggacagaccttggttcatctgtgggcggggactggggcaagggtggcagtcctctaaggcaggggtagagggtgaggggaggaaagttgcagaaaagaaggaagggaataggaggatgaaagagagaagaaggaaggaaggtggtgggggtggaaatggagggagcaggagggagaaagagaagagagaaaaatggagtaagatagggcagaaaggatgggaaaggagaggaaagaaggaaagagggatggggaaaggaaggggaaaaggtgagagggatgagaaggagtgggtgggaaggagagggaggaaagagaaaggggaggaggaggaaggaagtgaggatgcagggtgaagttgaaggggagtgagtagaagaggagacagaggaagaaaaatgaagttggcagaaaggggccaaggagaaaaggaagggaagagggaaggctatgagaaagaggaggaggaggaggggaaatgggacccaagggtttgaaaggaaagggaacagaaaagaaggaggaagagaggacagaacagctttggttctgcttcttgtccttttagactccagtgccacactcctcagcgtgtgcacgcagacacacacacacacacacacacacaca

SEQ ID NO: 42050 - DNA, 1105 bp, Artificial sequence
  DNA replication origin
ctcacctcccggacggggcagctggccgggcggggggctgacccccccacctccctcccagacggggcggctggccgggcggggggctgaccccctcacctccctcccggacggggcggctggccgggcagggggctgacccccccacctccctcccggatggggcggctggctgggcggggggctgacccccccacctccctcccggatggggtggctggccaggcagaggggctcctcacttcctagtaggggcagctgggcagaggcgcccctcacctcccggacggggcggctggccgggcagggggctgaccccccacctccctcctggacggggcggctggcctggcgggggctgacccccacctccctcccggacggggtggctgccaggcggagacgctcctcacttcccagatggggtggctgctaggcggagggtctcctcacttctcagatggggcggctgggcagagacgctcctcacctcccagatggggtcgcggccgggtagaggcactcctcacatcccagacggggcagtggggcagaggcgctccccacatctcagatgatgggcggccgggcagagatgctcctcacttcctagatgggatggcggccgggaagaggcgctcctcacttcctaggtgggatggcggccgggcagagacgctcctcactttccagactgggcagccaggcagaggggctcctcacgtcccagacgatgggcggccaggcagagacgctcctcactttccagagggggtggcggccgggcagaggctgcaatctcggcactttgggaggccaaggcaggcggctgggaggtggaggttgtagcaagccaagatcacgccactgcactccagcctgggcaccattgagcactgagtgaaccagactccgtctgcaatcccggcccctcgggaggccgaggctggtggatcactcgcggttaggagctggagaccagtccggccaacacagcgaaaccccgtctccaccaaaaaaatatgaaaaccagtcaggcgtggcggtgcgtgcctgcaattgcaggcactcggcaggctgaggcaggagaatcaggcagggaggt

SEQ ID NO: 42051 - DNA, 933 bp, Artificial sequence
  DNA replication origin
gagggggtcagccccccgcccggccagccgccccgtctgggagggaggtgggggggtcagccccccgcccggccagctgccccgtccgggaggtgaggggtgcctctgcccggccgcccctactgggaagtgaggagcccctctgcctggccagctgccccgtctgggagggaggcggggggtcagcccccggcccggccagccgccccgtctgggagggaggtgggggtgtcagccccccgcccagccagccgacccgtccgggagggaggtgggggttcagcccccctcctggccagccgccccatccgggaggtgaggggcgcctctgcccagccgcccctactgggaagtgaggagcccctctgcccggccagccgccccgtctgggagagaggtgggggggtcagccccccgcccggccagccgccccgtctgggaggtgaggggcgcctctgcccggccgcccctactgggaagtgaggagcccctctgcccggccaccacccggtctgggaggtgtacccaacagctcattgagaacgggccatgatgacagtggcggttttgtggaatagaaaggggggaaaggtggggaaaagattgggaaatcggatggttgccgtgtctgtgtagaaagaggtagacatgggagacttttcattttgttctgtgctaagaaaaattcttctgccttgtgatcctgttgatctgtgaccttacccccaaccctgtgctctctgaaacatgtgctgtgtccactcagggttaaatggattaagggcggggcaagatgtgctttgttaaacagatgcttgaaggcagcatgctcgttaagagacatcaccactccctaatctcaagtacccagggacacaaacactgccgaaggccgcgaggtcctctgcctaggaaaaccagagacctttgttc

SEQ ID NO: 42052 - DNA, 894 bp, Artificial sequence
  DNA replication origin
tggccgcgcggaccccgggatggctctccgagtcccggccgccccctcccgggctgtggcggggaccggcgccctgaggggcatcccttcctcctcccctctccctcccctatcccgtccccggcgcgctccaattaccctgcggccgtgccaaggcctgcggctgcccccgggccgcccccgcgtccccggagaaatgccagggacagaacgcgcgggcaggagggcagaaggaggcggctccctgggggcttcgctgcgctgcaggggacccaggcgaccctggggcacggccaccgttgttgtggtgggggggcacccccggggtccgatgccagagagctctcttagggaagccctcaggcagctgcgaaacctgctccagcatagatggtgataaaacccaccctggtttctaaattaattatactcaatccgcctcgctctgccggccccgagctacacttgtgtatcgaagggcgcggtagcccctcggtgggggtggaggggatgctctgttgttggctccgagaaaccccctttccaggactgtgtgcgggaagtgacagaggccagcggagctttaaggaaaataggggcaggaataggggacagagggaagcctttctccagccagtacccccgtcgactccccctcctggaagcccgccctgctgccatcactggcccgaggaccccggctccaggagcgggtcccgcttcctgcggtgcagtactcaattgtcaggatttctacaacaaactggcccttgtgcctccatgctcaactttcgcttatctccattgagcccggctccgtctccattcccgccggtgctttgttccctagctgcgttctgggttcttgaagtcactaatgcttagcattaacag

SEQ ID NO: 42053 - DNA, 937 bp, Artificial sequence
  DNA replication origin
acgggtcctctcgtcctagcccttggcagcgcggccagcggcgctccggacaagatttgccacgtccgggagccggagaacccctcggaggtccggccgcataataaataccgcgtgcaatgtattcactctgcggcccccggttaatttatacgcccgctccaagccgtgcgcccgcctcggcgcgcgccccggcctgtcgttcctatttacaggcgcgaggcgcagtccctcgagagggcttttttctttttctttcttttttttcttttcttcttctttttttttttttttgagagatttaggatggatgcaacgtgtcattaaacctgaaaggaactgttatttatcagtaatgatgttttccacaggcctttttcctcacctgcgcgggcacaggtaccacctgggtggtggatgcggggcgggggtgccaggaggcctgggtgggggtaaactgtgtgcgggcctagccggaggcggccggggcaccgctggaggccacctctccagactccgggaacccgagggcctctccttcacttggaggcacggtgctgcacccccgttggggggttccccttgcagagctgcctagaacagcaatgtgttaggagacgcctccgaagagcctcctcctcctcagctggcaagaaacgcagactctcggcagtgccattcttgcagcagaaaggccctgtgtgactccagcactcggagcagccgccttatctggggtgatttcccatctgcctccctgggcccaggatttccttcctgcacagaacttatcttgtcgggaagcagagctgtgcgctagaggcaggcccagcaaatggaatgctcgttcggtcttgtgttcttaatgacccataacagagtcctcagaggtgaaaaacaaaaccctccacccccttaaccatttctgtgcccatcc

SEQ ID NO: 42054 - DNA, 1212 bp, Artificial sequence
  DNA replication origin
aatcccagccaaggcaggagaattgcttgaatctgggagaaggaggttgcagtgagctgaaatcgcgccattgcactgcagcctgagcgacaagagcaaaactccgtctcaaaaaacaaacaaaaaaaccaagcaagtgtttattatgttaggtgatgctaaatgttatgcaggaatcacagccagcaacagaaagtaagcagatgaaggaaggagggtaggtggagcagcttgggcctcccaggagccgctctccgcagggtggaaggaggaaagtctctaaactgcaggaaggagtgggaaggtttgaccattccttttaatgttgtatcccagccgcctagcttgtagagctggataaacttctgtaaggtgtaagaaaaagagtccctcaggcactgagtcgttgcccaaggtcaccagctagttagaagcagtgcacgaagggcctgcaaaacagagggcacatttgacccctgacctaggaggacttgtgcatgctgtccggtttctgagctaaacattccagagggcttcttggaaactggtgcccccagggagtgtgtctgtgctcgcaagtttctgtaccttcagaaagccggagggtcccagttggagccagtccgagatggagtgggctcaagaaggaaagaacgtggggatttaattggactcagcgaacccttcccggaccagccggcgtaaactctcggaggctgtcgcctgtgcccggctctcctcccggcctggggcgcttggcagaaacgcggtcacggaaaaggggtgagggtggcaatcccgggtctgccctcccgtacacctccctgctaacccaccctgtctgagaggccacggggaccaggctactgggcatagtgtgaggacaagaagggatggagggctcgggacggcggggacacgcgggggcagtgttgggggagctggagtaagagtgttccgagaggggaactcgggcgcgggggtgcgggaaggagcctggggttggagtgtccggggtgggggtaggccggaggaggggtggtgtctcggagtggcggggctgggaactccccgggcgaggctgaggcagcatggggggccggtggtggtggcggggattggggcccccgaggcatctctgaccacaaagggccggggagcgcggcccggcggtctcagcgagccgtattgatcgaagggcgggcgcagcga

SEQ ID NO: 42055 - DNA, 1294 bp, Artificial sequence
  DNA replication origin
agtataatactctttcattttcaaatagctaaatagaatttctgtataattttcaaacagtgtttgtcttaatgactctttgaaagcctcctttttccaatttgactgctactgaataccaagtagatgccatgccctgggtgaagcattttttgtaaggtaaaaatcataataatgactgcctgtgtagtgactttcagcgcttgacacagtgcgtagctaaagcaggaacatggtccctagccacttgtcgacatatctcttttttgtgcactctcctgcctttggattctcagctgctctcccacccatccccagggctggcctaagtcaccgtcaccctgaggacagcaaaacagtatgtgggggaggggcgggagagggagaggagggggaagagagaaaaagggaaggggagaaaggagaggagacagaaaagggcaggggagaggggggaagaaaaaagggagagaatggagaaggggaacaaaatggaaaggggggaagaggagggtggggaaggagaggagaaggggagagggatggaaaagcaggcagaggagaagggaaaagaggaaaggagagaagggggaaagagagaagaggaagggaggggaggggagagaattcttctgggatggaaaaggcaggaagtgaaattcctaacccagtgataaatagaatcccagctgcaccaagaacagagcagtggtaaaatcattcaaactctgaattcctgacagtggaaaataaactcatctttgctggtgaatggaaatttagggaaggcaaccgggtgtgctctggattccacagccccatccctggtagagggcacagaagcattggagggttgagaaagggcaactggcagcctttgggccaagttgctttaagtccagagaggctgagaaaagcagctcaatgctgcagaagagaaggtggaagttggaagtaagaaaatgaaagagccaggtggcccatggtggagaggtgcccagagctggcgacagaacccaaggaaccctggttcctggggtgaccttgagaaaagacccggccagtcttagacaaggtgatgaaaggaaggaagaaggctactgagctgaagagaacaaaaatatttccccaaccccatcccgctggacagtgaagcatcttcagggcccctagcctgggtgccggacaaaagacttggaggtactggaatattgggtctgtgccccagccctatccgtgcccagtgttgggcacccccagaggctaagcttggccaaaagctcctcaggcttcc

SEQ ID NO: 42056 - DNA, 793 bp, Artificial sequence
  DNA replication origin
taagaattctccagggcaaggtgcggtagctcatgactgtgatcccagcactttgggaggccaaggtgggtggatcacttgaggtcaggagttggagaccagcctggccaacatggtgaaaccccgctctactaaaaacacaaaaattagctgggcgtggtggcacacacctgtaatcccagttattgggaggctgaggcaggagaatcgcttgaacccgggaggcgtaggttgcagcagtgagccaagatcgtgccactgcactccagcctgggcaacaagagtgaaactccgactcaaaaaaaaaaaaaagaaagaattctctagaagcagagcctgagggggaagtcccgtgtgagtgctttatggagcaagtccttgcaggagaagccagcgagagagcgagggcagcagcgcggcagggaagaggtgaagcaaggagggaagctcagcggaagcctggcctcagcctgatcccagggcgggggtgggggccatggagggtccagggcagcagagagcacggaagagtcagagagtgagagggcaagagaggaaagtaaggcagcaagagggcaagcaggagagagtaagccgagacagcaagagagtggcggggtgatggacagggggcatgaaagagggcacagagcggggaacagagcaccagggagaagaagagagtaagtgaaagccagcaagcaaggaggacgggaggaggaggacagagaatgcagggaaatgaggggatgggaaacatatttctggagtgtgggcacaagagagggaaagc

SEQ ID NO: 42057 - DNA, 1670 bp, Artificial sequence
  DNA replication origin
ccagggcgacccgaagcgcaccggcttcagggtgcgccctggccagggcgtggggtggagggtcacataagccacctggcatccgagggtggccgcctcgccccctcaacgccgctctccagggaaggaggcggcggggtcaccagggcgcagctgacagccccaggccccggccagggcgcaccctaaagaagagggaggctgctgcctgaactggcctgggggcagagggaagtgggccccgcgctgtggaaggccccaggctggagcgccggggacagctgtccaagcggcgagggctaggagtggcctcgcctagcgctgagccggccaggccctggaggtgctccgcgccttctcggccaaaagccagctccgcgccgctggcggagtgggagggaggcggccaggcgagcgccccgccttcgtcgcccgcggtcacaggggcaattacactcctcgctgcagacggttaccagctcgcccgcgcatccctctctcggctcccctctcctcccctctcctctcctcccctcccctcctccgcggaactgctggctccatattagcgagggtgccctggcagcgcgaccgaggccaactacccctggggaccctcccgaggctccccgcaccctgcacaccctcaagatcgccaaggcgagcccaccgcaccccacagcgcgtcccaagggcaccacagccgaggaagcgacttttgcggtagcgaaagggtggcagtacccagctccacgcgctgcaagactctagcagccgcgcttcaccccaaaactctgcccctagccagcacagctcccctagcgccccaaatcccaggtgtgcctgtttccctggagtcccgccggcgtgctttgctattcgcagctcgacgcctagacctcctgactgcaacctccgaggcctttgcgctcccaggcgtcctttgctgcaagcaaacaggcccccaaccgccccctatggtttgtactcttctggaaggtgtctttggcgctgtgaatgcaaactcaggctttggattaagggcttcattttcaactaactgtgtgatttgaggccagtttcttaacctcagtttctttatctacaaaatgggagggatattcgtataagtgtggctacgaggtttaaagaagatatagttatatgtcaaatgcttagcacaaagtcctggtggttagcattattattaccatatggccagaactgtgaggacattaaaagtgaagtaggctttttcccaccaggggtaagcctcgcggagtcctaggacacatcccacaaaccgaggtgaacctaagccaccggctacgtctgaagggaggacagacgagacgaggggcagccaactgagcgaatcactctgccttccgcctttgcaaatgaatagggctctgtctacagcttccgccattcctacgccagatctgcaacgcctaaggcttaaacttggcgcggcggtaaatttagcccgaaggcagcggctcctaaggggcggggatgtctccttggaagaaggaaagggaacagggtaagaaaatggagttgcctctaggaagaagaatcaggcagaggaaacattcagggccgctggcggaccactgacaaaaagaaatcggacgcaaaagaaacctccccagaagaaactgggc

SEQ ID NO: 42058 - DNA, 1335 bp, Artificial sequence
  DNA replication origin
ccttttcctcgttttctctccctcttttgagtctttagctgcaaatcctgcactgctttctgagggttgtcctcagtgtttccctccctgaatcgcacacccttttgtccctgcctcctggcttgagtgtgactgctcccttgcacgatgcccaccccattcccatattcaagttgcagtgtagaagctctgcaggccagaactgaactgcggccctgcgagagaaggaggcagcttgacctttgcaggaagggaagagaaggcagattcacagctcgcagcgctgcagggagacacagagatgcaggcgttgtcacagcaccagcagctctaaggggagcctgtaagaggaaaccagctccaggaggcgagggagcttctgtgcggagtgtgtgccccagcgagatgcacaggccgcgcagtgagagaggaactgcctgggggagctgtggctgctgccagctcagcgcagtgtgggggtgggatgggggctcagagaggctggggggctaagattagggctgccgtggaggatggggcctctggagaagacaataactaaaggaagctgctctgaagaggccagaccacctgcgtatggctcatcagatggggggcaaggtcccagcagcttaggaaagtatgccctaggaaagatagatttgccaaaggacacagagactggagcttggttgggtttttacacattaatttttgggggtggcatctttgagacaggaccttcctagggaaaaatagagagccctatacttctaaatcccaggggatcccaggcgcaatgagctactcagcgggcagcccaggcccacctagggtttgtgtccgggcaaggggctccagagcgtgcagcccacataggtccctaaccaggctttgggggagggggtgggtagtgaaggggtgtgcccgctgtatatagaggcagctgccatttgagggtggaggtggggaaggtgatgcctcagcttcggcgctggaaaccattgtttgagtctgcacccagcgcttctccagcagggctaattctccacgtgtccaattttcgtgtctgaaaaaaaacagcagcacagaaacaaaaccatatgacaggactgggctgcaaaccttgaagaatcgagagggtggcggaggttgcggctgggaagggggagggtaaatgtgtgtgtgtgtgtgtgtgtgtgtgtgtgtgtgcctgtgtgtgtgtgttgggggcggtggggtggcgcacaactcaaagtttcggctatttcctacccgatctcacctcccggcgtgctcatctgatgcagttccaactccctcaaacgattccgc

SEQ ID NO: 42059 - DNA, 1289 bp, Artificial sequence
  DNA replication origin
ggcagggcatcctcgagtctcccgcacacgtgtgcgtgttgtgtgtgtgtgttgggggggtggctagtgtacgtgtataggcttatggggacaataaaaggagtggggtgcttttggcagccgctacgtttctttccgctgagacttgagaggccagggagcagaggcggccagccgagtgggcgagagcccggcctgacgtggggaggagacgtcttctcgtcgggaggctaggtagcgtgcgccctcttccctcccgtcctctccccgcgccgcgccgcgccggccgcagccggcaggctcgctcctctgcccggtgtctgtttaaccctcaacccctccgcggcagctgcgggcagagggattcctggccgcgctaatcctggggctggaccccaaccctggtcgcctggagcgcccttagccctcccgaacctcgggcccgaaggtcccagggtgccggcactcccgccacccaaacgggcctgggggccgtcaggggtcgacagaaggggacccttggcaaggtccccattgttcccccggggctgggaagctgactcacgctctgagcacagagcgatgcggagtgttttctcggtagcctttacccgagtgctttatttagacaggctttatttacagtacacatgttttcggctcgttattctggaggcgggaatggaaactgggcagagcaggagttctccccgtcagcctcacgtttggaaggagttgagagtcagccgagtcgaaggatcccgctcctgcttgctgtgttctctagggagataatgtcgaagaaaacagtgaaggggtgggagtggagggcgctggggaacacagagcgtcagcctctcccatagtgcccacgcttcaaaatgcataacacccagaggaaggtgagacatcctcatgcccattttagagggttcagagagggcaagggccgcagaaggtcacacagacaacaatcggttgtgcgaaaagggtctttaactccatttcttgggcttcctcacgggtttagacctccaggattacccaggtcttggtctctcgggattccgggaagggtctttcctggcgcctcgagtggaggtcaaggccagccaggcgactggaaggcctctggttgccagtctgcagtcaagcatcctttttggcagcggctcagtaagtggggtggtctggttagggactgcaggaaattgtctgagctagattaaatattttacaaaaccttcggggggcctacggttgacttgaagctggcaatgttaaaccaa

SEQ ID NO: 42060 - DNA, 1044 bp, Artificial sequence
  DNA replication origin
tttacgatctgggccgggagctggtcctagcgcggcctgagcctagggtggggcgctggctcccggagagctcagaggtcggccaggagtggctgggtgaacctcctcttcctcgtggggctagggcgcctctgcactgaggcccgagggtggggctggatgatttatgagccgtcaccccaccccgcctctcccgtttcactcgttttcctcgtcttctccagctcaaacccggttcccaaagtctatccccaaccctgcccagcgaccatttggcaatttcgggctgttggagcgcggctccggctcccgccccggcggggcgcgtgtgcacagagcgtgggtgaggccccgagtgctttcaccaaccgcactcctgcccggggcgaggagccgactagccgagcccgaccaggctgggcggccgagagcggccttggccggagaagctgggaggaagggctggctgcgcgactccggaaacccccttaaggtcaccgggcgcggggaaaccgccagcccacaccagagcagaggccactgcaccagtcgggaccaagccgcaggtctccacatggcctctgctctggggtatgcagttctgcaaaggaaacccagaggttgcgatagaagacgtagcgcggaggccaccactggtcccaacactgtgtcttccaccaaaggggtgccgtttcgctcggccttggtactcactctgtgagcgatggaggcagggcatcctcgagtctcccgcacacgtgtgcgtgttgtgtgtgtgtgttgggggggtggctagtgtacgtgtataggcttatggggacaataaaaggagtggggtgcttttggcagccgctacgtttctttccgctgagacttgagaggccagggagcagaggcggccagccgagtgggcgagagcccggcctgacgtggggaggagacgtcttctcgtcgggaggctaggtagcgtgcgccctcttccctcccgtcctctccccgcgccgcgccgcgccggccgcagccggcaggctcgctcctctgccc

SEQ ID NO: 42061 - DNA, 1166 bp, Artificial sequence
  DNA replication origin
atcaaggaggagtaattaagccctgaacagctacaaaaattcgtgggcccccatctataccatagttgttccatggctttgttttgggtgctctgagttccatgactgagtagcagacatgggattcctattgttccttgtaaagaaggtgggtgcccctctccttctctgaccctcatcccagcctttctgggactcccaggctctgcacaatcagtgagagactcgcttgcagattgcaggacccctgcattttacacatcttttatgcattaaaagttcctttgtgcttcctgtgtatactaatgatagctgttgttattagccttacggtatagcttgttcccttcggtggtggtggtggtgggggggggtggcggcgacggcgtttgtgttttactcctacaaagccctggtggaaacaaaagtgcattgacacagcctttggaggcatggtgtggaacatttattctggatttgcccccaggttgtgtagattcccaagtggggacccagttctgcagggactagatcaaagggggcaagtggtttctttttgcgtggagggaagatagtaaggagggattcctggcttttgacttgggtttctgttgccgggtggcctcctgtgaagggacacctgtttctaaatttgccctctcttgaatacacacgtggtttcctgactccccgtgtggcaaaaccatgaaggaaagtgaaaagaacaaaaagccggtggggtggcctggacagattatccggggagacgggcaagtgtcccccgttggcctgtgagagagaggttgggggcacctgaccccgggccatgggctctgcctggaggaggggagtgtagcggacaatccaggttcggcagcgaccctcagggtcaacccctgcagattccaccccggaccccaacgcccgagattcgcacccctcccacgttacagtaggcgacgcttggctcacatctttgtaaggggaagcgtccagaggagcagcgctctagtatgatcggaagggaacccagaacgatggcgaggaggggtctgccgtgcccattccccgggtgggctcggcggcgtttcccgggaggtctcggattctccctgcgcccacccaaagtttcttttcgtcagattcgttgatggggagagaaggtg

SEQ ID NO: 42062 - DNA, 1397 bp, Artificial sequence
  DNA replication origin
gcccggcggacccggagaggcgcggcggggcggggaacttcctgggtccatctcggccgccccgccccacccttctccctccggcccgaggccgaaaggagctcacaaggccctttgttaggccccgaggtcacactcgtgccccgggggccgccgatgggtgggagaaagcagtgctgcgggtcaagaggagcctccttattgcctcggtgccccagcccatcttctggatcgggcccggtgggggcctcgcccaaagctgggtggggaggcctgggccggccctgacccgccccggcttctttgccagtgtttatggccgacgggattccgtctgtttgcaaaaccggacgcgctgctgaggcctaggtggtagagccaggagaagccgccggggcgggagtaaatggtctccccccagccgccctggtggtagccgagccgcgttcgtcgcgcgcacttggccgggggcgtccactggtctccagccctgcccgacggctttctctggttgccctcaacgtgttcatcaggaagggatatcttactttttgttgggtggagttcattaacgatgcctttctgcgatatttctgtagaaggctcccttttggggcgcaagctcacctccatgtgtttacaatcgagggtctcagaaacgggggtcctcactccgtcattgttttagagctgtgtctcccacagccggcacccacgggctcggctctccatgattagagaagcggggaagtccactcggagaagatcctgacagcataaaaaataatttgtgatctaaaagacagtttccagtataatctcattatgcaccacagactcccgatgttattttgtggaaggcggacaatgatcaatttacattgacccggggctgggcgagcttttagatggtaattgccatattgatttgcatgcaaaaaggagacctgctaaaattaaagaccggaagctaaattaaactaaatttattgtctaggtgcaaaccaggggaactgttgggggatgggattgactcaggtcagggtgccaggggcagagcaggtgagaagccctggagcttcggaaggtcacaacttgggaagcgatctttgcccttgtgatttcatgtggggagggggaatgtgtttaaggaaaaaagttataaaaagacaattttgcattgaagtcactaggatctttcaatgctaataggaacttagagggagaggagaggtttatagggttataggggtcttccagcaccatttccggcgtcccccctccatttctattgttctgcctggccagacgctcgcagtcgtgctagggacaccaaaaacctcttgcatttgaagagttaaaaaataaataaaagcagcccgtcccccccttcccgc

SEQ ID NO: 42063 - DNA, 1827 bp, Artificial sequence
  DNA replication origin
ttaaccctttaaaggccgtggtggggtagtgtaatagggaaaggggggcaaagagcctagtggaaattcctggaggcagagtagctcgcagtggggaggagctgtgagtctgggcctagggttttcctttctcttatgtgtgcacggtcacatcttggtgcatcgggctcgattcttccacaaaccaaacgcagctgctagatgatctagtttgaccaggtatttctcagtcggggagctgtgaacacacacaatgaacaccctcactttaaaaactgagtttggaagacagacgtagactcaatgttcccaaagagaattcatgcgggtgttcaaggacgggaaggtctgcacatagctgtagtcgggtggggcctctgactatgactgctgcagaccaaggacctgagcctgaaatgccccgccagcatgtacaggtatgcactgaagagagcaaagcggtctttgagttgtctctatataaatagacatacttttaaccaggaacttgtgaggagttagatatgtgcaaggagacagcctccaaagaggagctggacactgatgtgttgtgagatccatcgtttgtgtgtgtatatatatggctaatattaaattggtctaaaattttaatacacctctgcagacatttatctagttctttcttcagcttgaaatgggcggatgggttaccctatacataaataactcattactaacattccagtctcctcctccctcctcttcctttctttaagagtttgtgatcttaagggatcctctgtttacatttaaactgcaaacccatattggtctggcctgggaaagagccacattataggcaaagcaaaaagaatggaagtagtacgaatgctcagattaagatgtgcgcttgaatgacatgtgctgagacaaatcaagacacttgggctccgttgcccaaatggaacaagagatacataagagataaagaactggccaaggggaatgtaaacatgggtatgcaaatacagagatgtatagcgatattctgagagaaaaatcccagactttgttgagctggaaactggggcagaatttctgtaagtgcgttccagagacaatagcccatttaaaggtgtgaagagggtcacttggaaacacaaaaagcattcatatgcatacatccatgcttagatacacaggctgaatgacaaacactcctcaatgcctgacgaagactttcctgccgagtgagtgagaccgacttgggtacagaagagtgggccacacaaccacattcacacacttattcacagggaaataatgtgtctttggcttgaaggaaactgagggccacgctagcagcctaaaggatggatggtgtgcagtgaactaggattatctctggttatagtttctttcccttctaggggtgaggtggagtgggcagcgggttggtgacgagcaggtaggagcctttctgaagagattttgagttcctgaccttgagtggctggatcgtgtagccacaagaggggtagctttccactttgtggtcagtaggaatggctgttgcactgctggggtccaatttgctaaggtggagcagggcctcagtgggctgggaaggagaacaggaagaagtgcggcctctgggaggaataaaagggaggtatgctttctttcttttcttttttttttttcctctggaggagaccgtggcggggacagcctgtgttgggtggattagcaggcgcctcggtgaccccagacgcgcacgtaaactccggctagggtatggcttgcccgcggcgtcgatttgctgcggtccctctttgtctaagc

SEQ ID NO: 42064 - DNA, 1070 bp, Artificial sequence
  DNA replication origin
gggcggcgcgttgcgtgcggcgcctcgaggcccgcgcagcccgctctttcttcctgcccgcggtcgcctccactgtgtctttaactcgctcccgctcgcgtcgctgcctggctgctcctccccgcctcccgcgcctatctcttgttctctaagcacgacgcctgtgctccccgcccagtttaggattagacaagataaaaataggactgcccagcgcgcggagctgtgactgtgccccggcagccgggctggtgggagcgcggggggccggagctggagaggacccgtggtgcgctcggagcggccagtgcctgtgggccccctacccccaccccgcaggcaccgtcacgctccccgggttctgtccgccgtgaaccgtgcgggccgggggacctgggcagggtctccgcgctctcgcgggtgttgttggtgtgccggtgatagatcggtctagacaggcatgcaggctccctcccggctgaaggactggaggggggggaggcgcggagatggcagcagactctgtgagctgcgagtgagcgagctagcctccgggcccagcgagctgggtggagggaaggccgtgggggtttctcttaaccctttaaaggccgtggtggggtagtgtaatagggaaaggggggcaaagagcctagtggaaattcctggaggcagagtagctcgcagtggggaggagctgtgagtctgggcctagggttttcctttctcttatgtgtgcacggtcacatcttggtgcatcgggctcgattcttccacaaaccaaacgcagctgctagatgatctagtttgaccaggtatttctcagtcggggagctgtgaacacacacaatgaacaccctcactttaaaaactgagtttggaagacagacgtagactcaatgttcccaaagagaattcatgcgggtgttcaaggacgggaaggtctgcacatagctgtagtcgggtggggcctctgactatgactgctgcagaccaaggacctgagcctgaaatgccccgccagcatgtacaggtatgcactgaagagagcaaagcggtctttgagttgt

SEQ ID NO: 42065 - DNA, 1321 bp, Artificial sequence
  DNA replication origin
ggttttaagttatgagcccccaggggtgggtgtagaatgtgcttgtgcgggggcagcgtcgtggagggagggcgggggcgggcgagacctgggccctccgctgggcaatggggagtctggtgggtagccctgatgggcgtgtgaaagtctgcggccggaggaagttggtcccactcggagggcgtgtggcaaggaggctgtaggcgaagaggaacttgcgcaccggggcaagatcctcggccaaggcggggagggcgaggcgccgcggggcccgcgctcggagccggcgggcggctgcgccgcagagcctccgccaactcgggggctcgcggcggcggtgacgagcgcctgctgtttacggagagagccttggggcaccgtgtgtggagtagggcggccgaagtcacgcgtggtcccggcgggcttcccgccgctcgcacgctcgagtgggcccttcccggggtcccggagacggacgagtctggcagcgtgtaggccgtggccgggcgaggcgtaatttgctgttaatgaatcttttccagaaagtccgcgatctccagctagaggctgtgagtgcccgcgcgccagggcgcgcgccgccggcgtctggagggtgggggtggggggaatggaagagcgaagaaggaaggaggagggttatgtgtatttagaaacaaaccttaaaaagaaaccaacgcgcttcaaataggtattcgcacagcctcgctgcgtctagactagacagctcggggttttagctgtgttttcccccccttttttcgttttgagaagacgctagaggaggggtagtgtggtatttggttctaggggtagtcttttggagaaagatccttaaaatggcctgggagtaaagactaggaggaaatggcccaccccagaaggtggtgggtggtgagtgcagacagacttgggtatttctggccatctgacacttcctgtggcactggaaacggacaccgcgggccgaaatcaatccttacgaagtgttgggttcggttttgccaacagaattgcttgcgtggaaggcattttaattgtcagcctcaaagattcctgtacgtggacacttagggaatacgctcgttccttgaccctgcccactcctctctcgacctgttatctggtgtgggttttgcagtgttggttttcgtgtttattttgggcagggtttcagcgcgtagagcggagtggggggggaaggcgatgattaatatgccatccaggtttaatccgaggctggccttcagtgtgcgggtatacaccgccacgcacaccaattgccttggggtgtttaggggag

SEQ ID NO: 42066 - DNA, 1254 bp, Artificial sequence
  DNA replication origin
tgccgccgcgcggctctcggaacggcgccccaggagcctctctgcgtctggcagcgccgctttcggcttgcgctgggatgggggccgcagggtggtctcggcccagcccccacggggaggggcggggaggcggggtccggagaccccgcgggaacggccgcgcgcctcccagcaccccctcctcgccgccgccgccgctgctgctgatatggcgggcacgtgaagcgcagcttggcgccccggcgccagccagggagcggcctgccccgccgactcagcttacccgcgggcccaggaacgcggaaccgagcctggccgggctccgcggagcccgcacctccgcccgcagctcgctgcggccccgcaccctctccccgcctgagcccggccttggggccgcgccaggcggctcgcccgaggggaactcgggctgactaatgggacgcgtgtgggccttacgtgaggcccggctgtcagcggatacccgcttgctcggagcttagaccgcggccaagcttttcggggaagggcgagaggaggggtttccccgctgggcggtttcagctccccagggacaatccgtccgcggcaggccccaacctttggatcttgcagcctggcttggagacggtagacttggcatgtgccggacgccacggtgccgacccggtcgggggcagggggtgggagcctcggggttgtgagctgggggtgggcagaggctaggtcagcttggtctggggcgcccgccttgaggtttgcattctggggctagccactgggccggggggaatttgcagggcgctctgaggtcgtggagtctgataccaaaaccttcctcgacaaagtcttccggaaaccccttcgcgaaattcctgtgcggaaagaaggatttctaaaactccccgagggtccggttcggctgggagctttcgggttctagggagtgtgatttcctttctctccctttataggggcctataaatatcagaagagtttcttcttatttcgcattaacaaccacttcatgttgacatagttatatgaccctcccaagtataactacctgtttagtttgaaggcactgagtgcgatggcgaaacacaaacatcgaccagtaactaagagaaggaaaacccagccgcgagcttgggttggatacaggataaatcctcatcacgcatccctggttttattcagcctaattgcactagtaatcctgccccccgcgagaaagcctgaaatcctgcagtc

SEQ ID NO: 42067 - DNA, 1167 bp, Artificial sequence
  DNA replication origin
ctggccggctactgccaaaatccccggacccctccccgcctgcaccgccttccgttgccaccacaagtttggtttaacgagagctcgggacaaaagcaaacgttttctatagaccccgaaaacaaaggggaaagagacgcgcggggccgcggagaagcggctgctagcgtaatggtgccaggccgaaagcagagcattaaaactgcaaaagccgcgcgggcgggaggaagtgcgaggcgggaggcgggagcgcggggagggcgggaggcgggagcgcgggcgggggaggggcgctgcgccatgtttccgtgtcacccgccgagtcgtcggcgctgggctcggccgccggctcccgcctgcctccgtaacagcagaaagcgtgcgattagcagccagacaggcggggactccgggcccgcggggccgccgcacacgccgcccgcggcccgagcccgcgccccccgcccgccgggtaatcatcctcctcgctgcagcgctgtgtgcactctcattagagtagggaggcttttctctgtgcactcgctcggctcccgctggcaaaacaacgccttcccgggccgggccctgggccaggagagtcggggagggtgggacggaggtggggggtgggtgaggcagggcaagccttgcaggtcagctccgccgccggatctcctccggacacggaggagacggggagcgtccattggcccttccctaggtggagtggcaaagtccgagccccgcagccgaccctacgtccctacgtggaggggggcgggtggagtaccggtgccgccatgacctactcccgtcccccgccggaggctagagtagggctgagggggagatgagtgtgtctggtttggagagcgggggcggacactgggaaggctcccaaaacaggttttgccccatctgttttatgaacgacctcttcaggccagaagccggatcccaggggtggcggcccttcgaccttcgaaaggagacccgggcccccagcaggccctctggcttcgcgctctgtcgcctgcagtgggtgggagatgggggtggccgaggcttggctgctcctggccctgagcttcggagccctattttctcctccgcgatctctgcacacaacagtaggcagcctctcacagcagcacgcgcccagctgca

SEQ ID NO: 42068 - DNA, 1183 bp, Artificial sequence
  DNA replication origin
ggaggggcgccgccaccccagccagggggctgtgagaggggaggggcgccaaacccgcaccccagggcccgcgccggctcgggcgcagcggggctggcactggtcaggaggcccgccccgcgggcagtggctccctgccagcgccgccaagtcggccgcgtccccaggctgcctgcagaggcggattagggaaggagcgaagcgagcctgtgactaatcgcggggcctcggaccggagcaccaaggccatgtgcgactgacaggaccgacactagcagaggacacggcgacgcctcgcttaattgcaggcttaaaaaattgccgcctgagcagctctggcgcggagagccacggcttgcgcgtcgagctagggagcgcgcgcgcttgggtgggggcgggggttcctgctctctcgctccaaggttggaacgtttggcgtctcctggaccgagggacctggcccttgcgtcccccactctgctgggtcgccccgccccgcgtgccgaccaagtgtggctgagcccgccaggagagtacgatccagcctccagggctaggtttctgacccgaccctttccccctaaatccgacgtttccccgctttcgccctagatcctatacgggagggggctgtgcagttgggggtgacagattccaacaaatccttaaaataaaaaccacacgcacgaaagaaacactttctcttccctccccttcttcaccgactgatacaaagccccgaatgaccaaagggaaagaggtaagtcggggctgcagggagcaaggtcatcgagtgccaaaacctcggggctcacagacacgcactctgagttcttcacccctggtcacagtctctgtggcccagaccttcctggagcactggggcctctcgggggcgaagggagaagcgtcgggaggccggcggctctgtgttggggagggggagtgggagggagcggagaacccagcgagagaagtttccaccacgctctggccggctactgccaaaatccccggacccctccccgcctgcaccgccttccgttgccaccacaagtttggtttaacgagagctcgggacaaaagcaaacgttttctatagaccccgaaaacaaaggggaaagagacgcgcggggccgcggagaagcggctgctagcgtaatggtgccaggccgaaagcaga

SEQ ID NO: 42069 - DNA, 1353 bp, Artificial sequence
  DNA replication origin
cggcgggcggggagggggcgctcctagagcctcctgagcggagcggacgcaggcatcttccgcaatccattcatgcactgaagcgcgtgcagagctgctgatcgctgccattgttactcgcgggcggtgtgggagctgagcctccactctggcgagagataaatggcctctgacagcccctcctcgccaagagagctcctcggatttcaccgcgcggcggctctcaggtctgtgcctcgctcgcttcccggtgagaacctttaaatcagcctctcggccctccctcctcccggacactgtcccccgcccgctcaggccccggcagggccccgggcgcgctgtgtgcagtctcggggtcctctccccacctgggggttaaacagagtgggggcgcagggaggacctcagggccgtggggggaggcaccgggctccccagccccggctccgcgcctccgcgggagcggagccccgcgccccgcctccgcgcccacgagatggatcaggctaccgtgcggagagcgggctgtaaatatttaaaaagtctctcgcgcgccggcagtaatggctttcgcagtcggaatgtgtgctaggggaagaggaagggcgacgtgtactgtgttgcagggtggggaattgttcctacgcttccccttaggtccggggtgggctgcatgttcaggcttcccgatttcccgccctccgcctctccgccgccgcgtcccacgatagcatcgagaacgccagtcgacagggaacttgagcatagccgggcaacagaggcccggtcgaggtgaccccggagccaccctccccaccggggtctcccaagctcgtgggttgcgaatggtcccagacccctaatccgggtccgcttctcgctgctgcacaggggagggcgggaaacgcacagattggagccccctgagtttgggtggtcgcaaaagcctgggccggggtttctgcagagggggcctggaccctgtttgtgcctttgctaccctccccagccgctcttaaaccttgatccgctctccaggagacccccacccctatctgaatctgaaagtagctttgtggctgctgggaccgaaacctgggaggaggcagcacggagagtttggggcggggagggggtagcctccaggcttagtggaggtcacacgtggacctgaacggggactcttttgcctttctggtgagtgtgggcctgggatctttaaggccaagccctgccggatggtagaggtgggggagggggattcagccttctcggcttggctgggagagacttaatgggcccaccacagggtgtgtgtcgggtgaggttgtcccctttgccagcggccactcc

SEQ ID NO: 42070 - DNA, 1475 bp, Artificial sequence
  DNA replication origin
agggttgagggaaacctgagtctaggagtgtcttcacgttacactgttgctggttatgggaagtccagcttgaatcccgattgctggaaggctagggtgtgggcagtgccttcagggtattgcaattgcgaaggccaaatggaaatgcggtggaaagtggcagccctccagcgccgccaagtcagataaaaagttgcccgaggccctgagagtggaggcaccagctctctgatggccttgtagacgccctgagaacagtccgagctcctcaaacccgctacctttgtcctgggctcaaggagggggcggaaaccagaggggcccggattcttgaagacctcccctggggaccccactgtctgctgggaaggcctcagccaactgtaggcccaagccctacagagaccagctctggcaggaagtcatgccaagagtctgtgtccgcgtccttaggcgtgagaatggggctatgccaggctgggcctggctgcgcacgcctccgcttcgggactcgggcggctgctgctgccttcgttttcgggtcttcgaccgagcctccctggctctctactcccgctttgtcttgctgtcagcttctcgcctgtcctcgccagtctcctaggtcggcgggtcgcgctctgcctctccgagtgcgtctttgcgcacatgtggcggtcttcctgcaacctgggtcagctcggcctcttcccgcggggtacttggctttgcctttggatcgctgcgagtgtccacttcttgcgctctccttctccccacctcgccttaggcagacgcatcccgggcttggcggtcccccaaacagaaatatccccgggtttctggtttagctccaccaaaacaaactcgagggattggggtatccttcacttgcgtttcccgcttctctcagccctaggccgaaactggagggtttttttgttttgttttgttttaatgagacctactttgcagagttgacggggaacatttctgcggcagacttcgaggtctgtggcgctctcccaactttcaagactgtaagccgccaagaaagagaatttgggtacatgattttgccgctgatgtgggctgggacgagggtatccagagtgcacgtgcatgtgcggatcgcagggactctcggtggattagccgccaaaagctggggagcgccgcgtatggacgctagggctgggggccagcggggacctacaaacaccccaggcggccgagcaggtgaaggaaacgttccgagcccgccccctcctcccgggcccgcacgccgccggcctttgcggcggaaacacggtccaactccttgaaagtaaacttgccgccaggggctaggggcgcgaagaaaggagggggctgacagcggtgtctgcgtcggggaggccaggaaggcttgtgtcaaatttcagcccccaatgacactcggtggcgaggtgccaaggccctgggaacggcggcggggg

SEQ ID NO: 42071 - DNA, 947 bp, Artificial sequence
  DNA replication origin
atcctctggctagtacccgagccttggattctggcacgaagcctcacagttccgataaggctttacctcccttcccacgtctcgaagaaaaacaccccctggaactgctggggtgaactcggagcctgaggccagggtcagcggggggacgggtccccaccaccaccaagttgccggcagaggtaacagctgtggaagggggaggggagcgacaggcagccacgactgaacggttgcgatctagaaaattcaacaagaggccgcagcggtggcggcggcggcggctccaattagctgagccaactggggaggcagagagcgagacggcggccccgccgatcgtgtcccgggcgagcaggcaggcgggggcgcggggcctcgagctgccccggcggccctcgctcggcccctcccgtgggttctcggagcgcgcctggtgtttacacactgtcctttcgacgtgagatcaagtttcaggccgcgctggaggcgccaggggccggccacaggcccaggagaggggaagaggtggagcgggatctaaggcagcgctgcgccgacgagaaggcctggcgctcgtgggcacagctagtgcagcggtccccacggggtggggtggagagaagttcactgggcacggtgggtaggggttggtggggttgcaggggggtatccggagagagaaacacctccaagtcactagagtatttgtctttcgctcactcgggccggggaatttagtcctgcaaggggacaggcggcggcggggatatgctcagaacccaggcgcttcgacagccctgagcgccccttgtgcgctcttcacccctccccaccccgtccctttgatatactaccggatctaggccattgttacggggaggggtatgtgggccgaaggaactcggggttggagacctggagcttcccagcgcgccctggccctg

SEQ ID NO: 42072 - DNA, 1066 bp, Artificial sequence
  DNA replication origin
tccccaccccacccccaggccacccgggccccggagccagcgttctgaatctgcaggagtgcggggtgctgcggggaggggagggagtcagcgcctgccccctcctcactgaatgtctgctttgttccggaaaacaagggaagcattaggcggctgcccccggggaaacacaaaacttctttttgaatctcgggaaaggcggttgactgcattaaggagctcccgagacagaatgaggaagggaaaagccgagagggcgggaggagacagggagacttccgcgggaggccgatggtcaaagtggggggtgaaaccgctcagggtgaccgggctggagacccaggaacccgattcggcgcgaaggtgccgcgcgagttccagcgagcagcctgcccggccaagtggcgcctgcccagccgtcggccgtgccagcttcctgccctgcccaggaccgcggagcagtcggggacgccgccgcaggctggcccggaatcgcaggacagcggcggggggagggggtagccaggccgcaagtaaactcgcactagagctttctgcacacctccgccctagagagggggcccggacccccggtctgtgaggcgtcggctttggccttccaaccttggggtgcgcgaggaagcaaagacccagggggcacccccaccctcgcccaaggcccgagggtgggggacagctgaaatgtctttggtcttgtttgatgaccgcttggcggatctgctcccatccgggttctgccgttccgagagtgccgggtcagtgatacccaggccggtctgagcaggcatgtggatgagcaaaagcaaatctgtcgctcctccgaccgccacccctcacttaacctttcctgcatccaaggaaggggagggcacccagactctgccccaccccccgcggggcgctccctctgcctcggaagctgagactaagagcgagggttttccccctttcccctgggctcgctgggtttctaacttcctctaaacctccctcctcgctccgaaaagccccgaggagaggagctgagaggaagcacgccgctagt

SEQ ID NO: 42073 - DNA, 1673 bp, Artificial sequence
  DNA replication origin
cagcagcggcaggggatgaggaggtgaccttagggcacccggggctgcgcgcagagccactcttcccctgcccgcctgcaccgtgggccactggagcccgagggtcgggtgctacaactgctgtcttgcttgtacagcacagaagcgcctttactgaccaggtggcctcgagggcgcaccgcctaccccccaggccccctttcagcagcctcactctgggccccgcttcgaggcgcctccccaacccctgacaggagtcttctgagccccccacgcagcccttcgggaggggagtcaggttcacctttccccctgcaacttggaaatcctagggcttaggcgccccggggccccccgccggttctctcctgtccaggccccagcctggtacgctcacgcctggggcagcttaactcgttcagctgcgctgcagatggggcctgctgctcgaagccgctgtctccagggagtcgtcaccgaaccagctcggccagccgcctgtcgtgccgtttaaggttaccgcgcttcccgcgaggggcatcgggactggaccgggcaggaggtgggtgcagctgaggctccctggccacccgagctaacgctaggagaggaattcggtgtgcaaaaggtcagcggtaacccattggccctggctacagtttagaagtcgaatggttggcttggtggtggggtgaccccagctcacggaggcctggctccaaagggctgatgtgaactttttcttgtatctgattttttagtgaagcactctgaaaagtaccaagtgtgcagaggggagaaaacacaaaacacatcaagctgcgtccttggccctaatcaggggagcaggaaggccctccagactccaggccctccagactccaggcccgctgtggggaaggtcaggaccacagaggattaggcccagtcttgggtttattgctgtacttgaacaaagtgccgggggctgcctaaactggagcaagagagaggtaattaagagggcctgcagaaggaagtaaaggctggtgtggctgctgcccagggtaggtggaggaagtgttttccataagaataacaagccggtgcaaatgttatgcagaaagactatttcaccaaaacaaaaccaaaaagttcacattctgcctctcaagctgagctgataaacaacatgcaaactttggttggaaccttgaaccagtgggaggtgtcaacccagtttacaaagggtaatggggaaccgtttctgggtacttctctgtttctaccattgtgattctacctgcattagctgctccctttgggggcccttctgacctcccaacctgagcccagcgggagatcactcagaatgcaccgcattcatcaatgccatttctggtaaattggacctcaggttttggagtgtcctaggaggcaggcagcctacactgcgcgcataccgatgtcacagcaaatgtgaggaaccgcacatattctgtagcctttactgcctttactagagaataccgtggatttcacaaccagaagtagcagattttccaagacattcctgatttcaagtgctttgagccctgtgtttttacggggcatgaagccctacctgcggttactaatgtcgaattgcgcaccagaggtgtcccagggctggaagaaatggcttgggtgtgggg

SEQ ID NO: 42074 - DNA, 1772 bp, Artificial sequence
  DNA replication origin
tctgcgcgcacgctagtatccttaggaagcacagtcaggcttgtgggttcccatcttcccgggaaatgacggctgctggcgaggacctgttcgctccgtgtttcgcaatggcccggggatcagaggagaggaccgggcggtggggcctgcgcgtggatgagggtggcggtaaatcccctctcccgcgaaggtggctgagcctccggccaccgctagtagtagtctaccctgctcgtcttgcattggccgcagcttgactcccctgcgtgccgcgggtcggtgtgggtgtccccactccctcaagcctttactttcagctcgcgaaaccccatggatccgcggctgggctgggcagcgcagacgcccagctgccctcgccaaccccaggcccagagggggccaggctggcctgggggctgggcggcccggctgcacttgccggcgttgagagaggctctgtgagccggagccggccgccgagccgagggagagagcgcatcagcccgcgcgccttaaggcagaacacacgcctttcccggaaccttgaaacccaggggagccgctgccatcttcgcgtgacgagcagcgagacgccggtgattaagtgtttctttccggctccctctccgggttgcggctctcctcctttccacagggctggaagaataaaaacctggggaaaaaccacacacaactgcgctctggtctcgctcgccatgtccgcactggtttcttagggtgcgcccacgcggggcaccccctgctcccctactccacgcctggccggggtcgagggctgcgtgcctcggtttccatccgctctagcgcaaatctcggagtttaatggggagggggcacacattgctgaagccacccgacccccattctccttacgccccccccccatggggattaaacctaaacacatgaatcccccacccatacccgggactaatccagccgcgcctcctgggattaactcggctcacaggtccataaaacacttccggcgcggccagagggtctgtctgcagaaacactttaaaattgtcctcccgggcctggagtcggaattgactgggtggagggaagtgagtaaacagacagttgtaagagacaatccgtgaggtttgcaggctgtgaaaagagctgcttaaaatatgggctgtcggggttgcctccagcaggagggtggcccgggtcctagcagacagatccaagaaaaggatgcaatatattctaaatgacattgacctggaggaaggagggtgtaggcaggagcaggctggcttcacatggcttctggctccagttcagtgaggaagactagcttccagaaatttgtgggggcgagtggccagtctcttcatgtgtaaaatcagaacagtaacacctactctgtccccctcggatgggtttctgaggaccaaaatgtgaaggcactttgtaaatgcggctcaacccttctgcttcactgtggttaatgttcagtctctcttaggtagaaaaaccagtgacttgctgattagaaaacaaagtagaaatcagccctttctcaaatctacgcaacaatgttcgagataaagggaacccaaaagcaacctaatattttgaacctccttttacatcatttcgagataagtttctgaagtaatgagagaatctttggaatgttctaagaaaatctgtcaaaaactggaggttaatggggaagaaagggaggctttaaattgggtcaaatcacattttaagaaggctgggcgcggtggctc

SEQ ID NO: 42075 - DNA, 1060 bp, Artificial sequence
  DNA replication origin
ggccattgcgaaacacggagcgaacaggtcctcgccagcagccgtcatttcccgggaagatgggaacccacaagcctgactgtgcttcctaaggatactagcgtgcgcgcagaccttggggggaaagagggcagcgcggtctccccgacccggactcttccctggcgcagcacacaaccgccacgggcttccgaagcgcccgagcggggaggaggaaggaaaagcggaggcccgggaggcgggctgcgcgcttggaagccgtgtgtgtttatgtgtctgcgcgcgcgccctggccggacgggtgttgaggggagagtgatcgtgagcaacccggaaccagcagtcccaacctggactgacgaactgggctctccagtcctgggccgtggggctccatgcctcgggctggcgggacaagcggcggggagcccggagcttcggagccgccgccgggcatctagccagctccgcgggagaagcccgggggcgcgtcgggagccaggggactggtgtgaactagccgcccccgcaggcggacgtttagctccggcacccgggagcactgacactgggcgataaggagttcctcggcaatcggctgtccccagtccccagtcacctccggcggacgtgaccgccggatgctatgcagctaggtgggccaggggggcctttgcattgccttccctgaccccttccttgccgcggaggagccacagtaagatgcctctgtacgactctccagaactttcttttgcaaaataaaggccaaatgttgggccttctagtctcttcatattttcctttggaaggttggggtccaggcagtcctctcgaaacaacccccaaacagatcactttcattacaaaacgctagagaggcaacacagccctatttctctctctggtcaatccaggccctatctctccctctggtcaatccaggccctattatcccaagctgtgcggctttgggcaaaccgcttaacagttcgaaacctcggagtcctcatctgtaaaataagaccaatactattatctacctcgtagggttgttctg

SEQ ID NO: 42076 - DNA, 1068 bp, Artificial sequence
  DNA replication origin
agccgggctgggacaagggccgggccgggcgggggtggcgcggggcggcggctctcgcagccgaaggtggaaccggctgactctgggcgctgggagcgagcggctccccgagcccggagcgagggaggagcgcgagttatggagggaccggtgtgggagccagggcgcgcggagctccgcgtggtgcggcacgggccggacgaggaatcgttggggggcgggggcagggacacggaagcgggctcccggggcgagagcggaaccgacgcggaggctgcgagggcgtctgaaccccaagaatggagtcgccgctcttgtagtcgccggccttgttttcttcttgcacgcaaatcccggaacgaccggaaccgccatccccgcctgcgtcccaggggcgccccattacgcatggcgggggggcccgcggggctactccgggaggggatccgtgaggccgaggccggggagggctgcgaggtggctcgcgggggtgcaagccggagcggggctacacaccacacaaacagcctccctttcccccggaagagcgggcgagggaagacgcgggctagctctgggggctccccaggactgtgggagccaggcgaggaccgcaaggcggaagggagtgctgcagacaaaccatcggccccacctggaagacattggtggcctcgtggccggtggtgaacggtctcacgcttccccaaagtggcgtgcgctactctagcgtgggagggaaaggacacaaacttggccatctgccagaacccttgaagacgcctgtctttggtgtccctccgccccccgcagtggcccgaaatgtactctccctcccgtagtccacgaggttcaggtccgaaacctggaaaagtagggtagcgtggtctggcctcggacgggaaacccacccacgttcttctgaggtgccacgcggggaaggcgcggaacagtcttcttgcaaagtttcccgcccctcaccccagtcgagtaagggcggctcttccggaggtgggggcggggaacggtctcgtagcggggagtggtgctagttcctcttccctgcga

SEQ ID NO: 42077 - DNA, 1089 bp, Artificial sequence
  DNA replication origin
gtaatggggcgcccctgggacgcaggcggggatggcggttccggtcgttccgggatttgcgtgcaagaagaaaacaaggccggcgactacaagagcggcgactccattcttggggttcagacgccctcgcagcctccgcgtcggttccgctctcgccccgggagcccgcttccgtgtccctgcccccgccccccaacgattcctcgtccggcccgtgccgcaccacgcggagctccgcgcgccctggctcccacaccggtccctccataactcgcgctcctccctcgctccgggctcggggagccgctcgctcccagcgcccagagtcagccggttccaccttcggctgcgagagccgccgccccgcgccacccccgcccggcccggcccttgtcccagcccggctcccccgccagctgcgccgccaccgccgcacgtgacccgcccccgtcgcggcttccgctgagctgcctgttccggggcacaaacaatttttgctctgacgcggggtctctcgggggccctggcgtcctctactccctgctccccaccccaccccaccccctaccttccgggtaggagaactcaaaacaactcgctgaccttcgggccgaccagctccgtcttccactgactccagcattccgttcaaacccagcagccacggcttctaagatttcactccgctctgggctgggggggagggggcgagttctccgggagggggtgtctcagatcgaaagagccacttcacgctctttctcctcctccgaggtgagtttttagactatttggaggccttggggaaacgcgagcagccgcgtgcaaaggagcccccccgccttctccccgcacatgcagccttgtctagtgtgacccgatttccagggtcagcagcagagggcctggccagcttcggaaataccaccaagcggtggactgtggcaccaggcagagctggggtggaggactgtgctaaataataatggtagctcctactcacgtggtctgtgctaagttcttcacaagccttccaactttacagagtgagaaactgaggcatagggaaaggtcagtcgtgtaaaactg

SEQ ID NO: 42078 - DNA, 1069 bp, Artificial sequence
  DNA replication origin
gtgatgactcttaacgagcatgctgccttcaagcatctgtttaacaaagcacatcttgcaccgcccttaatccatttaaccctgagtggacacagcacatgtttcagagagcacggggttgggggtaaggttatagattaacagcatcccaaggcagaagaatttttcttagtacagaacaaaatggagtctcccatgtctacttctttctacacagacacagtaacaatctgatctctctttcttttccccacatttcccccttttctattcgacaaaactgccatcgtcatcatggcctgttctcaatgagctgttgggtacacctcccagacggggtggcggctgggcagaggggctccttacttccaagacggggtggccaggcagaggcgctcctcacctcccagatggggcggcggtcgggcagagacactcctcagttcccagacggggtcgccgccgggcagaggcgctccccacatcccagacgatgggcggccgggcagagacactcctcacttcctagacgggatggcagccgggaagaggtgctcctcacttcccagactgggcggccggtcagaggggctcctcacatcccagacgatgggcggccaggcagagacgctcctcacttcccagacggggtggcggccgggcagaggctgcaatctcagcactttgggaggccaaggcaggcggctgggaggtggaggttgtagccagccgagatcacgccactgcactccagcctgggcaccattgagcactgagtgaacgagactccgtctgcaatcctggcacctcgggaggccgaggcaggcagatcactcgcagtcaggagttggagaccagcccggccaacacggcaaaaccccgtctccaccaaaaactgcaaaaaccagtcaggtgtggcggcgtgcgcctgcaatcccaggcactctgcaggctgaggcaggagaatcaggcagggaggttgcagtgagtggagatggcagcagtacagtccagccttggctttcacaactttggtggcatcagagggagactggggagagggagaggg

SEQ ID NO: 42079 - DNA, 1298 bp, Artificial sequence
  DNA replication origin
cagaaattcaatgagggtgctcagccggtagcccgggctagccgcagctgcagcggccgccgccacggcggctcccgggggaggaggggctggggctgacgggggtccgccgctgcccccgccgccgcctccgggcgggaccagctggtggttctccagctgcactggggccatggcggcgcaggaccgggcttggcgcaacggcacacgatgcggtcctcgagcctcccgggcgctcggtcaccgcgccgaaacgggagcgggcagagtcgccaccgcctaccgccgggccgcctcagaacaggaagccgtgcgccgaccgcggaagcccgcccccatgtagcgagaagtccgccgaccccagggacaggagcgaggggcggggggaggcggggatgggggggaagcagggcggccccgcagaggggaagctgcgcctccgcaaacgctcagaagcagcttcgccagacagccgcaacgtacatgttgactgcccgaggcggaagtcgatcggcagagcggaagggggacctgcagaggaccttccgacaggtctgtgtctgttctctcagctgtctagcaccgcagcgctggggggcgcgtgggagtgaggcggtacctgtgagcgcgcgggagagcggaaaagggagccgcgcgccgccggaaaccagggtgagggctgagccggagtcgtcaccgggaacgtcagcagttgccccgcccttaccctcgccgctctccctcccgcctccgccccctggcgttgtaaaggcgacaatttgcccagagaaatccaccatcgcttcctaagtggggcacaaacacagccaggggaggcctcctctaaatgttcgtgaattctggttctggaatcgcgaagaaatgggagcggccgcgcgcttgtgattctcaggcctttgctcctcccatacacgtccacggcgcgttacgtgggagaacgttttcgcccctttttttttttttccaaactgtgggaaaaggtgctagaaaatatgattgcgggtagagacagggccgctggcagagtaactcaattttaatagagtcgggtgtatgctgaggtcgtcaccatcccccaaatcctgtcagtcccacacaaaaacggcccttaaatcccctgccacgggctctcatatagtttttgtccttgctcttgcagtcaccgctctattctgaagggcttttcagttcatccatgcctaccgacactcccgtcccccccatcaaagtccacgtttaattttttgtacctgctttaaaacagcgattctcaacct

SEQ ID NO: 42080 - DNA, 950 bp, Artificial sequence
  DNA replication origin
gcccggccgccccgtctgggaggtgaggagcgcctcttcccggccgccccgtctgggaggtgaggagcgcctcttcccggccgccctgtctgggaggtgaggagcgcctctgcccggccgccccgtctgggaggtgaggagcgcctctgcccagccaccctgtctgggaagtgggcgcctctcccggccgccccgtctgggaggtgaggggcgtctctgcccggccgccccgtctgggaggtgaggagcgcctctgcccggcggccccgtctgggaggtggggagtgcctctgcccggccgcccatcatctgggatgtgaggtgcgcctctgcccggccgccaccccatctgggaggtgaggagcgcctctgcccggccgccaccccatctgggaagtgaggtgcgcctctgcccggccgccctgtctgggaagtgaggagcacctatgcccggctgccccgtctgggaagtgaggagtgcctctgcccggccgccccgtctgggaagtgaggagcgcctatgcccggccgccccgtctgggaagtgtacccaacagctccaaagagacagcgaccatcgagaacgggccatgatgacgatgggggttttgtcgaaaagaaacgggggaaatgtggggaaaagaaagagagatcagattgttactgtgtctgtgtagaaagaagttgacctaggagacaccattttgttctgtactaagaaaaattcttctgccttgggatgctgttaatctataaccttacccccaaccccgtgctctctgaaacatgtgctgtgtcaactcagggttaaatggattaagggcggtgcaagatgtgctttgttaaacagatgctagaaggcagcatgctcgttaagagtcatcagcactccctaatctcaagtacccaggaacacaaacactgctgaaggctgcagggacctctgccta

SEQ ID NO: 42081 - DNA, 1264 bp, Artificial sequence
  DNA replication origin
gccccctcagcggctcgcgctgctctcccagccttgacggcccggggtggagggagagaagagggggcagctgagcgggagggggctgggcaggagcagggggagggccgaaaggaggggcctgaaaggggcgggccctgacgggggcggagaacttcgggtcttgggcggctctggggctagtgggagtctgcgccgccgccgccgccgccaccgctgctgccgccgtcgccgctaccgccgccgccactggccgagcggtttttttttttttggtttgccggatccgccatattgacgaggacgggcatccgcggctgcggacgctagtctccgccgccgccggagccgcaacctctccgcacccggccccgtcagggcctctgtcgcgcctagcccctccccgccttacacagctcccgggcctcgcgggagcccgccgccgccgcctctctctcacgggaggcggccgccttagcgcccggtgcttgggtcggcgccgggagcgaggagcgagctacttcaaagccaccaggcctggagcggggacagaggcggcgactaggggaaggtgaagccgtcgctgcaggaggaggagcaggaggaggtgacgcaggagaaacgcaccgcccggagcccgtctgagctcagcgagagccccagcctgaggggagaaggggaagagggccgtcgccggccaaggaggaggaggaggcgggcgcggcgaggagcgagttccggcgccggtgtgcagccttttggttgagacgcccgcagccccgagcccggccgccgcagcctttcgatacactttgttgccggtcacccccgggcctgggatgcacccagggtaggtctcgtcccgggaccgagccccaccgtcgcctggtgcctcccgcctccgtgtgccctggttgtgagaagacgtctgtgtcgtgcggtgagtggccagctgcactggggcgacgctctttcccggggccaacagctggatgtgggtgaggggaggagggcgaggggggtgtgcgtgtgtgcgagcctcttccctcggcggctgccggccaggctggggcttccccgttccccctcctccggcccgggctgggcgggcgcgcgggcccgtgttgtgtgtggagccggtgtcccgagagcgtgtctgtgtgttttggactgtaagggaaaatggctgacggctccgtccctccccctcctcccccttcccgtcctgtctggggccgagtaggaggatggagtctccgggcgt

SEQ ID NO: 42082 - DNA, 872 bp, Artificial sequence
  DNA replication origin
tgggggggtttgcgggagtgcgcagcgcggcgggacgcgactggaggcccttttggcttggagggcttcggccttcacggctggcgcagcctggattcccgtccggaggacctggcggcacccggtgtttgcgtgcctgcgagcaaggggtagaacgcggcccaggaatgtgggagggggcggccttcgctcggggtaatggcggcggcctcttttgtgtggtgctgggcggcgctgtggctcacctccgggagacggcgggtctcgggcgggcgaaggcctggaaaggaggatggaatgggtttcttgttttttcccgggttccttccgctggctttttcgcttcagcccaggttccgcagggtccgggggccctgcgccgcagccggggaggctgcgtttccggagtggaaagttttgtgacgcagaagattggggaggagtgggggaggggtgggggcggggaggggaggcaggaattggccgctgcgcgctgggccctggagatagaggttggacgtggcggggaggttagggagccagcgaggccctttctcctccttgcttgccccagattgtccctgtgtggtatgttagccgggagtcccgcgttgtttttctggggtggaggggtcatcgcgggttgtggtagtgtcttcgtgttagtgactgtgatccaggaatccgccattggaaaaacacccggcttaggggggaagtaaacagttttgttgttgacttgttgctatctgtggagtagaatcttgcaatgggtcccaggcccccgggttttttctcttagccagaatcccctcttctaagggtttaggggcagaggagagaaagatgtgtgatttgagaggagaaggtta

SEQ ID NO: 42083 - DNA, 1239 bp, Artificial sequence
  DNA replication origin
caggtgcgcgtgcgtcaggttggccaggccgcgcagcgcgcccggcacgcggcggaacaggttgtcgaaggcggcgagttcgcgcagggccggcagttcggccaggaggcgctcgggcacgctgaagaggcggcaggctgctaggtctaggcggcgcaggcggctgagcgccgcgaaggtgcgcgcgtgcaggtagcgcaggtcgccgttgtgcgccaggcgcagctcagccaggcgcggcaggcccttgaaggcgccgggcgtgatgaaggacaggttgttgtggcgcagcgacaggcggcgcaaggacggcagcgtgccgaaggctcgctcgcccaggaagcgcaggccgttccggtccaggtcgatggagaccgcctcgcacgggagctcggccggcacccgcaggaggcccgcgcggtcgcagcgcaccgagcagccgcgctccacggtgctgcaggcgcaggcggcgggacaagcgcgggcgcaggcccccacggcccaggcgctgggcaggccgaggaccaccgctgcggggacagggtggtggggagtcgggaaggaggagaaaagagaaaaaaggagcaaccgtcagccaaaggtcaccccaggaaaaatcctgcctgtccgggcagcaggatgcaggccctccaccgagttatcttgtgtcaggcacatggcctcttcccacctccgcggcctcacacgggtttatccacctaagacacccgctcctttgctttccggttaccttaatcagcaaaacccagctgcaatccctgcagctgaccccgttctaaactccctcctgcctgtaccaccacttgtgtgctcctagtgtggcaggccaggactcactaatgcaggcctccataactactgtttcggcactgactgaatggttaagttaaatattaaaagctgaccggtcgcagtggctcacgcctgtaatcccagcactttgggaggccgaggcgggcagatcacctgagctcaggagttcacaccagcctgagcaacatggtgaaactccgtctctactaaaaatacaaaaattagccgggcgtggtgacgggctcctgtaatcccacctacttgggaggctgaagcacgagaatcccttgaacccgggaggcggaggttccagtgagctgagatcacgccacagcactctagcctgggcgacagagtgagactccatatcaaaaataaataaataaataaataaatttgcccgtg

SEQ ID NO: 42084 - DNA, 2032 bp, Artificial sequence
  DNA replication origin
cgcaacagcatcgccttcgtggaggagggcgccttccagaacctctcgggtctcctcgcgctgcacctcaacggcaaccgcctcaccgtgctcgcctgggtcgccttccagcccggcttcttcctgggccgcctcttcctcttccgcaacccgtggtgctgcgactgccgtctggagtggctgagggactggatggagggctccggacgtgtcaccgacgtgccgtgcgcctccccgggctccgtggccggcctggacctcagccaggtgaccttcgggcgctcctccgatggcctctgtgtggaccccgaggagctgaacctcaccacgtccagtccaggcccgtccccagaaccagcggccaccaccgtgagcaggttcagcagcctcctctccaagctgctggccccgagggtcccggtggaggaggcggccaacaccactggggggctggccaacgcctccctgtccgacagcctctcctcccgtggggtgggaggcgcgggccggcagccctggtttctcctcgcctcttgtctcctgcccagcgtggcccagcacgtggtgtttggcctgcagatggactgacctggccagaggggggaaagtttgcttaactgggcttgagtgtgtttgtggtaaggggagaggagccggaatggagggcagaggtgaaaatcccagtggagggtggaaggaaccgtttgcctccagagatggccccagggagaacacagggacgtgccactcgagggggaggatggtatggatttctgcttttgtcacacgggcatccattggaaaagagaagcaagaatgaacgtgggccctcgggtgggaagactaggaatcggaagcttctagggcttcacatcccttcccctcccctccccttcccctcatcttccaggcaacagtgcctgcaaggcctgaattagagagacttccattggctaagtagttaagagccgtcccatttctcctggcggggtaacccattacaccgaagtcctttgttttctaccacaatcctcctcctcctctccaggggcctggaaacactaggattcaggaaggtaggcaggacgtgagagaagggagatgggagagagatttaagacaaagggtggcggtggttcctggggtctgagatgtgttaggaggcgtttaaaacaaagatccagttcatttactccacagttattcccagggctggccctagccacaaaggaactttagggcagggtagggaaaaaaggggcagcagggggtgtgtttgtggacaaataaatttgtaaagtccgaggattaaaaaaaaaaaaaggttaaaccggtttctctactgctggacttttcagagtctttcatatgctaacattcattgtgaatctcccaagaggccacacaatccttttttcttagcgttttgtgggatgaatgtccggaagacacagagagcggggcagggaggctccagcttggatgattccattaggtgtggaaattattatgggctgcacacttcggggctgactaacggccaagagggaaggaggcagccagtagctgggaaaggggatttagagatttctcaggttgggggttggccaactatattccccccggcttgactgcaagggcaaaggccagccaggcctgcagcaagcatgcatggctctgggtgtgctgtgcctgagggcggggctaccaaatcccacctaggggccctaccaaacccagcttttctcagggttgcagtgggaacaaacggtgtttgttctgtctgcctcaggatcagcagctcgtttagcatatgctgcaagaataaggctttgcaggctgagttgcaaatgctggctctgctggtctgcagtggccatctctgtggtttgcagcagaaccgtcctaagctggtcacaacaggcagggattcctgacagactgtaaggcagtcaagtcaagaaaagtgcatatgctgctcaccacttacacaagaacccaagctgttctctgcactgcatgctatgactgc

SEQ ID NO: 42085 - DNA, 1115 bp, Artificial sequence
  DNA replication origin
ggggggctgacccccccacctccctcccggacggggcggctggccaggcagaggggctcctcacttcccagtaggggcggccaggcagaggcgcccctcagcttccagacggggcggctggccgggcggggggttgacccccccccacctccctcccggacggggtggctggccgggcggggagctgacccccccacctccctcccggacggggcggctggccgggcgggggtctgacccccccacctccctcccggacggggcggctggccgggcagaggggctcctcacttcccagtaggggcggctgggcagaggcgcccctcacctcccggacggggcggctggccgggcggggggctgacccccacctccttcccggacggggtggctgccgggcggagacgctcctcacttcccagatggggtggctgccgggcggaggggctcctcacttctcagacggggcggctgccgggcggaggggctcctcacttctcagacggggcggttgccgggcggagggtctcctcacttctcagacggggcggctgggcagagacgctcctcacctcccagacggggcggcggggcagaggcgctccccacatctcagacgatgggcggccaggcagagacgctcctcacttcctagatgggatggcggcggggcagagatgctcctcactttccagactgggcaagccaggcagaggggctcctcacgtcccagacgatgggcagccaggcagagacgctcctcacttcccagacggggtggcggccgggcagaggctgcactctcggcactttgggaggccaaggcaggcggctgggaggtggaggttgtagcgagccgagatcacgccactgcactccagcctgggcaccattgagcactgagtgaaccagactccatctgcaatcccggcacctcgggaggccgaggctggcggatcactcgcggttaggagctggagaccagcccggccaacacagcgaaaccccgtctccaccaaaaaaatacgaaaaccagtcaggcgtggcggcgcgcgcctgcaatcgcaggcactcggcaggctaaggcaggagaatcaggcagggaggttgcagtg

SEQ ID NO: 42086 - DNA, 942 bp, Artificial sequence
  DNA replication origin
ccgggagggaggtgggggggtcagacccccgcccggccagccgccccgtccgggagggaggtgggggggtcagctccccgcccggccagccaccccgtccgggagggaggtgggggggggtcaaccccccgcccggccagccgccccgtctggaagctgaggggcgcctctgcctggccgcccctactgggaagtgaggagcccctctgcctggccagccgccccgtccgggagggaggtgggggggtcagccccccgcccggccagccgccccatccgggaggtgaggggcgcctctgcctggccgcccctactgggaagtgaggagcccctctgcctggccagccgccccgtccgggagggaggtgggggggtcagccccccgcctggccagctgccccgtctgggaggtgaggggcgcctctgcccggccgcccctactgggaagtgaggagcccctctgcccggccaccaccccgtctgggaggtgtacccaacagctcattgagaacaggccatgatgacaatggcggttttgtggaatggaaaggggggaaaggtggggaaaagattgagaaatcggatggttgccgtgtctgtgtagaaagaagtagacatgggagacttttcattttgttctgtactaagaaaaattcttctgccttgggatcctcttgatctgtgaccttacccccaaccctgtgctctctgaaacatgtgctgtgtccactcagggttaaatggattaagggcggtgcaagatgtgctttgttaaacagatgcttgaaggcagcatgctcgttaagagtcatcaccactccctaatctcaagtacccagggacacaaacactgcggaaggccgcagggtcctctgcctaggaaaaccagagacctttgttcacttgtttatctgctgaccttccctccactattgtcctgtg

SEQ ID NO: 42087 - DNA, 1439 bp, Artificial sequence
  DNA replication origin
ggctgcgggaggaggagaaagaggagggagcgtctctgccgccgcctcctggtccccagcgccgatccgccgccgccgccacctccctccgcggcgatcctcgctccatggtcctgccgcggccccctctgtagcccgagctgctccgcgacgcgacggagccggcctcggacagagggagcggtcgcggcctcgcggcccgcgcgggctgacgagcggagagcgcgacgccgcgcggtccccgaggatccgcacgccgggcagcgcggcccgagcagcgcgagaagcagcgggcgggcgggcggcgccgggcccgggccgccctcgctcccgcgccccggccccgccgcccgcgccggggcggtcgcctgcagaggaaggcgccgcagtctctgggcctcgcggccccactcgagcgtcctcggcaccgagggctcgcgggtcctgaggggaggaggcgatcccggggctgggcactgagctcttgggcgcccccacccccgttttcgaagccctccacgctgcggccgctatcccctccggaccatggccgacgacgacgtgctgttcgaggatgtgtacgagctgtgcgaggtgatcggaaagtgagtctccacgcgagggagcgggagtgtggaaaaatgcatttcagtgatgccccggtcttcccgcacccgctcggggcctgccccctgccctccctccttcccctcttcccctctcgtccttctcatcctggagtatttatagacgtgtacctggagctcctgccaggcgggggcctgggggttctcagcggtccattgaggccaccgagccgaggttggccaccccgtaaggcgtggggccggctgcctgcattttatctgacggttgcacagggacgtggcacagccgattttatagttgcttcagttggggttattgttaccttgcatgtaccatagaccatttttgaaacagagcagcttgcatttcctttgcttgtgtggtgagagagtccagggttttaattgtggggtgtgtgtctattgtgcgggatattagacagatgcctttgtgtacaccccatgctcggattggagggggtcatttaagacggggtgctttcagtttcagcaaattccctcctggtgtacacgaacgtggaaagagttgggggcattcgaatttttaatgccttgttatgcaatgactgttcaatcagtgctcgagactcccctcgactgttgttgggatggtggttagcgtggtagagccgtctgctttgagtcaccgggctggtctagaatatagaactgacagtccaaatgctcatcctttcatctgtgttgtataattacgctggggaaaagcagggaatcagattaatcacagtgctgattgagaattaaatctgcagttcctcatctaattgtccattccttaaatctattttg

SEQ ID NO: 42088 - DNA, 1254 bp, Artificial sequence
  DNA replication origin
gatcgccgcggagggaggtggcggcggcggcggatcggcgctggggaccaggaggcggcggcagagacgctccctcctctttctcctcctcccgcagccgccaccgcccgcccgggagtgggagggggcttcgcgggaccggcgctctgtgcgggcgggagccgcggccgccgccttctgctccgcccctacgcctcagcagccgaccggctcgccagccccgctcacccgcctcgcgcagacacgccctcctcccccgtcggcggcgcggcttccagaaccacaggctccgcccactccaaccggtcgggaggcggtggcccagggaaaggggagcgggccgagcggcgcatgcgcggggcgccggccgcgtcacggcgaacgggcgggcaccgggattctagagggcgcggggggttgagtggggcgcgccggctgcagctgccgaggcggggctggttggggtcgtcgcctccgcgcctagccgcgaccaagccgcgaaaggggctggagacaaaaggtccacggctgcacgctcgttgtccggcaagaggcacgaaactctggccgctcccctttccttcttttgtaatcgcagggagcctttcccagttttttgctgggaaaagaggcagggaaagggtgctaatgaatgagaaagctaaaagagaggtggagagaggttgtcactgaatccgtgcttggcagcggatgcttttagtgctaccctgtcattccttaatgaagatgagggctgggggtaaggggaggtcgtccaagaaaaggactaaacaaaaactgcctaggaaggtgtgcgacagcaaacggtcatctatagagacagcttctcccacgttctgccccaaactcaacaaatatctatccagcgcctaccctcactagagaccaacctagagagaagctaggaaggcagggacaaaccgtgactttaagctcatttgtatattgtcctcaaactcccaggacctactctgctctctatactccctataaatgttagacttgtcaggaacagaatgcaactagagggagtgcaggcacaggagcagccagggagtgaggttctgggtgttgccgctgtgctaggttgcattcaatatgaagatttctgttcaactgagcatgtgcggaatgagccagcgccatcagacaggtatatgcctcagttgaagaccaatagtgtctttgttcctccgcacagcaaaagtgcccaattagttcataagtcagttt

SEQ ID NO: 42089 - DNA, 950 bp, Artificial sequence
  DNA replication origin
gcgtctctgcccggcctcccaacctctgagatgtggggagcgcctctgccccgccgccccatctgggatgtgaggagcgcctctgcccggccgcgaccccgtctgggaggtgaggagtgtctctgcccagccgccccgtctgagaagtgaggataccctccgcctggcaaccaccctgtctgagaagtgaggagcccctccgcccggcagctgccctgtctgagaagtgaggagcgcctccgcccggcagccaccccgtctgggagggaggtgggggtcagcccccgccaggccagccgccccgtctgggagggaggtgggggagtcagcccccgccctggccagccgccccatccgggagggaggtgggggggtcagccccccacccggccagccgccccgtccgggaggtgaggggtgcctctgcccggccgcccctactgggaagtgaggagcccctctgccaggccaccaccccatctgggaggtgtacccaacagctcattgagaacgggccatgatgacaatggcggttttgtggaatagaaaggggggaaaggtggggaaaagattgagaaatcggatggttgccgtgtctgtgtagaaagaggtagacatgggagacttttcattttgttcggtactaagaaaaattcttctgccttgggatcctgttgatctgtgaccttacccccaaccctgtgctctctgaaacatgtgctgtgtccactcagggttaaatggattaagggtggtgcaagatgtgctttgttaaacagatgcttgaaggcagcatgctcgttaagagtcatcgccactccctaatctcaagtacccagggacacaaacactgcggaaggctgcagggtcctctgcctaggaaaaccagagacctttgttcacttgtttatctgctgaccttccctccactattgtcctatgaccctgcc

SEQ ID NO: 42090 - DNA, 1268 bp, Artificial sequence
  DNA replication origin
taaggtcacagatcaacaggatcccaaggcagaagaatttttcttagtaccgaacaaaatgaaaagtctcccatgtctacctctttctacacagacacggcaaccatccgatttctcaatcttttccccacctttcccccctttctattccacaaaaccgccattgtcatcatggcccgttctcaatgagctgttgggtacacctcccagatggggtggtggcctggcagaggggctcctcacttcccagtaggggcggccgggcagaggcacccctcacctcccggacggggcggctggccgggtggggggctgacccccccacctccctcccggatggggcggctggccagggcgggggctgactcccccacctccctcccagacggggcggctggcctggcgggggctgacccccacctccctcccagacggggtggctgccgggcggaggcgctcctcacttctcagacagggcagctgccgggcggaggggctcctcacttctcagacagggtggttgccaggcggagggtatcctcacttctcagacggggcggctgggcagagacactcctcacctcccagacggggtcgcggccgggcagaggcgctcctcacatcccagatggggcggcggggcagaggcgctccccacatctcagaggttgggaggccgggcagagacgctcctcacttcctagatgggatggcggccgggaagaggcgctcctcacttcctagatgggatggcagccgggcagagacgctcctcactttccagactgggcagccaggcagaggggctgctcacgtcccagacgatgggcggccaggcagagacgttcctcacttcccagacggggtggcggccgggcagagtctgcactcggcactttgggaggccaaggcaggcggctgggaggtggaggttgtagcgagccgagatcacgccactgcactccagcctgggcaccattgagcactgagtgaaccagactctgtctgcaatcccggcacctcgggaggccgaggctggcggatcactcgcggttaggagctggagaccagcccggccaacacagcgaaatcccgtctccaccaaaaaaatacgaaaaccagtcaggcgtggcggcgcgcgcctgcaatcgcaggcacttggcaggctgaggcaggagaatcaggcagggaggttgcagtgagctgagatggcagcagtacagtccagctttggctcggcatcagagggagactgtggaaagagaggg

SEQ ID NO: 42091 - DNA, 961 bp, Artificial sequence
  DNA replication origin
tctaggaagtgaggagcgcctcttcccagccgccatcacatctaggaagtgaggagcgtctctgcccggccgcccatcgtctgagatgtggggagcgcctctgccccaccgccccatctgggatgtgaggagcacctctgcccggccgagaccccgtctgggaggtgaggagcgtctctgcccggccgccccgtctgagaagtgaggagaccctctgcctggcaaccaccccgtctgagaagtgaggagcccctccgcccggcagctgccccgtctgagaagtgaggagcccctccgcccggcagctgccccgtctgagaagtgaggagcctctccgcccagcagccaccccatctgggaagtgaggagcgtctccgcccggcagccaccccgtccgggagggaggtgggggggggtcagccccccgcccggccagccgccccgcccaggaggtgaggggcgcctctgcccggccgcccctactgggaagtgaggagcccctctgcccggccaccaccccgtctgggaggtgtgcccaacagctcattgagaacggcccaggatgactatggcggctttgtggaatagaaaggcgggaaaggtggggaaaagattgagaaatcggatggttgccgtgtctgtgtagaaagaagtagacatgggagacttttcattttgttctgcactaagaaaaattcctctgccttgggatcctgttgatctgtgaccttacccccaaccccgtgctctctgaaacatgtgctgtgtccactcagggttaaatggattaagggcggtgcaagatgtgctttgttaaacagatgcttgaaggcagcatgctcgttaagagtcatcaccaatccctaatctcaagtaatcagggacacaaacactgcggaaggccgcagggtcctctgcctaggaaaaccagagacctttgttcacttgtttatctgctgac

SEQ ID NO: 42092 - DNA, 1351 bp, Artificial sequence
  DNA replication origin
gagcatgctgccttcaagcatctgtttaacaaagcacatcttgcaccgcccttaatccatttaaccctgagtggacacagcacatgtttcagagagcacggggttgggggtaaggtcacagatcaacaggatcccaaggcagaggaatttttcttagtgcagaacaaaatgaaaagtctcccatgtctacttctttctacacagacacggcaaccatccgatttctcaatcttttccccacctttcccgcctttctattccacaaagccgccatagtcatcctgggccgttctcaatgagctgttgggcacacctcccagacggggtggtggccgggcagaggggctcctcacttcccagtaggggcggccgggcagaggcgcccctcacctcctgggcggggcggctggccgggcggggggctgacccccccccacctccctcccggacggggtggctgccgggcggagacgctcctcacttcccagatggggtggctgctgggcggagaggctcctcacttctcagacggggcagctgccgggcggaggggctcctcacttctcagacggggcagctgccgggcggaggggctcctcacttctcagacggggtggttgccaggcagagggtctcctcacttctcagacggggcggccgggcagagacgctcctcacctcccagacggggtctcggccgggcagaggtgctcctcacatcccagatggggcggtggggcagaggcgctccccacatctcagacgatgggcggccgggcagagacgctcctcacttcctagatgtgatggcggctgggaagaggcgctcctcacttcctagatgggatggcggccgggcggagacgctcctcacttcccagactgggcggccgggcagaggggctcctcacatcccagacgatgggcggccaggcagagacactcctcacttcccagacggggtggcggccgggcagaggctgcaatctcggcactttgggaggccaaggcaggcggctgggaggtggaggttgtagtgagccgagatcacgccactgcactccagcctgggcaccattgagcactgagtgaacgagactccgtctgcaatcccggcaccttgggaggccgaggttggcggatcactcgcggttaggggctggagaccggcccggccaacacagcgaaaccccgtctccaccaaaaccagtcaggcgtggcggcgcgtgcctgcaatcgcaggcactcggcaggctgaggcaggagaatcaggcagggaggttgcagtgagccgagatggcagcagtacagtccagcttcggctccgcatgagagggagaccgtggggagc

SEQ ID NO: 42093 - DNA, 1247 bp, Artificial sequence
  DNA replication origin
cggcctgcctgcaggctcgcgctggaaaccctgccactgggcgtggccggacgatgccactgcaggcggggggcgcggttgcctggcgagagtgggggagtagacgtgggtgtagccgcgtgggctctcaacctagtgctttcattctttagttttaactgaaagctatctgggcaagagtggacttaaggaagcagatatatgaaggcggctgagccaggcaggatcgcagggtcgcagggtgctgccccacttggtctggcccctttgtgacgtcatgtagggcccgtcgaggtctgcgcagcctccagccctcactaggttgagggcggggcggggaggggcggggaggggcggggaggggcggggaggggcggggaggagcggggaggggcggggaggagcggggaggggcggggaggagcggggaggggcggggcgaggcgagacgggacggggcggggcgagaaccgtcacttgggggagaccaggcaattgttggttctctgtggggtttttcaagctgaggcgcttaacccaaatcgaagcaagtaggcaagaaaaataactcacctatcatgtattaagtgggactgcattttaaaaggtcaaagggatggctaaggtgcagaaacaaatgaaataagaaaacatgtgtttccccatcctactgaaaagagtgctatttagtgcacatattttactgtgcagccagccttctgtttgctagttttatccctttcttaattttccactttttgttatcctgaatttgtcatcaaaagctgaatttgtcattactggaactctcaaagataggtgaaatctggccgggcgcggtggctcacgcctgtaatcccggcactttgggaggccgaggcgggcggaccaactgaggttgggagttcacgaccagcctgaccaacatggagaaaccgcgtctctactaaaaatacaaaattagccgggtgtggtggttcatgcctgtaatcccagctactcgggaggctgaggcaggaaaattgtttgaacccaggaggtggaggttatgatgagccaagatcgcgccattgcactccagcctgggcaacaagagcgaaactccgtctcaaaaaaaaaaaaaaaaataggtgaaatcgtgacgtaaatttagagaaagtgatgagaactcgaggaagctaatgatgtctgctcccacctataaacattcctcctgttgcccctcgccccattctgtatcaaacatc

SEQ ID NO: 42094 - DNA, 6333 bp, Artificial sequence
  DNA replication origin
tggtgtggtgggatggtatcttttatgaatgacccaaaggggcaaagggaaggcaggaaagatggatgttgcggggatatcatccaccaacaacccagaggtgtagtggggagacaggaggtgtagatggtattaccaggatatgtcttccagaaatgagccacaaaggcagggataagataggaagagtgaatggtgtggcctggttgcatcttccaggaatgcccccacagtgttagggagtggggaacaagaatggatccctgtgggggtatggtatcttctaggaatagcccacagagtcaaggggaaacaggcaacattaggtagtgtgtgtgtgtggtggggaaatggggcgggggtggggtggggagaatgaaattttccagctatttctctctctctggggagagaaagggaaggttggtttgtgtggatggagatggtatcttctaggaattacccaaaccagaagggtggatgtcttaggggaaggggaattttccagcaatgacccagagggatggtggggagacaggaaacatagatggtgaggcaagatgatgtattccagaaatgacccacagggcaaggggtagatacaaaggtggatggggtgagggagatggtctcttccagttatgacccacaagggtagaggggacacagatggtgtagatcatttggcaaaatggaattttccaggaatggtccacagggaagagggtacataggaaggtttggtggtgtggcaggatggtatcttccaggaatgagctacactggcagtggtaggggggagaaaggaagggtggatggtgaggggtcatggtttcttccaagaatgactcataggattgtacaggaatgacccagaggggtagcgcagagagaggaaacatgactggtgtggcaggatataccttccaggaatggtctacaggagctaggggatgcagggaagatgggcttgtttgcaggcatggttcttcctggagtaacccaaagggtcaggggtgagacagcaagggtggatattgggccgcggataacttccagcaatgaccaaaagagatgggaggagacaggaagtgtggaaggtgaccaggatggtatttccaggaatgaccctcaagagttgggagagacaagtaggatagatgatttgatggagtggtatcttccaggaatgaaccaaaggggcagaagaaaacatggtacattgtgtttagagagatggaatcttccaggaatgagttaccctggtggtgttttcggggacatggaaagggtggggatagtatcttccaggatgacccacaaggccaaggggggagacaggacagggtggatactgtgtttgtagggggagggcatgttacttctcagggatgtgacacaggcactgtggggacacagagaagggtagatgttttgtggaggaggtggtctcatcccgaaatgacccagagggtttagaaaggtgtagcaggatggtatcttccaggaatgagccacacggttggtggcgggggaagatgggtggtatagagagatggtatcttccaggaatgacccacaggggcaagggggtgacctgaagggtaaaggttgtgaagggggatatcttccagtaatcacccaaaggggtagggggagataggaagaaaagatagtgaggcaggatgatattttctaagaatggtcttcagaatgtgtggggttaagtaaacaggaaaggtggatggtgtaggaagatcgtatcttccaggaatgagccaccgaggttggggtgagacaggtaggtggatggttttgtagaatggtattttccaggaatgagccacagggcagggggtagatataaaggatggatggtatgggggagatggtatcttccaggaatgaactacaaaattgaggaaggaggggaatgatggatgagctaggtggatgggatctgccaggatggcccacagagccaaaagaaagacaaggcagagtggataatgtaggggaaatagtatcttccaggaatatcacacaggcaatgcagggaggcaggaaagggtagatgttttggtgagggagtggtatcatccccaaatgacccagagtggtagaggggagataggatagttgaatgacaggatagtatcttccaggaatgagccacggtgacagtggtgggggtgggagacagtaagagtgtatgtggatggtatcttccacgaatgacccacagaagtcagggaaataagtttaggcaaatggtatctcctaggaatgtgccaaaagggtagtggtggggggagatgggaatggtggatattgtggaagtgatatcatacaggaatgagccagagggggtagtgaggagtcaggaatcatgaatggtgtggcaggatatattttcaaggaatgacccacatgggctaaggggacacagggaatgttggcctgactggggacatggtatcttcctggagtgactcaaagggttgggggaagataagaagggtggatgttgtggggaatacattccaacaatgacacagaaggatggggcgagacacaaagtggttaaggtgaggcaggatggtattttccaggtatgacccacaaggttgggagagtaagaaagatgagtgatggtggggggaaatggtatcttccaggataaccctcaggggtaagggtaaacaggacaaggtggatagtgttgaaggggttatatctttcaggaatgtgactaagtctctggggggaaacagggaagggtagatgttttgtgagggagtgataccaaaatgacccagaggaatagtagggaaataggacagttgcatggcatgtcaggatggtatcttccagaaatgagtcacactggtggtggcggaaagagacaagaaaggtggatgttatcattcaagatgatatcattcaagaattacccagaggaataggggagagacaggaagcctgactggtgtggcagggtatattttctgggaatgagccacaggtgtgggagaagacagtcagggtagatggtttggtggaatgaaatcttccaggaatgacccacagggtcatgggggaaaattgaagggtagacattgtggatggagatatcttccagcaatgacccagagggatgggggagacaggaaatgataatggtgcagcaggatggtatcctccaggattgagccacactggtggggttgtgggggtcatggtatcttccatgaatgacccactggggtcgagggaagactggtagggtagatggtttggcggaatgttattttacaggaatgacccacagggcagaaggtagataggaaggatggatacagtagaagagatggtatgttccagtaatgagctatagaatttggggagggggggaatgatggatgaggtagggagatggtatcttccaggatgacccacagagccaagggggagacaaggcagactgtataatataaggggtatagtatctttcaggagtgtgaaccaagcactgcaaggaggcagggaagggtagatgttttaggaagaaggtggtatcatcccaagataaccaagaggataacaggaaaatagaatggttagatggtgtggcaggatggtatcttccagaaatgagccaaatgacagtggtgggggtggcagaaggtatgggtggatggtatcttccaagaatgattcacagaggcagggggtggcagaaggtatgggtggatggtatcttccaagaatgattcacagaggcagggggagacagggtacattgggtttagagagatggtgtcttccaggaatgagacacctgggtagtagtgggggagacagggtacattgggtttagagagatggtgtcttccagtaatgagacacctgggtagtagtgggggaaaacaggaagggttgaagtgtggggggatgatatcatcctggaatgagccagaggattagtgttgggggggttatatcaggaatgtgacaaaggctctgcggggaaacagggaagcctagatgttttagggacggtgtggtatcaccccgaaatgatcagaggggtagtggggagatacaacggttgcatggcgtggcaggatggtatcttccaggaatgagtcacactatgggtggtgggggagaccatcagggggatgttggctggcatggtatcgttgtggaatgacccagagggacagggcagagagagaaagcatgaatggtgtggcaggatatattttccaggaatgagtcacaggggcagtagggaaacatgaagagtagatggtgaggtgggatggtaccgcccaggaatggtccacaggagctaggggatgcagagaacattggcttgttggcaggcatggtttttcctgtagtgacccaaagggttgggagtggtgggggagataacttccatccacgacccagaggagagggagtagacaggaagtgtggaagatgaccacgatggtatcttccagggatgacccaaaggggcagagggacacagggtggattgtgttttgagagatggtgtcttctaggaatgagccaccctggtggtgcctggggggacacaggaagaggtatgtggagatggcatcttcctggatgacccaaaggggaaagggggagacaaggcaaggtggaagtgttgggggaggtgtgacagtatctttcaggaatgtggtatagtcactgtggggaaacagggaaggctagatgtggttatatcatctcgaaatgacccagaggggtagagggaaataggaaggttgcatggtgtggcaagatggtatcttccaggaatgaggcacactggcagtagtgggggtggagacaggatggaaggtggatgtggatggtattttcctggtgtgacccgcaggggcagtaggtaacagtggattgggtttagagagatggtgtcttccagcaatctgccacaagggtggttagaggtccgggggataccggaagggtggatggtgtagcaggatggtatcttccaggaataaaccctggcaggtgggtgttttgggggaattgtgtcttccaggaatggaccataggggtagatgggagacaggtagggtatgacagaatgatattttccaggcatgacccacagggcaggggatagagaagaaggatgaatgttgcattggagatggtatcttccaggaatgaactacggaattggggaagcgggggaatgatggatgacgtaggggaatgggatcttccaggatggctcagagatcccagagggagtcaaggcagggtaaataatgtaagaggggatagtatctttcaggaatatgacacaggcactatagggtagacgttttggggaggaggcggtatcatcctgaaatgacccggaggggtagtggggaaacaggaaggttggattgtgtggcaggatggtatcttccaggaatgaaccacactggtggtgcttcgagggggacacaggaccggggatgttatctaacaaaatgactgacagggaagagtagatagttctgtgtaggggtatagtatctttcaggaacgtgacacaggcactgcggggagacagggaagggtagatgtcttagggagtgggtggtatcatccagatatgactcaggagtaggggggaaatagaaaggttggatggtgtggcaatatggtatcttccaggaatgaaccacacaggtggtgactgggggaggcaggaaaggtgggtggtgttaggggatggtgtcttctaggaatgacctacaggagaagggggagacagggtggattggctttggagagggccacaggtgcggtggctggggagacaagaagggcagatggtgtggaaggatggtatcttccagaaacaacccacagggatacagggagacaggggtttagagagatggtatcttccaggaatgagccacatgggaagtggtagggagagacaggaaggatggacgttgtggggggtggtattcgggaatgacatagctgggaatgggggaaacaggaaacaggaatgctgtagcaagatacatcttccaggaatgagccacgagggcttgaggggagacattatgattggatagtgttggtacatggtatattcaaggaattagccataggtttagaggggagacagcaagagtagatggtgtagagaggatgatatctgcctctaatggcccacaggtgcacgggggagataggggagattagatagtgttgggggaattatatcttccgggaatgtgacacaggctctggaagagatggtgaaggtgg

SEQ ID NO: 42095 - DNA, 1070 bp, Artificial sequence
  DNA replication origin
acaggggtttagagagatggtatcttccaggaatgagccacatgggaagtggtagggagagacaggaaggatggacgttgtggggggtggtattcgggaatgacatagctgggaatgggggaaacaggaaacaggaatgctgtagcaagatacatcttccaggaatgagccacgagggcttgaggggagacattatgattggatagtgttggtacatggtatattcaaggaattagccataggtttagaggggagacagcaagagtagatggtgtagagaggatgatatctgcctctaatggcccacaggtgcacgggggagataggggagattagatagtgttgggggaattatatcttccgggaatgtgacacaggctctggaagagatggtgaaggtggaatttggttgtggggtgggggaggggggaggtaatgatatccccaaatcacccatagtattagggtggcaataggaagattggatggtgtaggcagatggtatctactaggaatgactttcagagtcagtggggacatgtgaagatagaaaatgtgtttgcagagatactgtcttctaggaatgagacacacttgctgaggggaggcagggaagggtgtatgttttgggggcaatggtgccatccagaaatgaaccagaggagtaggggatagacaggaagagtcaatggtatgtggcaggatgctaccttccagaaatgacccacaggtatgtggggagataggaaaggttggatgatgtgggaagaatggtatctttcaagaatgactcaaagttctcaggggaatggggagacagggacgggtagatgatgtacagtgatggaatcttctaggcatagaggacagggacaagcttttgtgaaggccttgaggtgagaaggatattggcatgtttgagcaactgagtggacagtgtagctggaccatagtgatgacaagagcaagtggtataaggggagtttgcaggactggtctagaggctgatagtgcaggatctatgggccacattgaatatttgtcctttctccactgaagatcgttgaaag

SEQ ID NO: 42096 - DNA, 1533 bp, Artificial sequence
  DNA replication origin
tttgttttcctcatctgcaaaatggattgttgtaagcttgaacaggaatcatgcataaagtactgagcacagtgcctggtaccttgaaatcactcaatggaagtttcttattatttgccctacacccaaggagtaattggggccctgaaggaagacaccccaatttgccgtcctcccagccgccaagcctgatagtgcactagggaggctgatgggaaaataccgtgcagaaggctgaggagtggggattctggggcgggactctttgaagtcctaggtgacctctccgcccaggcacccgccctccccgggcctgggctgcagagctgcgggcgggggcggtggccctgcgctgcacccggcctgcctgcgcgtaggcgggcgggcggggctgcgcgtccgggctcccggggctggtaatatagcggctcgccgaggcgctggtgcacgggggcagcgcgcagcaggccggcgggcaggcgggcgggctggctggcaggcaggactgggatcgaggcccagaaaacggagcagcgggcaccagggaggcctggaacggggcgagcgccatgagcaacaaatgcgacgtggtcgtggtggggggcggcatctcaggttagtcgcggctgtgcgccctccttcctcttcacgcgctcggacaggtggctgcctgggggagacgcggggggcggccgtggggcaggggctgaccctggagtccccagactgtccacgcacgggcagggctctagtgggtccagagcgccgtgcactgaaccctcctttgggggcaattttgggtgcgttcccggacgcagaggccagaggctggaagcctgttgcagctctggggccagactttgaacttctcccccagaaggctgctaggccttcgcttgctggaattttcgaagccagggaaaaggggtggggaggtggcacaaaggtcagtcatttgctccaacttgacctggacactccgcaccctcgcttagagcaagcatgcaccacatcgtattgttgtcctggcgtcaggaaaacgaccttgaacagaagaggttggagcctggccaatcgattgccaaagactttccaggccctcctgattctttgaggttctgtgattgtcacggatctaacttgaggctgcagtgtctttttggcaaatgcctgttttcctcttatgcctctcgcacccccactccaccccaccccactcctagcgcagggtggccaagctgcagctttgctctctggcctagcccatatttggcaaggatggggacagacactaccccctcagccacacggggctgtgtacataccaagggcaccgaaaaatagaagccagaagaagggatgggggtagtggtggaacttaccctctgtggaggatcaggcagatcctatgggatagggtcaatgggaatcaatgatgctctcagcacagcctgtttaatggccccctgggcatgctttggcccacctcctaacgctgcctagtacttgagcagtaattaggacacctccaga

SEQ ID NO: 42097 - DNA, 1388 bp, Artificial sequence
  DNA replication origin
ctgccgacccgggggctccgcagcccctgccgccgccgccgccgccttcaccgccgccgcgttgggatttttcgtcgccgccgcccgcggcggaggaggaggcggcgataaagttggtgtgctggtcccgcgcgcagattgggggcgtcactgcgggccccggtccgagggggggtgtcggcgttggagttgtgaattcgctgcgtttccatgaaatcctgcggagtgtcgctcgctaccgccgccgctgccgccgccgctttcggtgatgaggaaaagaaaatggcggcgggaaaagcgagcggcgagagcgaggaggcgtcccccagcctgacagccgaggagagggaggcgctcggcggactggacaggtacgggccgccgtcactcgcccggtcggctccggacgggcagtagccgctctcccgggaggaccgagcgcggcttgtctctggcggcggcggggcgggcacctcggtttggcgctcttcgcgccgcctccgctggggcctcgggctcgggcagggacgggtcggtggcgttccctgagcgttaacgagtaaactgtgtctgtctccacagccgcctctttgggttcgtgagatttcatgaagatggcgccaggacgaaggccctactgggcaaggtaaggcagctgcgagtcggagcgcggacaccgtctccctggccggcgccgcgctcgccccgggccccgcggccgggtctgtgctcattgtggccacggacgatggtcgaggggcttccggaaactatttcctgcctctgctctccccccacccccgggtaccctgcttgctcccttgcgaaatcgctcttttcctcttgtagctggaggaacagagacgggatcgctttggggccgggctcaactgggtcgacacaactgcctgctattttacagctttttgagggtaggccgatgatcttcgaggtgcctgtttagggtcaagggatcgtgagtgtgttcagattttcccaaatttcggacttaacttgcctctacgggtttaaaaaaattcttttccttcaagcaggctgttcgtgatgcctactgctaaccaaatgttttaggctttcttgtgtccccgctcccagaagggggaagtttcacggagtttaggtcggtgaagagtttgcattgggctgttgacatgtatctcgattgcagtgtgtgttacctgaagttaggtgacttgtttactttttgggtctttttggcatagaaataccgtagttatttgtaaacgtgttctcttcctggagcctcatttcctgtgtgtctgacaggggaggctggggaggattcggggtgtagtctttttttatttgtgtggaaagttgttggcactgtcatttagttaagtaat

SEQ ID NO: 42098 - DNA, 905 bp, Artificial sequence
  DNA replication origin
ctggccgcccatcgtctgagatgtggggagcgtctctgccctgccgccccgtctgggatgtgaggagcgcctctgcccggccgcgaccctgtctgggaggtgaggagcgtctctgcccggccaccccgtctgagaagtgaggagtccctccgcccggcagccgccccgtctgagaagtgaggagcccctccgcccagcagccaccccatctgagaagtgaggagcccctccgcccggcagccgccccgtccgggaagtgaggagtgtctccgcccggcagccaccccgtccgggaggtggggggcagcccccgcccggccagccgccccgtccgggagggaggtgggggccagcccccgcccggccagccgccccgtccgggaggtgggggcgcctctgcccagctgccccttctgggaagtgaggagcccctctgcccggccgccaccccgtctgggaggtgtacccaacagctcattgagaacgggccatgatgacgatggcggttttgtcgaatagaaaaggggtaaatgtggggaaaggatggaaaaatcagattgttgctgtgtctgtgtacaaagaagtagacataggagactccattttgttctgtactaagaaaaattcttctgccttgggatgctgttgatctatgaccttacccccaacccggtgctctctgaaacatgtgctgtgtccactcagggttaaatggattaaggtcggtgcaagatgtgctttgttaaacagatgcttgaaggcagcatgctcgttaagagtcatcaccactccctaatctcaaatacccagggacacaaacactgtggaaggccccagggtcctctgcctaggaaaaccagagacctttgctcacttgtttatctgctgaccttccctccactact

SEQ ID NO: 42099 - DNA, 1275 bp, Artificial sequence
  DNA replication origin
atccatttaaccctgagtggacacagcacatgtttcagagagcaccgggttgggggtaaggtcatagatcaacagcatcccaaggcagaagaatttttcttagtacagaacaaaatggagtctcctatgtctacttctttgtacacagacacagcaacaatctgatttttccatcctttccccacatttaccccttttctattcgacaaaaccgccatcgtcatcatggcccgttctcaatgagctgttgggtacacctcccagacggggtggcggccgggcagaggggctcctcacttcccagaaggggcagctgggcagaggcgcccccacctcccggacggggcggctggccgggcgggggctggcccccacctccctcccggacggggcggctggccgggcgggggctgccccccacctcccggacggggtggctgccgggcggagacactcctcacttcccggacggggcggctgccgggcggaggggctcctcacttctcagatggggtggctgctgggcggaggggctcctcacttctcagacggggcggctgccgggcggagggactcctcacttctcagacggggtggccgggcagagacgctcctcacctcccagacagggtcgcggccgggcagaggcgctcctcacatcccagacggggcggcagggcagagacgctccccacatctcagacgatgggcggccaggcagagacgctcctcacttcctggacgggatggcggccgggaagaggcgctcctgacttcccagactgggcagccgggcagaggggctcttcacatcccagacgatgggcggccagggagagacgctcctcacttcccagatggggtggcggctgggcagaggctgcaatctcggcactttgggaggccaaggcaggcggctgggaggtggaggttgtagcgagccgagatcacgccactgcactccagcctgggcaacattgagcactgagtgaacgagactccgtctgcaataccggcacctcgggaggccgaggctggcaggtcactccgggttaggagctggagaccagcccggccaacacagcgaaaccccgtctctaccaaaaaaatatgaaaaccagtcaggcgtggcggcgcgcgcctgcaatcgcaggcgcttggcaggttgaggcaggagaatcaggcagggaggttgcagtgagtagagatggtggcaatacagtccagctttggctcagcatcagagggagatcgtggaaaggagggagagggaga

SEQ ID NO: 42100 - DNA, 899 bp, Artificial sequence
  DNA replication origin
gtgaggagcccctctgcccggccagccgccccgtccgggagggaggtgggggggtcagccccccgcctggccagccgccccatccgggagggaggtggggggggtcagccccccgcccggccagccgccccgtctgggagggaggtggggggatcagccccccgcctggccagccgccctgtccgggaggtgaggggggcctctgcccggccgcccctactgggaagtgaggacccctctgcccggccagccgccccgtccgggagggaggtgggggggtcagcacccccaccccccgggccagccgccctatccaggaggtgaggggcgcctctgcccggccgcccctactgggaagtaaggagcccctctgcctggccagccgccccgtccgggaggatggtgggggggtcagccccccgcccggccagccgccccatccgggaggtgaggggcgcttctgcccggccgcccctactgggaagtgaggagcccctctgcccggccacgaccccgtctgggaggtgtgcccagcggctcattggggatgggccatgatgacaatggcggttttgtggaatagaaaggcgggaagggtggggaaaaaattgagaaatcagatggttgccgggtctgtgtggatagaagtagacatgggagacttttcattttgttctgtactaagaaaaattcttctgccttgggatcctgttgatctgtgaccttatccccaaccctgtgctctctgaaacatgtgctgtgtccactcagggttaaatggattaagggcggtgcaagatgtgctttgttaaacagatgcttgaaggcagcatgctccttaagagtcatcaccactccctaatcttaagtacccagggacacaaacactgcggaaggcc

SEQ ID NO: 42101 - DNA, 1260 bp, Artificial sequence
  DNA replication origin
tcacctcccggacggggcggccggccgggcggggggctgacccccccacctccctcccggacggggcggctggccgggcagaggggctcctcacttcccagtaggggcggccgggcagaggcacccctcacctcccggacggggtggctggccgggcggggggctgacccccaccacctccctcccggacggggcggctggccgggcagggggctgacccccccctcccccctcccggacggggcggctggccgggcagaggggctcctcacttcccagtaggggcggccgggcagaggcgcccctcacctcccggactgggcagctggccgggcggggggctgacccccccacctccctcctggacggggcgactggccgggcagaggggctcctcacttcccagtaggggcggccgggcagaggagcccctcacctcccggacggggcagctggccgggcggggactgacccccccccacctccctcccggacggggtggctgccgggcggagacgctcctcacttcccagacggggtggctgccggacggaggggctcctcacttctcagacagggcggttgccaggcagagggtttcctcacttctcagacggggcggctgggcagagacgctcctcacctcccagacagggcggcggggcagaggtgctccccacctctcagacgatgggcggccgggcagagacgctcctcacttcctagatgggatggcggcggggaagaggcgctcctcgcttcctagatgggatggcggccgggcagagacgctcctcactttccagactgggcagccaggcagagaggctcctcatatcccagacgatggggggccaggcagagacgctcctcacttcccagacggggtggcggctgggcagaggctgcaatctcggcactttggggggccaaggcaggcggctgggaggtggaggttgtagcgagccgagatcacgccactgcactccagcctgggcaccattgagcactgagtgaacgagactccgtctgcaatcccggcacctcgggaggccgaggctggcggatcactcgcggttaggagctggagaccagcccggtcaacacagcaaaaccccctctccaccaaaaaaaaacgaaaaccagtcaggcgtggcggcatgcgcctgcaatcgcaggcactcggcaggctgaggcaggagaatcaggcagggaggttgcagtgagccgagatggcagcagtaccgtccagcttcggct

SEQ ID NO: 42102 - DNA, 1014 bp, Artificial sequence
  DNA replication origin
cacggtcggtgaagtggtccatgaagatgctgccggcgtcggccacctctgcatagcgcctgaccacgcgatccaggagtcgctgcgaagggcagcgcaggagcgggctggccaggccctacgcgcaggtgggagagaggcgggagaagaagggggcggggcgctaagctcttgtggggggttagcaggagggggaatgggcagatcctgctgttgggggtgagggagatcttgaggctggggggccaggtggggcgtggggaaaagacctgcaggagtggggattgtggggtgggaggggttgggtagctctgcccaggcggagcagggggcagacccctgtggctgggaagaggggccagagcacttttcgggggtggggtgggaggccccctcccccaccacaggctacactcggggcggggccacagagaccccgggaacagagaagggaatgagctctcttgggcagcacggcaggagggcactgggcaggctgagggcagggcaggggagaggaagaaggggagagaaggcggactccacctttctccacccctcagctggccatctgagttttgcattacctgtgtctctacccaccattgcacccccaccctgcccttggaaagaaggctgatcccaggctgaattcattccctgccatgggctctttcgattccttctgccatctgacttggatatcacaactatgaggctacacttgagcgtttttatatgcaccactgtgttcttgggataagacttggagatacgaacctaggcttttttttttctctcatgactttctagccagcccctacacctttttccccatgctgaacaaagaagagcatgaacctcctgataaaaaaaaatagagttaagaacaaggccctgaggccagcctgccagaattttacccgcttccacaactaccaactgtgtgaccttggacaagttacttagtctctctgtacctccggttccagtttgaagtgaggaggacactaa

SEQ ID NO: 42103 - DNA, 759 bp, Artificial sequence
  DNA replication origin
gccgccccgtctgggatgtgaggagagcctctgcccggccgccccctctgggaggtgaggagcacctctacccggccgccaccccgtctgggaggtgaggagcacctctgcccggccgccacccagtctgggaagtgaggagcgcctctgcccagccacctcgtctgagaagtgaggagcccctccacccagcagccgcccagtctgggaagtgaggagcgtctccgcccggccgcccggtctgggaggtggggagtgcccctgcccagcagccacctggtctgggaggtggggggcgcccccccggccaccccttctgggaggtggggggcccctctgccaggctgccacgtctgggaagtgaggggcccctctgcccggccgccaccccatctgggaggtgtacccaacagctcattgagaacggaccatgatgacgatggcggttttgtcgaaaagaaaagggggaaatgtggggaaaagaaagagagatcagattgttactgtgtctgtgtagaaagaagttgacataggagacaccattttgttctgtactaagaaaaattcttctgccttgggatgctgttaatctataaccttacccccaaccccgtgctctctgaaacatgtgctgtgtccactcagggttaaatggcttaagggcggtgcaagatgtgctttgttaaacagatgcttgaaggcagcatgctccttaagagtcatcaccactccctaatctcaagtacccagggtcacaaa

SEQ ID NO: 42104 - DNA, 1606 bp, Artificial sequence
  DNA replication origin
ggcggaccccagggccgcacccctggtcccccccatcccctttctaccgccacagacccaagaacccgaaatctgcggcacgaggcgcggcgcccgcagcccccggctgggccccggcggggatgggcgggcagggggcggagcgcagcgcagcgcggggcggcgggaaaggggcggagaggatagcttgggctctggcgggccgcgggactggcagaacctgcgggcgaggtgggtggctcgccagccgggacgaagggaaatgaggaccaccgctccggggcgcgagtaggcgcgtggagtccgggggctcagccgccgcgcctcttcctcctgcagctggagactgcaacagcggcgggtgcaccggcagcagcgacgaccctgcgcgcaggtgggcacccccgagcgcggcgctctgcccgctcccccggccaccgcgggccggacgcccgctcttccaggccactgcgcttgggggcgagggctgggtaggtccaggggcagaaggaaggtgcacggccccgtggtgggcgcgcttctgcgcgcgcgctgtggtaggtgggaaagaggtgcagaaaagctgcctcccttagggttcactccctcggttccactgtccccaccccaccccttctgaggagctgggcacaccggtggggctttggaaaactgcgatctcctacccgccccgcagtatcggtggcgtgtgcaggttgcccttctcttcacagtccacacccagcaaccatcaggacgccccctgctcccggcccgaagactgtagggaccatgggaggagagagtggtggctggaccggtcggggcgtgtgcgcggaaggctggagttgcttgagtattgtctgccggggccggcgcttgcgtcagggtgctccctcgcgctttcgggggtagggaatgggtttgctgaacttactctgagggctgattctgcacatgcccttggcgccttgtgcatgtttggacaagggtttaatggaggcacgtgggagcagtatcgatctctggcgggtccccaaagaccctcttgggatagtccagagcgtgttcggggttgagagcgaaaggagagtgttccgtgtgaatgtgcgtcctagggaggaggaggacagtgtctcaaggagacttgattttcttttatttgctgcaattccgtaaaccaaatcatgctttcgaggcgttaaagtaaattactggtaagtggggcggatctctgctggggataaagaagctcccgggtttgcggggtagcgggcctggctggcgtgcacgctcggtggcttttggcgctgtctcgcctaggtagtgggggtggaggtggtggtgcttgtgtctttggcttaaggtgctggagccgggcttacttgtcctaggtagactgtgggacttggaggaggtaaaaaagcttcgcggcgcggttattcgcaattaactccagaaatctcagtgtgtgtctgtcggtcggtctctctctgtctctttctctctctctctctctctgtctctgtctctctctctctctctctctcacacacacacacacacacacacacacacacacacacactcgcacgtctcatggctg

SEQ ID NO: 42105 - DNA, 1026 bp, Artificial sequence
  DNA replication origin
tggcggttctttctcatctgtgtgggctgatgttccttcaggctttgaaactgctgtcctttggatggggttttttgcttttatcttctttgatgtccttggggattttattgtggtataaggtgggttcagctaactgacttcatttctagaagatttaggaggccaagtctcagttcagcaccccttatctgcatgctctaactctaggggtctggtttgagggtcttggctttgttctctggccccttgaggttaggaacctgctgtgctggaggggccaaggtgttcctggtccactggccacaacattgtgggtggtgccagccaaagcactttgtctgggtggtggcagcaggatccatgcttgcttgtgtgtgccagtagccatggtagcatggtagggttcatgcacttcagctggtgcagggcattgttcttgcacacacttgctgcagcagtaacagcagcaggggtggggtgctggtgggagtggggttgctggcatctgtgtgggtgttcacatgggtggcagctgtgtcatgatcagggtggggttgccagtgtttgtgtgtgcatttgtgctggcagtgatggtttggtggggtgcctgtgtgtcagcaggccgggggacattggggtgtgcttgcactggcagtggtggtgcagagaggtacatgctggcaaagtggtggtgggaggccatgggtgactgcgtgctggcaaagagctgggggcaggccgaggtgcagggatcctgtgtgtgggctggcgtgtgtcagtcggggctggtctgctggcgttctccaatggtcagtcatggtcttccagcaaagaagctaggatgagggcccctgggaagcactctggttgggcatgtagctgcaagtgggtgtggccagactggggtcccaggagaggccagcagacagtggggcactcagatagtactggccttgtcccacaggcaagaccgcccagctctgcccaggtctgacagtcaccctaaggctaaagtcacctaga

SEQ ID NO: 42106 - DNA, 1320 bp, Artificial sequence
  DNA replication origin
tcacctccgggacggagcggctggccgggcagggggctgacccccccacctccctcccggacggggcggctggccgggcagaggggctcctcacttcccagtaggggcggccaggcagaggtgcccctcacctcccggatggggcggctggccgggcggggggctgaccctcccacctccctcccagacggggcagctggccgggcggggggctgacccccccacctccctcccggacggggtggctggccgggcagaggggctcctcacttcccagtaggggcggccgggcagaggcgcccctcacctcccagacggggcggctggccgggcggggggctgacccccccacctccctcccggacggggcggctggccgggcggggggctgaccccccacctccctcccagacggggcggctggccgggcggggggctgaccccccccacctccctcccggacggggtggctgccgggcggagacgctcctcacttcccagatggggtggctgccgggcggagaggctcctcacttctcagacagggcagctgccgggcggaggggctcctcacttctcagaaggggtggttgccaggcagagggtctcctcactcctcagatggggcggccgggcaaagacgctcctcacctcccagacggggtcacggccgggcagaggcgctcctcacatcccagatggggcggcggggcagaggcgctccccacatctcagacgatgggcggccgggcagagatgctcctcacttcctagatgtgatggcggccgggaagaggcgctcctcacttcctagatgggatggcggccgggcggagacgctcctcactttgaagactaggcagccaggcagaggggctcctcacatcccagacgatgggcggccaggcagagacactcctcacttcccagacggggtggtggccgggcagaggctgcaatctcggcactttgggaggccaaggcaggcggctgggaggtgtaggttgtagtgagccgagatcacgccactgcactccagcctgggcaccattgagcactgagtgaacgagactccgtctgcaatcccggcacctcgggaggccgaggctggcggatcacttgtggttaggggctggagaccggcccggccaacacagcgaaaccccgtctccaccaaaaccagtcaggcgtggcggcgcgtgcctgcaatcacaggcactcggcaggctgaggcaggagaatcaggcagggaggttgcagtgagccgagatggcagcagtacagtccagcttcggctccgcatgagagggagaccgtgga

SEQ ID NO: 42107 - DNA, 931 bp, Artificial sequence
  DNA replication origin
ccagccgccccgtctgggagggaggtggggggtcagccccccgcccggccagccgccccgtccgggagggaggtgggggggtcagccccccgcccggccagccgccccgtctgggaggtgaggggcgcctctgcccggccgcccctactgggaagtgaggagcccctctgcccggccagccaccccgtccgggagggaggtgggggggtcagccccccgcccggccagctgccccgtctgggagggaggtgggagggtcagccccccgcccggccagccgccccatccgggaggtgaggggcacctctgcctggccgcccctactgggaagtgaggagcccctctgcccggccagccgccccgtccgggagggaggtgggggggtcagccccctgcccggccagccgctccgtcccggaggtgaggggcgcctctgcccggctgcccctactgggaagtgaggagcccctctgcccggccaccaccccgtctgggaggtgtgcccaacagctcattgagaacgggccaggatgacaatggcggctttgtggaatagaaaggcaggaaaggtggggaaaagattgagaaatcagttggttgccgtatctgtgtagaaagaagtagacatgggagacttttcattttgttctgcactaagaaaaattcttctgccttgggatcttgttgatctgtgaccttacccccaaccctgtgctctctgaaacatgtgctgtgtccactcagggttaaatggattaagggcggtgcaagatgtgctttgttaaacagatgcttgaaggcagcatgctcgttaagagtcatcaccactccctaatctcaagtaatcagggacacaaacactgcggaaggccacagggtcctctgcctaggaaaaccagagacctttgttcacttgtttatctgctgacct

SEQ ID NO: 42108 - DNA, 964 bp, Artificial sequence
  DNA replication origin
gaggggagaggcgcctctgcccggccgcccctactgggaagtgaggagcccctctgcccggccagccgccccgtccgggaaggaggtgggggggtcagccccccgcccggccagccgccccgtccgggagggaggtgtgggggtcagccccccgcccggccagccgccccatctgggagggaggtggggggatcagccccccgcccggccagccgccccgtccgggagggaggtgtgggggtcagccccccgcccggccagccgccccgtccgggaggggagaggcgcctctgcccggccgcccctactgggaagtgaggagcccctctgcccggccagccgcccagtccgggagggaggtgtgggggtcagccccctgcccggccagccgccccgtccgggagggaggtggtgggggtcagccccccgcccggccagccgccccatccgggaggggaggggtgcctctgcccagccgcccctactgggaagtgaggagcccctctgcccggccaccacccggtccgggaggtgtacccaacagctcattgagaacgggccatgatgacaatggcggttttgtggaatggaaaggggggaaaggtggggaaaagattgagaaattggatggttgccgtgtctgtgtagaaagaggtagacatgggagacttttcattttgttctgtactaagaaaaattcttatcctgttgatctgtgaccttacccccaaccctgtgctctctgaaacatgtgctgtgtccactcagggttaaatggattaagggcggtgcaagatgtgctttgttaaacagatgcttgaaggcagcatgctccttaagagtcatcaccactccctaatctcaagtacccagggacacaaacactgcggaaggccgcagggtcctctgcctaggaaaaccagagacctttgttcacttgtttatctgctgaccttccctccac

SEQ ID NO: 42109 - DNA, 1155 bp, Artificial sequence
  DNA replication origin
gacccccccacctccctcctggacagggcggctggccgggtggggggctgacccccccacctccctcccagacggggcggctggccgggcagaggggctcctcacttcccagtaggggcggccgggcagaggcacccctcacctcccagacggggtggctggccggccggggggctgacccccccacctccctcccggacggggcggctggcctggcgggggctgacccccacctccctcccggacggggcggctggccgggcagaggggctcctcacttcccagtaggggcggctgggcagaggcgcccctcacttcccggacggggcggctggccgggcggggggctgacccccacctccttcccggacggggtggctgccgggcggagacgctcctcacttcccagatggggtggctgccgggcggaggggctcctcacttctcagacggggcggctgccgggcggaggggctcctcacttctcagacggggcggctgccgggcggagacgctcctcacttcccggacggggcggctgccgggcggaggggctcctcacttctcagatggggtggccgagcagagacgctcctcacctcccagatggggtcgcggcggggcagaggcgctccccacatctcagacaatgggcggccgggcagagacgctcctcacttcctagatgggatgacggccgggaagaggcgctcctgacttcccagactgggcagccaggcagaggggctcttcacatcccagacgatgggcggccaggcagagacgctcctcacttcccagacggggtggcggccgggcagaggctgcaatctcggcactttgggaggccaaggcaggcggctgggaggtggaggttgtagcgagccgagattatgccactgcactccagcctgggcaccattgagcactgagtgaaccagactccgtctgcaatcccggcacctcgggaggccaaggctggcagatcactcgcggttaggagctggagaccagcccggccaacacagcgaaaccccgtctctaccaaaaaaatacgaaaaccagtcaggcgtggcggcgcacgcctgcaatcgcaggcactcggcaggctgaggcaggagaatcaggcagggaggttgcagtgagccgagatgg

SEQ ID NO: 42110 - DNA, 1255 bp, Artificial sequence
  DNA replication origin
gctatgaggacctggtgcggcagccacgcgcccagctgcgccgcctgctgcgcttctccgggctacgcgcgctcgcagcgctcgatgccttcgcgctcaacatgactcgcggcgcggcctacggcgccgaccggcccttccacctgtcagcgcgcgacgcccgggaggcggtgcacgcctggcgcgagcgcctgagccgagagcaggtgcgccaggtggaggccgcctgcgctccagccatgcgtctgctcgcctaccctcgcagcggagaggagggcgacgcggagcagcccagggaaggggagacgccgctggagatggatgccgacggcgccacgtagcctcccatccctgtccccggcacggatccgggtaaggtggcccggggcaaggcagggaccgggactggtcttccgggagcctggaatggcctggggagggggaagtgtaggggggagggtaccatgctggatcccattctatcagatcaggtccaagaggatgggaaagtcctgctcgtagaatttggtagattcatcggaatctccagcttagcctcgcgcctccttagagggagatcctgagatgagagaggatatttaggcgtgactgaggtggaagccaggtctctgcattcccattcccctgtatgaagtaggaggtttcagagggctgaggagagtagagaaggtttgaaacagtcataatgagccgtgagactgggaattgacatgtggagtataggatttcggaaaccatttgaggttgatgattatggagttatcttgatgccagtttgtcctgtgaggagactttgcaatggtgtttacaggcacagagaaagccaaaagcagagagtttggtggaaaggcattgattctaaccctacctatccctaatctttctgtttcatgtttcttctctgtctgttttatgcgcaggctccagggcttttctcctgaatttccaaacatgcaggcacagtccagcggctcttgcaacacttcttgcacattgtgtgtctcaggcgcttgtgtagtgaatagacttgctttcccctggctcatgtgcgcctctctgtctcccctccccctccttccctctctcatttcccctctccctctcttcctcttcctcccccttcccctcctcctctcccttcccccttctccctgtagctggcgtttgcaggatatttgaccatatcccattcacatcaggtcacaaaagctgcctggtcagcttcctctagtgt

SEQ ID NO: 42111 - DNA, 1651 bp, Artificial sequence
  DNA replication origin
actgcctgggcaggtgcgccaggacggggtgagaagcgcagagaggcaagcagccggcggccggcccgcagacccgagggcaacacccggccccgcctgggtggctcggttggcccgcggggcggtgcggcgtggcgcggccgggggacgaacaggtgcgcgggcggggggcggtgcttggggatcctgcgcactgcgcgcgcccctcccccgcgcggccccgggcgcagccccggcccggcgcgagtaggaggaggagctgcagcggccacggccactccggcaggtccgcggtgctgccagaacccgccgacggcgcgggctgctggtccccgctcggaggaggcgcggggggccccgggaccatggagcctggtgacgcggcgcgccctggctcgggtcgggctaccggggcgccgccgccgcggctgctgctgctgccgctgctgctgggttgggggctgcgagtcgcggccgcggcctcggcctcctcctctggggcggcggcggaggacagcagcgccatggaggagctcgctactgagaaggaggcggaggagagccaccggcaagacagcgtgagcctgctcaccttcatcctgctgctcacgctcaccatcctcaccatctggctcttcaagcaccgccgggtgcgctttctgcacgagaccgggctggccatgatctatggtgagcacccctgttacaccccccgccctccacacccctcggccgccgcgctcctcctggcgccgcgcggtgctcccccttcacttgccaacgtgttccgtttcttttacgtttcccgctgcgacggtgttggttcccaaggtcaactgtctgcattttctggctctctgctaccgttaaaaacaattccacccctattccacgtttctgcattgggaacccaggaaaatgaaagggacagaggtggtccggttccgtctgccccgttcggtctctgttgcaaacctcttacccaccacctcccgctccagttgagctcgatagggtgtgtgtgcctgcgtggtggctggaggtgggtggcttcccaggtgactgcatcacctcaggggacaggccacagtagggagtggggacgaagtctgaaagtgtctttgcttgggtatgggttagtggggcctcttggacgccacatccatggtcagcctgggtgggtacccactcctgaggtccacattcccaggtctcttaatgataaagtcagagcatgaagtgtggtgaaaggtgagcagtggtccaggacccagagtgggtggcaccaccatgtcaggcctggacgaggagacaggcacgcctcctgctcttatgtcccgagtggaaagttatacccagttacttgctttctcaaacgaagaggagcttttgtattcctaagacggtaacagggagtgagtttgagatacatttccgaatgtatgaaggggaaaagtcgtggttttaattccggagtcagccatcttttgttgttaggggtgggctgatgctaccatccttttctagatttaatggtacacagtgtgttacatgcacagtggtcagtacaaatctccctttattacatggatgtcagccataatctgagtcatccctcttcctcttctgtgccccctgcctcccccctcgc

SEQ ID NO: 42112 - DNA, 1205 bp, Artificial sequence
  DNA replication origin
cccccaacccagcagcagcggcagcagcagcagccgcggcggcggcgccccggtagcccgacccgagccagggcgcgccgcgtcaccaggctccatggtcccggggccccccgcgcctcctccgagcggggaccagcagcccgcgccgtcggcgggttctggcagcaccgcggacctgccggagtggccgtggccgctgcagctcctcctcctactcgcgccgggccggggctgcgcccggggccgcgcgggggaggggcgcgcgcagtgcgcaggatccccaagcaccgccccccgcccgcgcacctgttcgtcccccggccgcgccacgccgcaccgccccgcgggccaaccgagccacccaggcggggccgggtgttgccctcgggtctgcgggccggccgccggctgcttgcctctctgcgcttctcaccccgtcctggcgcacctgcccaggcagtctggggtcgtggggccagttcatgggcagccgccgccgcacttccgaaaggggacgccagaggtcgccggcgcctagcgggagcatcggcttggagtgactagccttgcggtctcgagtcccgtctctggcgccacggcgaagtgtttaatctcaggccagtgtgcagccgccctgggcccagtaaagtgggggctgtcagtgaaccgagcagccccgaagccacgttagcccctacacctctctttcctcatctctcaggttgcccttccagccccagaatctgctaggtttcattcaaacctctgttctcatcagactcaaatgtgaggactgataaggagttggaatcgggggagggcattgaagtatctccttcctcacttgagggaatagacttcgtctgcgctgtgctactaatccccttggggaatagggttgaaccagaaggaactgaacgcttgccattcctggtagatgagcagtagctggtcctaaggtggtggtggggggtgggggttaccctgatgaccctttcttttatgttgctcacctggtagctcagagagtcttttaatgactcttaagaccaaacccagctctgaacaaaattatggcgtggactctgaaggatgaagcctcttggaacaaattctcaggaaaactagaatcttcaatccaccttgctcctctggtcaaggaagaaacaagatcagattaatcactgagttcccagtgcttagca

SEQ ID NO: 42113 - DNA, 1205 bp, Artificial sequence
  DNA replication origin
cgagagcgtgtgtgggctgaggtaaagtgcctggtggcccctctgcccgcccgggtagtgcctggtggcccgggcggggggcgggggcggacgcgcgagctcggctgcagctcccggctacaccgggcaggaattgagcgccataactgttgcggctctttcctccggtgccccctcctggcgccccctcctccgttcctgccctttgcctggcttcggggctgacggggccagacccgtggcgggaggacctgctctgtcggccgccaggggtcggatgctccagggagcgagggcgcgccctggctgtttagctgttggggggcggaaagaaccgagtgcctggagaggggagaacgggtggtgctgggtgcggcgaggcaccccgggaagcccgggtgcccacccggcgggagcgggagcgcgggcgcccggcgggctggcgaactttccctcccactggcggcattgttcgaactgcgggtccgtggccgccgagcgtcgggcggtccgggggtgggaaaatcgtgagggctttgctagtcttccggggaaattttcccaccgctgggcacggcaaagttaacttttctccagctttcgagttcgttttattccctccgccccgggggccgtagtttgtttttttgttttgttttgttttgttttttgtttgtttgttgttttttttaatagccttcaatctttttctcccgcttttcacagcagagccagtgcttcggtggagtctagctttaaattgcacagggcagcctgagtttgttatttgtgaggagggggtggcgggatctggagtgagtgaccacaatggtggtatgtggaggcatgtttcaaagtttttatcgctgtgcggccctgggacatatgtggctactagggatttggcaagaaacttgtttggccgcttctccgactttgagttgcaaggaaatccgtggcctcagatgtgcgcgagttgtttgtgtgtgtgtgccgtgaggtgcgtttatctatgaagctgaggatgagattcccccctcccgccgtctgattgtgtaagaagtcaaaaccgtgttgaaggtgattccagtggtggcctggagggaaaggcgacctcattccctgtgttcagtctgataaagtgaactgctgctctctaaacttgggaagtaatgaaaaataatttaggtaaaaactggttgcac

SEQ ID NO: 42114 - DNA, 1434 bp, Artificial sequence
  DNA replication origin
agcgggccctgccgaattggctaatagctactccttttctccactaggggagcgttcgcaaggggtgtggggaggtggccagcgcttgccaatcagaggaggccagggctgtcccctagcgggcggtgaccaatcgccggggccggccagagcgcgcttccttagtaggtggatggtggtcggagcgccgactcccttctcgtcgtcgccattttgagctggtgactgtggccggctgggagtaggcggcagtgagtttccctgggagggcagcgcgcttggcgcttctcccctccccccgatctgcctccagtctcggacttggttgttgcgcgctccggctccggctgagctgggagagttggaggaggtggcggcgggcagaggtgatgtctgggagcccttccttgacagcccgggccgagaaggtgagcgtcgacgctggtcgtgggggcggaggtaaggggcccggggcggggacgtagaggaggcgcgagggcggacttcgggtcgggggagatgcgcggaacggaggggttggtgcaatgtctcaacccgggagggtttttttttttttggttttttttttttttttttttttttttggtgtgagcaaaggcgcgtgcgcgactgggacatgggatgggtgcatgcgggttgggggaagggagggacggatgggagtgggctactgtggatcactgtgtcggctacatcgaagtttatcagtggggaagcggttgtctgcgactttgagtttgtgcataggagaggggatgctgctctgtgttactctggtgtttatcggtccatggggaaatattctgtggttctggtctctattcctgggggatcggaggggggatgtgactctggtctttaccctttgagggggggcggtctgtgactctgatccttatccatggggcggggcttgggggacgactgtcttttgattgaccctaacccacttattgggtgggaaggggcatgcagggaatgtgtgtgtgactcattgccccttcttttggggagtttgtatctgtgacactgacgctcatccatggaaaggggacccactgtgtaattgtggtccttactgtgtgttccttctgtgatgtgggcccgtagttatttggggctcgtgtctgtgactggcccttggctgtggtggatgttactgtgtgactctggcccctttgccagagtctcttgaaggtttttgtgctctcagacgccagtgcctctgtgtgattctaactcttgcccacctgggagcaggtaactcgggttccctgtggcttgaggaggaagagaaaattggagtgtgtttgtctgtgtatgtgtgtgcacgagcatagagcaaaggtgtggcagcaacctagtgttgagcaggtgctattattgcctggctttacctgcttcttattcaga

SEQ ID NO: 42115 - DNA, 1058 bp, Artificial sequence
  DNA replication origin
ggcctctctgacactcctccctccagaccggggggccgatgggacctgcccacagaggacggatcagtgctgggggataggagctggagggggagaagggatgaaaggcgctgaggttgcaggtgagggaggggtggggagaagttgagggccctggaggagacccagcctggcctcctgcccggggccatggggggcacgtacgtcatcctcagtggctgcctgtggcagcatcctcagcatgacgatgttactggccttctcctcctcctcctcatcctcctcctcctcctcctcctccccttgctcggtccgatagtcctggtcccgatagtcgccgtctcgggggaagcctggcgggccggtggggctgtgcctgtgccgccgccgccgcctacgctgagtctcggagcccggggaggcctcgtaggaatcctggccgacagaatgagatgagtgacaccagacgggcagtcagtctgggcaggcctaggagctggccgctggctctgtgaggcaggcaggctctgaaagccagggatgtgcgggctccggctaaaggctcaggcaggcagggtgggcaggccccggcctgcaatctttctgggactgtaaattctccatggggtccttttgggggctgccttcagtgggtggggagaggtaggtgacagtattggtgtggggggaactcccaaaggtagctgacaagacacagcttaaacctccttggggcaagatggcctggggtcagcacaccagaccccacccttgattttcctctcctctctggccagctcagggggtgtgctcaattgcttcactgtaccaccgaaggctgcatgtctcctacggttccaccctgcaaccaagctgggggcataagaacagcttcagatctcagccagagccaggcagcaggagctggtggaggtggtgtgagggctgcagacactccctcctcagtccctgatcctcagccttggccagtcctccaccacacaccacgctcaaaacggtatggctgttgggctctgggctgttgcccaatccatcca

SEQ ID NO: 42116 - DNA, 883 bp, Artificial sequence
  DNA replication origin
gtggaatgaggtcctggctctggctaaccccagagaggggtgccccccccaccagccccgggggagtgggaagctaggtgaaagaacccaccctggcagctctttctctgaacgctcagctgggagaggtgaaggggcagcactagtgcctggtggtaggaaggggccagtggtgagtgtgggctctggatgagaagcccagtggggtagcgagagatgggaagaggagatagtgagggtcaggaaggggagagagggggcggggggatgggacacagggccacagggcagggaactgtgtccataagaatcaggcgatggggagcgctcgattacaaagtagtatttgtttgggggggggttcaagtgcggcaaagcaacctgattggcttccatccatcgtgtagcgtcctgcaagtgactaaactcgacgaaggcgaagccccggctctgacctggagacagcattcagatacagacgcagtgggttagtcaacagctttggacacacggcgttcccgggggcgggacccgaggggagaggacggggggcagagagggaaaggggaagaggaaaaaggaagaaagagaaagaggcaatcagagagagaaagactagcgggcgtggggggcaaggtagatggccaggtggggcagggaaggtggagggagaaaaacagaggccagaggtcggtagggggagagacacacacaccaactgggaagagagagatggggctcgggcagacctgcccagccagcctggggtgacagagacggagagaagcagctgggagggaaagaatacgagagatctgcctccaaagaaggagggaggggatggtgggcaggctgctggctccacacaagccacaatacgtaa

SEQ ID NO: 42117 - DNA, 1174 bp, Artificial sequence
  DNA replication origin
atgccaggagcagcaccaggctgggcgcgagagaaagcctgcatcgacacagagtcggccccaggctctagggaggcctcgggacctgtaaggagggacagggcagggacaatgcctgtgaataatggggccggggactttatgcctgctggcccccaccacagctgcagagagagatgctggggctcacctgctccagtgggatcccctttggttccagtgatgccagggcccttggtgcccttgaggtagccatgggcatagagggaagactctgtgccctggctgttgccatagccctcatcctgttggtagtagctgtagtcgaccggcggctcctcggaggtggcccaggtaccctccccaccttgggaggcctgaagggcaggtgggaggggttcattagaacaggaaggtgtgggggtggggggtggggaacctgctagaagcatctgtcccacacgtggggctagtatttctacctgacagacaaagcatgcagccttaagacaagtggaaagcgagggttgcctggccacaagagaacaaataggccagtggcaaacacaagacagaaaaacagatgaacgccaaaatgttccagggctgattctgctgattctgctgtgtgtggcgtgtgtgttgggtgtcaggccaaggaagacaccatcttcttacttctttattctcttctcccaattttctctcaaccacttatacgttatttttattcaggaacatatgatacgtgtatatcatatatgtatatattacatataaggatatgtgtatatcatacctattcaggacaataaaaaccccaccaaacagcacagaatgccaggcacaatggcgtcgtacatgagcgcatgggaggcaattgggaagaaagctgcggtgatgatgaaggggaatgtcccagggggtctagagagccaggagcaaggtagaatagccatgccagctactgggagagggttttgcatccatggatagcaagccagccttcctgcttcagagagggtgcaggagggttgagaaagcccaggtctcaggacgctgggaggcacaaggggtctgagtacctgtgagatggcccactgggccgcagcaatggcagtgctggccacagaggcagcactgatgcgactgccttcattggaggccatgtccc

SEQ ID NO: 42118 - DNA, 1789 bp, Artificial sequence
  DNA replication origin
agttgctgtcatcatcctgttatgagtggggagggtgtgaaggcagtggggagaggatcagataaagaagatgtgtatcctccactgcaattgcctgctggactctcccagatcacaaagggatggctgggaacacctactcattcagagccatatggcaggcccacaatctgatccccacaaaggcccggggctggctccagatactcctgttttctccagcctgtctatgctttgcccatcctccttccctgtcctgagccccaccccataccttctcaaagtcaatggggtacatcttgaatccagggagcttgtctgggctgggcagagtggctttgagctcctctagacgactgtcatctgcatgaagaaagggacactgtcagccctttagatcccaggctaaggtctgagatggaaatgagagcccagggtggggcaaaaggtattcaggtacaaaaaggatttggaaaggagagacatcctgggagagaaaaggggcaaggaggagaggtagagcagagcagaatacaaacctgaaaaacacagagaaagagctgaggctatcaagaatgatctctctagagacactaaggaacggaaatgaaaatgttaggagaaagtggagatggagagatcaagatgggagacgtaaagatcttgggaagaatgatgtagagcaagatggggggaacacagaggatacagggaggaaaaggggagtaaaaaagatatatggaggggaagttggggggaatacacagatgtggacatagaggaaagatatggggggagatggagaagatataaaagggggagagtgggggtatatacagagggcgaggcaggtgggaggagaaagatggaagaaatatatgaaggtgatgagagctatggaaggaaagattggaagacatacataaaggaacatgaaggagtagacatttcagaaggaagatggggaccatggaaggggaaatgggaggagatctatggagaggaagacgggggagatataaggaaggtaaatgtagggggcgttacagagctacagaagcatcatatacagaagggaggggtggtgaaaaaatatgcagatggggtggggtgggggtgtcagtaaaccgcagccccaaactatggagggtgaagatgcacagagaaacatgcaggtagatgtacagatgggggcggatctggaaggagacaaggcaggaaagtatcaagggagagagactgctggtagagatcatacctcctagatgaacagatcaagaagaaacagaagaaagaacaaaactaagggaaatacacagagcaagagtaaaacagcaagttctcctgagggccagatagtgggaaggaggaggagggagggagataatttgccccaacctaccctcttcatgtcaaagggaggctcaaaggaaggtgtgggtaaacctcaggcctggggtcacagagcagagcagaaccaggggtagaggactggtggggaggctggactaggccggggacatgtggggtgactcctggccaactggccaaacaccctcaccaacagaggcattggcgctctgcagctcctggtcagaaacatggatcttgacgccagacttgggggtgaattcggggacctgcacagactgcaggaatgtggccacagcagctcggtcctgagagcctgtcagcccgtaggtctgggcaaacaggttggcagcagccatcacatagtccagatgcaggggctaggagaaggcagggcagggaagggtgagcacatcag

SEQ ID NO: 42119 - DNA, 1234 bp, Artificial sequence
  DNA replication origin
gtgggttctgaaggaggaggggcagcctccacgcctcggggacgcgctcaccggcgggggcgcgcgagcaacctcagagccgcggggccggcgcggcggcgcctggggcggcggcccgggatgaggccgcgcgacctccttctcctcctgttcgccgcaggcgcccgtcccagtagtcttcagccatggttgctgggcccgggccgccgccggctgaggaggaggaggcggcggcggcggcggtggctgaggcggaggcggcgtcccgctcagccggccatgagcttggccgctgcgggcgatgcccccggactcgttggcgccggcttgaatccgagtgctcacggcggctcgcggcacagagcggtctgatcgcggagtggcggcggatcccagggccgaacagccaacggcccaaccgccgcgcgcgccgcgctccgcgcatgcgcacgcaggcgctcggaagggtgaagtggaaaggaggggactcacctcggactgcatgtaccaaaggacccgtccgcagcgggaggggacgcggccatcgcgagcccagaggaggatgcggcgccaagccggagacggcaccagggagaactgtggaggctgtttagtactcagttccgatcttggcagaagtttgctagcgcctaggtgagcagtggccagtaacctggcgcgtcaatcaccactcgttccccctactcggtctcacttggtacatccccatggtggcaaacgggacttttgcaaggaggaaaaaagacaaatgaagcactcagttctagtcccttgaggtgcttggggaggaaggcattttaaaggttcgcgagaagatgacttttcgaggagaggcagcctgaagagttattggcctttaccaccttagctaggacggcctatccccgcccaactgccccctccaccgctacctcattcccgtagtgaacgtgtgcagccccgccctttgaggttgtcgcccagccaatctgatttgctctctgtggcgaggccgagcaagaataaagggcgtggctgactgaagaggcgtgatttcgctctctacccgactccgcacgcctccgcccaggtttcataggttttcaccgtcggcgggggtggggtctcctttttgttctgagctcctccttcgctataggccgaatattccgcaaggtgattggtcataattgcgctcaatcgagtctcgtcccgcctttagcccgccctccat

SEQ ID NO: 42120 - DNA, 2459 bp, Artificial sequence
  DNA replication origin
tccgcgatcagaccgctctgtgccgcgagccgccgtgagcactcggattcaagccggcgccaacgagtccgggggcatcgcccgcagcggccaagctcatggccggctgagcgggacgccgcctccgcctcagccaccgccgccgccgccgcctcctcctcctcagccggcggcggcccgggcccagcaaccatggctgaagactactgggacgggcgcctgcggcgaacaggaggagaaggaggtcgcgcggcctcatcccgggccgccgccccaggcgccgccgcgccggccccgcggctctgaggttgctcgcgcgcccccgccggtgagcgcgtccccgaggcgtggaggctgcccctcctccttcagaacccacctcgggcggtgcccaggggtctgggctgcggggctggcaggtgcccccacccccggcgaatttcccagaatgcaccggggcggggggtcatttggggcctccctgaccttggccccgccctgggcctgtcctgggagctggggttgggtagtgctgtgggtgctaatggggacctgggggagtcaaaggaccaaagggtgtggaaatgggtgacaatggggtgaaagacttgggggggttgctgatgggggtcggagcatgtggcagtaagcctcacgccaataagtcgtgtaaggttcaaggccccgtgtgtgcttgtggaaggagggcggggtgcggagcgggtgagggacccgagggtgtataacggggggtagggtgtcgaggaagttctaagacatgctcatagggattatgtccgcagagaggcccggtgtgtgttcatgggggacagggtggcacaggtaccagaacgtgtgttggtggggtcagggctctgaggcctggtgcgtggcgatgaggccctggatggtgttaatactgcgtgtctgtccgtggggcctgcagtgtgtgagaatgcagtgtgtgcttgtggagggcaggtagctgaaggactcgagtgtggtgtgtgcgccagtgggggtcatggctgtagagggtgtatgcctgtggcctcgaaggtctaggtagtttgggacccagtatatgctaatgagggcagagtggaggaaggacctgagggtatctaacggaggaaggactgtggaatacctgagcctggcctaaaggagatgagaattgcgtgtctgtctgggcccaggaaggagtggtggggaagtgtcttagcactgtcagaggcttagtggacgaagggtaaaggtgatgtgaggtgtgagtgtgtccatggacacagggaatgtgagtctcgagggcacactaggaaggagcagggtaatagaagtactggtggttgctaatgtgggtttagagacatagaggcacttcaatgtgtgccatttcgagagtcagctgtgtgaagtctggaatatgctaataagcatcagaaccttgtgaagattgtgcccttgtgtccgcggaggaccagagtatgttgaggttccagggggtgctactcgggggtagggctgcggaggggatctagtgtgtaataagggggatcagggctttcatgaagggatctaagtgtgaaccaacaaggattatatctgtggagatatctctgagcagagagcaatagaggacaggaatgtgtgatgatctcggtgtgctaaagtggattacagctagggagggctgaagtgtgtgctaatgggagtcagggctgaatgagacctgtgtgcactaatgagggtcaggccatggtagaacagtgtgtttgtgtgtccctgcggaatagggctgagtaagggttcagggtgcactaatggggaggcaggactgtgtgaggcccggcgtgtgctaatagaaatcaggcctgagtgaagactcagtttgtgctgacagaggggacaggacagtggaaggactggaatgtgtgttaaggatggtcgtagctgtgaaggggcctgagtgtgggtaacactggttagagatctatctgtaaggttcactttatgttaatagcattcagagcagcatgaagaaggtccagtgagtgctaatgtgggtcagctatagagtaccccaagtgcatgttaatagaggtcagaatcatgtagggggaacagtacgttaatgaggggagtcagtactatggagaaggtaacaagcagctaggccagggaggggcccaagaatgtggtggcaagagttacttagaggaggctaagtgtgtgctgacagagttcagggcggtatgttatgtgttagggctttgaatgctgatgggtatatgagataatagcaggtaagatgtagtgaggcctccttgagggtctagcgtgtattaatggggatcaggacatagggtgcgatgaccaagtccttagtggttggtgtgttgagtatccttgagtatgagagtagtctgaggatgggtgtatgtctttggggatcagga

SEQ ID NO: 42121 - DNA, 1091 bp, Artificial sequence
  DNA replication origin
acctagcccttcgacgcgtctgtgcacggggccatttccaatatggcagtagccccgcgactgtttggggggctctgcttccgtttccgggaccagaatccggaagtggctgttgaggggcgtcttccaatctcgcacagctgcgttggctgtagaagagaacggacggcgatggcgacggtcgcagcaaatccagctgctgctgcggcggctgtggcggcggcagcggcggtgactgaggatagagagccacagcacgaggagctgccaggcctggacagccagtggcgccagatagaaaacggcgagagtgggcgagaacgtccactgcgggccggcgaaagctggtgaggctgggctgcggtggagcctcggcagagggaacggtgggggcattgacaaccgctggggattcggcggccgagggccgcgggaaagctgctgcggggtgcgggggcgggggagtggccggcgggacagcgggctaaaggggcggggaagtgcctttgaatgaatcgcaacgtctggaaaaggggcggggcctgtgtggtgcagtctgacgcctgagaacaaaatggggtttgttgtgatgagaccagtttcggtcctggaggtggggccgggcctgcgtagtgaaactgcgtaggaacctgggaagaaggtgggttctgctacataaggcgggggcgcggcctgcgctgcgtaatgcaacttttgggggcgaggagcggtttccgattgctccggggcggctgggaacgaggcgagctttgtgacgtcagcagaagagcgggatggagccgaacggtccgagggagggagcggggacctccgtgggggaggggggaggagcctggagcctgggaacgaggttaggttggtgacgtgagctgaggggcgtgctctgaggccgagggacgacagtggaggggaggtggtgcctatgaggcagaaaatggcgcctgcgaataagcaaagtttatgacgcgccgtggtttttgattctggcggaagccttcccgagtcgagagaacgtgcaggtgattagcaccggaggggccttccatgtttaattggttttctgtgttggt

SEQ ID NO: 42122 - DNA, 1298 bp, Artificial sequence
  DNA replication origin
ggggactgcatcattagccactggattttgtataggggcttgattatagagttcatctgtgtggacttcagctgaatgctagatgagctctttttcatcaggagtgagggtggaggttagaattatataaaagtcatgccaagttaaattaaaggattgagttatgtgcaggaatttcctgtgataacgagacggattttcagagaaagatcccagatgctgttcaatttgcgacagattagacatggagaaaagaacatgaacgcaagtaatgcctttaactccagccacttcccggagagggagaatggcagaggtggtttgactggctggagtagtttttgaacgggttacaggtggagaaggaggaggggcagggttaggggctgctggggcggagggttcggacaggcgaggagcgggtgcagggggttgagaacatggagggggttcatttgcagggtcaaaaagagtttcagaggaaggggttccaggggaaggagagacctggggagagttttcattaagaagaaggatttcatgagggatgcaagcttgacatagggagggtcgggatctaaggtagaaaaaagcctgaatatagagaatcgtttgccatttgccattactggttataaagttgtcaaggtccctgagaatttgaaagttaaaggtagcatttttgggccatcgtctgttgttatctaatctgtattggggccaagccatgttgcagtggaaaattaaatgttttggctttagggtcccccgtaagccaagtttggtgaggttgtgaaggagacagcccagtggggaggacgtaggaatgtgggattgtttggcacccatgtggactggtaagaggaagctgagggtgtctgttttgttctaggcgtccccagacaaaagacagagacccagaatcttctttccaaaagaggatggttaagctaagaagaaactgggcatccctaagatttcctctagcttagtcctgttggtcctctggggacctggatggcaggtactgggagaaagccaggagaaggaagaccttaccagtcagctgaattagtgtcccatgttagatgttccagttggaatcagcaaagggcctcccagactgaaggcacacaaggaagagagagagaaagagagagagagaagaaggaggaagaaggagcaagggttagggagcgaaatacctgttacaggcggtcagaggtgaattcctgagacctgagtgttttgaaagctcaccagggagtagtcccagcctgagccttgcagtccccttc

SEQ ID NO: 42123 - DNA, 1259 bp, Artificial sequence
  DNA replication origin
cagggacctgcttgtccccaggagcagggagggatgcctgggaggcagtgtgggagggaggaggagggaaggacagtgtcctaaggtgaaggggacagcctgaggagagtgtgtagggatgtttgtgtcctgaccctcattgtcccttgtattgttttccctttctcctcagcggcccccagctgctctcccagcaggtaccatgtctctcctctcagtttgcatgatccgcccaagccgactgcagaagccgaccactgctcgcggctcactacgcgaggacagaggaagcctcgagacaaagctactgagcggtgtgcgaggggccaacgcaaggagctcagaataaactcttgtgcgtctcaccacctgctctccacctctaaatgggaccaggtggccacacggaggctcagacagggtcaagagtgccatgctggcgggggtggggtgacgatgggagtgctgagagtggactcaaatgaggcattccccttggtgggtgggcgtctaatcggttgaggggcgcaagcttgggcttggtgatcagtctagggactgacattaacactacgcttaggcctgggatttagggtcttgtcctgcaatcaaacagcttaagttcctaaactggaatttagctacaaggaaactcctagcaacaagccagccccttagttacagtgggggcactagcaatgcaggcctcagatctcccatgggaacatttggcaggtcacgctgaggcctggaggtcacgatcagagacagaatgctcagcagagtacatatgtgctggagactggatcgtacccaggcctggccaggtgtggtgaggagaatgggattcaggcctagtgcatccgggggagggggaatcacgcaagcccaggggtgggcgtggctaacaaggagctgactctcgggggagggagaggctaaacgtcatccaacatggcggcgcccgaggaaggctacagtgtgggcgccgccattttgtttgaggttaaggcaaaggatgctgaaggacgagtagcaccgctgtcgggagggctatgttcgttgaaatcgccccctactcccctggtctacaaccgcaaatccccagtgagcttgcccgaaggagattgtcagctttctagatggagcctatgggaattgtgccaagtttaagaacatggttaacttaataaaatctcaatggcagaccatacttttaaagagaagaaggctgggcgcagtggctcacgcctgtaatc

SEQ ID NO: 42124 - DNA, 1027 bp, Artificial sequence
  DNA replication origin
ccccggtagggacggcctgaggccgagggcaccctgagggcggaagaggcaaagcgcctcgcccgccggggcctcggaggtgactaactcctagaggctgcggcggaggggagaagcctggtggtacattccatggcccagtgcctcggccactggaaaatcccacaggggtatatcgagtaggggaccgcgggctccgcggcagaaatgaccgcccttccaagatggcggctcccgtagagacactcccaaggagacagccatgttccttgcctgagagtcactgaaggaaattggaaagcccgcctctccttcgacgcacacgcgcacgcgcacgcacgcaccggcgcggtgtaagggcacccaccaggtgtaattgtgggcgagcggccgcttcggagctgacactaagcatgtgcagatcaagtccagaagcgccggggttcctcgaagcagttttcaggacttaaggctctgggagtgagtttaacagacggacttagggccacttaagcattgagataaatatggagatgttatgacatggatcaagcattaagataattatggggatgttatgacatggattttgtactcgaagatgctcagtaggatgagtaaggaggcttctctggggtcatttatagggaggtgcagaatgagtgattggggtttgtgggtgagtgatgggtcactagagaaagttgatgggtagcctgtgggatgagtgttggggacaccggagtgaataataagggggtctgtggggtgagtgatacagggtctctagggtgagtgataaggtatatgtgagatgagtgatgagaagtccgtgggggtaagaaagggctgtgcggggtgactactggaggtctgtgaggtgtgggatggggtttattgggtgattgaccaaggttcctgctgggtgagtgatgcgtttctttgggactagtgatggggggctgtggaatcagatatgcagcttcctggggtcagtgataggtggtctttaggtctgagatgaggt

SEQ ID NO: 42125 - DNA, 1031 bp, Artificial sequence
  DNA replication origin
ctggctgggtttctgggccagctgtggtttgggacgtccagcggggcccgggccgctgggccgaggctgctgcgtggtgggtggcccagtgcggggcacgggacccgcctggctggcctggcgtgtggggccggctgggcctgggggtttctggggcgggccctggcgctgctgcccgcccggtggggccccagaggcctttggcggagccgggccagagacggatgtctgacgggtagcctgtggggggcccgcctggcgctggggagacggagaggcgggcgggcgggctgctggaggcgccccggggcctcccgccactggccgggattggcggccttgaccctgggtcggcggcgcggcctgggacgcgggctgctggggcgctgaggtgggacttggaaggcgctggggcagggggctgccagctgggggtccaaggcctgaaaggtgctgctggccctgcgggggcgggcgctgctgcaatgggggtccctggcgctgggggcctggacccggctgtggagggccgcctgggggacagagggagagaaagagcacacgtgagagtgagcgggtaagagatggcgggctgagggaggggactgcgaccgccagcctctcgcttaccctgtggtgggggtcgctgctgagccgggggccctgcgggctgctgggaggtctggcggcccaagggcagggcccctggggacggagtctgcggcagaggaatggagcaggagaggttaaaaatagttaccagccagtggagcatcagccagtgatgacacaggttccctgtgcgctgggtgttgccccacttgtggctgagctgagggtactctgggttgtggggtgggggacctgttcccaggggcggggcagggaggtgctcagggaagtcagggcagcagctgcttatcaatgttttaaacaattggcaatcgcagccacatgtgtgcaaaggtgatgctgtgagcctacagattatcagcttcatggcacagcatgacccagggccggcctcccca

SEQ ID NO: 42126 - DNA, 1462 bp, Artificial sequence
  DNA replication origin
gtttggaggttgaaggggttgggggaatttgggggcttaaggcaatggggatacttgaggaatttgagggcaaaagaagtttgggagctggggaactggggattggggagctgggggagtttagggagctgcaggggttagcggtgggtatttagggggcgatgagggaaatttcgggatgaaggaatttgcggggggatttggaaagcatttgtgatattagggggtcatgggtttgggggaattgggggcggatgtcaggggttctagggagtttggagcctcggggttgggaaagcagttccagcctccgaccctcttccccctagactagcccagggtcctggtacccgcaggccaagctgagtagacaggcatctggcacgggagtgcacgggcctggtggccagcacccaagctgcagcccagctccggtccctgctgggccaccccgggccctgcttacctctggtgtctctctgggcgctggatctgcggcgatggcggcagggcctgagcgctagaggataaatgtccacgctaggggcgggggtggcagcgggtgcggaaaccacaggcctccaggcttcctggatgcattactcatccacccaccatcagtgcagaagccaaggggcgggccgacgaaaggagatacaccctcctcctctcccacccgcctcctctccctctccctgggcctcgcccgggccagccacctcccccacctccacgtcagtcactattccttccaagccgcctcagcggagagcttagaggccgcatttcccccggcccagtcccctaaagtctccagaatctatccaatcacccacatcccccaagctccctatgactcaaacccaaattagttcagcccttcaacatttattgtgcatctactgtgtgccaagcacacaaaaatcccttgttttgtatgtctgacatgctggtgaggggtggcagagaggaaacaaattaagtagcagcagtggagggagataaggcaggtgaaaggggaggaatacaaaatggggaaactgaggcacggagtggttaagtgacttacccaggatcacagagtcaatacatggcagaactgagactggaactcaggtggccaggagccaaagccagggtctcaaataacacaggcaaatagccggcatttatacagcacctactgtataccaggcactcagcatagtttatctcactcaaagctcacaacaaatctctgagatgggtaccggttcttattcccgttttacggatgaggaaatatggggcgtagaggaactgtagaattttcctaagatcacagggcatggccgggattcaaacagaggctacctggcaccagggttgtaactcaggagtggcaccgtcctagcaagcagggaatggtgcgggtgaatgaatgagcattgggaagggggtggccatgaatgatggtgaaaga

SEQ ID NO: 42127 - DNA, 1197 bp, Artificial sequence
  DNA replication origin
tgacgtttgaggcagccacccatgtggatacctggggggaaagtgtaccaggcagagggagcagccagcatgcagatcctgtggtgggcttgggcacagagtactcaaggaagtgtgaggatgccagtgtggctaaagcagaggaagtgcaggggcgagtggaatcattctagaggtaagtgccatggtgagccccactggactgaaagggaaaccaaggcagagtgtgtgggctgagtggggtgaggactcaccgaggtcggaattgcagaaggccgtctgtgggtggggtgggacacaggtgcaggccctgctgggggctatcagccacagcaacaacaggatgccagaagccaggggctcaaagggggccatggtgggttctgtggggaagggggatgtcaggcaggccccggcccagctgatctgctgacctgggcaggtcatccaccccatcttgccccggggcagcctatgggggggattagggggctggatttgggcttgaggggttggtaagcttagggattttaaggggattggggagcgcagaggaatttagggtttagagagttgggagagtttaaattattgagggactgagtgagttgcggggttatggggttgtggcacttgggggagaagggggctgaggaagtttgaggaatgaggggattggggaattctggaggttgaggagtttgggggtgaggaatttgggattgggggctggaggagtttggagacggcagagtttaggggttgtgtatattaagagatataagaggctgggggaatttagggaggttgaggaatttggaggaggttgggggtttagggagctgggggagtttggaggttgaaggggttgggggaatttgggggcttaaggcaatggggatacttgaggaatttgagggcaaaagaagtttgggagctggggaactggggattggggagctgggggagtttagggagctgcaggggttagcggtgggtatttagggggcgatgagggaaatttcgggatgaaggaatttgcggggggatttggaaagcatttgtgatattagggggtcatgggtttgggggaattgggggcggatgtcaggggttctagggagtttggagcctcggggttgggaaagcagttccagcctccgaccctcttccccctagactagcccagggtcctgg

SEQ ID NO: 42128 - DNA, 2201 bp, Artificial sequence
  DNA replication origin
gcagaatgaataaattgctctgaatggagagaaaggctactcggtaaaggctcctgggggagaggtaatctaaccagtaaacagctggtactcaatacatttaggctgaagtagacccctagagagagagctcttgaggcagggtcagggatttccagagacttggaaagaggaagttgaaagtgacttatacagtaagtgctcaataagtgtttacttaaatagtaaaactattaagtaaatagtaaatttagtaaatttactaaatttatttagtaaattaagtcaatagtaaaactattaagtaaaagtgtttacttaagtaagtgttacttaaatagactaaaagccctttgggggtatgaattaaagttggtagagggaatcctaggggtactgaagggagtgggaaaggggtgatcattataaactcagctctggatttatcacaggaaaggaccttgggagaggccttgtgattggaacaggctctcctaggggtaaggaagaagaatgtactccccaaaacaacaggtcctgcatatgtgctcactggatctactgttaagaaaacaattctggggaggaggtgtgaatatacagaacacacagaagacactccataaatgctcaggggagccattggaagaaaaggtctttgggggaggatgattaaaatggagcacatgacagacaaggaataaatgctcactggatccattagaagaaaaggcctttggggagtggggctggggatggacatatagtcacctgatcaaggctcactgcatccctgaaggaaaagtcctatggggaggggaaatgggagtgcagaaagttgatctatgggagctcgattcttcatccataggagaaaaggcttttgtgaagaaggcacacaatcaggtacacagcaggtgctccataaatactccaaggagtgattaaaagaaaaggtctttggaaagagtgactggaatggtacacacagcaagtgccagatatctgagcactgtattaactggaggcacaggcctttatggagaggtctaaggttgggtcatgcagaaagtgctcaatacatgcagactgaagccactggaggaaagggtattgcagaaagggtttgagggtggggtatacagcaggcaccagtcaatgcatgcttgctgaatacactggaggaaagaacttttagagaaggctcacactgcaggcagttgataaatgctagatggatccaccaaaggaaaggtctttgaagaagtagctggagaacgggggatacaagaggcactcaataaatgttttctagatccactgtagggaaaggtctttgaggagacggtctgaagatgagtcacacaaagaaggttcaaaactgctcatggaactcactggaggaaaatgatttgtttgagaaggggtttgggggtgcggcacgtatcaggcacttaacaaatgcttcctagatcctttggagaaaaggccctcagagagagggcttggagttggggcacagagaaggcatccaatcaaaactcacaggatccatgaaaggcaaagcttttggagagaagctggggtgggatacacagcaggtactcaatgtttactaaatagtttaaaagggctttaaggacggagctggggtgggacacatagcatagactggacacatgctcacaagacccattagagaaggcctcagggcaagggttgaggagaacaggacagtatcaggctctcaaagaatgctcacaaacctcattgaaatcaaaggccttggggaagggctcttggatgaggcatactgcaggtactagataagtgctcacaagatccattagaggacaaggcctatggggcaagggttggggagggtaggaaggacacgttcggttttcgaaggctcataggatatattgaagccaaagacttttgggggaggggtagtagggaacaggtacgcagcaggtgcctgataattgctccctggatccatcaaggtttaaggggcggaggggggcgacaagggcggggcacagaggaagcatccagcttaataatttaaaggaaaaagatttaggtgagagggccaggtgtcaggcacacaagcggcgctcgataattgctcattcgcagaagaacgatctggggacccaggcccacgggagacgtccgcggcagtggcttaccag

SEQ ID NO: 42129 - DNA, 1397 bp, Artificial sequence
  DNA replication origin
tatctacttacttcttgcctatcttctgccacctctcctagtccaccatcactgctcactatggtcaaggtcctacccaatctggcccctgctaccacaacccccttcagcttgttccagccacattggcactggatgtttcctcttcctggcacattcttaaaaaaatgtgttgatcataaagtgaacatgaccctttgggaattaactggagttcttgtattccctcatctgtaaaatagacattatattatccaccccactggattgttgtgagggttggatgaaatgatgcatgtaaacagcttagttaagagttgggtacaatcagtgaacaaatgattatgaattagtgcttttattgtagtcagaatcataaagatttgacaggttcccatatcccacctctgcttggactacctcatttgctcatatgcaaacattatttggtacctactgtgtgtgcaccatgggatgggcctgcctctgtggaaagttcttgggtgcagggggagacagccatgggcactgatgacatcaggtagttatcgtgagttttggcggtgtccagagcaaagggatggtggcgtatataccaagtgtgttctggtgtgggggtggacacgcaccagggctagggctgcagagaatgtctgtgttgcagatctaggtttctccatgatcatcggtgggaatgtgttttgtctgcaagtgtatgctcatatgagtttccctgggtctctgtgtgtcagtgtgttacctgtgtgtgtgggggtatgggtgtatgcatgcatgtatgtaacatgcccatgtgtgttactctggacttgtatgtctgtatgtatacctagattggcgtgtgttctgtctgtacatgccctcgtatgtttcctcacttttgtgtgtgtttatatgtgtgtcatttcttgtgtgcctccaggccccccttgccaccttgggcaagggtgtgtacaccacccaagtgtccacctccgcttgtctgatgctgtctgtgacgcccccgctctctgcctagctgagcctgtgtggatgtgggagactaatctccccgcgggcactgcgtgtgacctcacccccctctgtgagggggttatttctctactttcgtgtctctgagtgtgcttccagtgcccccctccccccaaaaaatgccttctgagttgaatatcaacactacaaaccgagtatctgcagagggccctgcgtatgagtgcaagtgggttttaggaccaggatgaggcggggtgggggtgcctacctgacgaccgaccccgacccactggacaagcacccaacccccattccccaaattgcgcatcccctatcagagagggggaggggaaacaggatgcggcgaggcgcgtgcgcactgccag

SEQ ID NO: 42130 - DNA, 1051 bp, Artificial sequence
  DNA replication origin
gaccccgcccgaggccccaaacctgaaatcggaagagcttaatgtggagccgggtttgggccgggctttgcccccagaagtgaaagtagaagggcccaaggaagagttggaagttgcgggggagagagggtttgtgccagaaaccaccaaggccgagccagaagtccctccacaggagggcgtgccagcccggctgcccgcggttgttatggacaccgcagggcaggcgggcggccatgcggcttccagccctgagatctcccagccgcagaagggccggaagccccgggacctagagcttccactcagcccgagcctgctaggtgggccgggacccgaacggaccccaggatcgggaagtggctccggcctccaggctccggggccggcgctgaccccatccctgcttcctacgcatacattggtgagtgcctgcggaggggtggggtgtgtgggcgccagcaccaatgggattggcatgtggcgggtgactgacaggaatcagaggagggtgagtgtggttgttcctgaagagggtggagcctttgagtgtgattgactgggctgatgctggctggagggatggggtttgattagtgaagggcagggctggggacttttgtgggtgggaccgagggtctttctgtgggactgtttctaggttggggtgtggcttaaggaacctgagcagggctttttggtctgggatgtgcatatggggtttcatgggtgggacatgagttggaagttgaccctgagctgttgggatggtgacttgagaggtttgagagcagcatttggatagggtcttgtgggtggtcttgaccaatgaggtctcagcaactgagggtgggctctcgggagtggggagtggggggtgtctgcagagtttgagagatcataggcatggcctccatggttaccatctaggtgtgtgcactttggggagtgaccctgggagtgtgagtgggaaatctgtggtggggccgggaccaagtcccttccagcatcccacatctactttctactcacttgagctccgaccaccctc

SEQ ID NO: 42131 - DNA, 1797 bp, Artificial sequence
  DNA replication origin
caggctagctccctataagtgggggtgggtggggggcgggtgggggtaggggtagggggaaagcctatggacgagtccaccctaagttggcgtggggaaaaacataagcacgcagaccgatccattatacaacgggagggggaggttaggccacggtcagatccactataagggacgaagggcttgagcaatgccacacgcaggtccaccagccgtggtggtggcggcggggagtcgaacaccagcaggccaccggccaagccacatcctctgcgcgggggcgggaaggatacgtggggtcacggactgggccctccaccctccaggcccagagctcacctgtgtgtagcgtggcggtggcgttggcaatgttggcagctccggggggcgggggctccatacgcggccccaccgccccccaggcctgggttccgaggcggcggtggaggtggtggtggcggtggcggcggcagcacctagaagccgcccctgcgtttccctacagctcacgtgggcccgaggaggaggagcccaatgtcccgccgctcgctgattggccaaagcgctattaatcggccgcaaggcctcgaggggttgggggacgggcccttccctacagagctgtgccgtgattggcgtaaggggaaatgatggaacgctcacggcccctggagtcccgaggaggcgcgttcggccttcacggtgctccacgccgattggctcaaggactgacggactgtgagcaactgaaaaggctcggggcctgtgtcgggggggcgggggtctgcctcacactgattggcttacatgggattgatggaagacagcccccaaggacgggggtgggtggccctgtttttctctgattggcggacgagggacttctagacccctgccaaaacaccaagggggcggtgtcgcacgccatgctgctcagcggaagcagggcttgtatagaaatgggcgtagcagccggcgggagtgggtcggactgggctccgcgtaggcgggcagggcagctctacggttagacaagaccatagagctgggtaaagacgaatttagaacacagcggaggtaggagggcaggatggctgtcaggcacacgaaagagcattgagtggcagaaacgaaatgctttcagagggcagggttgaactgcggccagagttaaaaaggggaggaacctggctctgcattgattggcggtggctggactcaacctagaataggggcccgactagggagagcgggatccaggtctgtgcccattggaagctggaacacttacaagcaggggctaagacaaggtagggctgagttagggtttgggtgtaatttggggtacctggggaatgattgggtgtgtgaaagcgtaaaccttagggccctttgattgttgtgggaatgaacaaacctccaccatgaattggcccattctctatggcaattcaaagggtggcgtctaggaaaaggaatggaagaaagggtgaggtggggggcccaggttgccaagatgacagaagagagggcagtgcataaggtcaactggcaaatactgccaggcaacaggctggaggcaggactgctggggcattttggaggttccacagagagactggatctctgggtctctcagtaactttgtgccctaggaacaggcccccgtggcaactagcagggtttatggggaaaaagaagggccatgtgactcaaaggcattcaggctctttaatgtctgaggatggggggaagaagtcaatggtgaggcttctctgggaaattctgcaggccttg

SEQ ID NO: 42132 - DNA, 2195 bp, Artificial sequence
  DNA replication origin
gacagtggatgtaacggcagggcagatcccttggcctcacccaggttcagggaagaaagggaaagggatggaggaatggatgggaatggggaattttaaacaatccccctgaccaccaccaaggagtggtagacagagagacaagagaccaagtggtggacagagaagcacagagagaaactccaagatgccctaagaaaaaggtgcatggaggccgggcgcggtggctcacgcctgtaatcccagcactttgcgaggccgaggcgggcggatcacgaggtcaggagatcgagaccatcctggctaacacggtgaaactccgtcactactaaaaatacaaaaaattagccaggcgtggtggtgagcgcctatagtcccagctattcgggaggctgaggcaggagaatggcgtgaacccaggaggcggagcttgcagtgagccgagatcgcaccactgcactccagcctgggcgacagagcaagactccgtctcaaaaaaaaaaaaaaaaaaaaaagaaagaaaaagatggatggagcaacagatgtgggaggagagattcatgaggtgtcacctttacacagagtgtggaatacgggacctaggtccagcaaggcttaaatgtccaccctggagcacaggtcactggtgaacgggtcgtgctggatcgtcccgtgcagcatcagagccagcagccccacccggttcatcatagacgtgcgcaccttctgctcctgctcaaacagctgttccagcttgtgcaactgtgggacctgaatatgcgagagggagtccaggatcctaccccatccctcagccccctcggcatggcacctaacagcctgcatgcactccaggtccacggcacgcctcagcttctcccagctgtagtggtggttgcacaggcatttggggaggcaacaaaaattacccgtgaactcaaagacattgtgcacgagcggacaaccacccacctcatcctttgacatctatggtgaagaacaaaggaggatgagttatgaaggagcgaagccctggggaatgatcaggcacaggggaacaatagggagatggaggacagagaggagagggatggggagtgatcaggcaggaggaagagaggaattcagagaagagaggacaaatagcgggtgatcaggcatagaggatagaggaatgaggtagactaagcagggatggaagaatgcaggtgatcaggcagaaagaacagaagcacagaaagagatccaacagaaggagggatggctggagggcaggtgggccagggagagctggagagctggaaggctggaaagcagtccggcagaggaggggagggttgagggtggtccaaggaggagaagtagatgagtggggcttgttgaggcagaggggaggtgagggctgaggtgaaggagaggagggtggagggagagaatggggagcagtcaaacagggaggaagaaaggatgtagatgacaggcagaaaatagaatcggggacagtcaggcagagagaatgatcagaatggaggaaagtcagaaagtgaggaagagaagttgagggcgccacacaaggaggagggaagagggagttggccaggcagggggtggggcaggaagggaggatggttgagcaagaagaggagcagaattagggggtgcttatgcagtgaggaggggcaggaccacccagaaggtggtcgggcaaggaggtcatgaacacagacagccaggtagagagaaaaggaagaagagagggtgagaggcagcaatgagcatggaatgtggggtggtcgggaagggaaggaggacacacaggagttgctgaggagatgaggagggcagtcaggcagggaggattggaggaatggagggtgatgaggtaaggaagggtctcaccttggggtcccaagagtgctcaggacacagcacctggaggcgcttacagtacctcttacttttcagattgtagacatcacagaagagccatgtggccctggatggggggtggaaaagtgaggtgctaagagtcaggaggagtgaggtcccaccccagaaccctacctgtaccttgtcccagaccccacccataccatgcctctaattacacccgcctctgcctctgagcccacccacatcctgcccctgaccttgctcaaccttgcttctgaccctgtccacgtaatgccttcgac

SEQ ID NO: 42133 - DNA, 746 bp, Artificial sequence
  DNA replication origin
ggaggccgaggcaggcggatcacctgaggtcaggagttcgagaccagcctggccaacatggtaaaaccccatctctactaaaaatacaaaaaaatgccaggtgcgcatctgtaatcccagctactcaggaggctgaggcaggagaatcacttgaaccctggaggcagaggttgcagtgagccaagatcgggccaccacactccagcctgggcaacagggcgagactccgtcttaaaaacaacaacaacaaaaaaaaatcataaggaatcagtgagcataggaaaaaaaataggaaaggtcgttcaggtctgtcattggagacataccagcacccacaagcaacactactggacgcacctccaatggcacagaaggcctggctaggggctggcaaaggcagatgtggcagaagtcaccttctggcaaacctacaggtgtgaaataggtgtgacaggacaggctggaaaggacagggcacactcagagcagggtggtggggggagggggcccagaagtgaaaggcaggacagactagggttggactgagatgggccaaggctgacagggcaaggacctcgtgggatggtcaggaatgggacaagatgggtgcgtgtgggggcatgatggtcatgacaggcgaggcctgtcacccaccgactattggaggtttggaattgggtttgcagccagagagacaggtttagggaacatcatgagatatcaaaatccttgttcttccaaagtcg

SEQ ID NO: 42134 - DNA, 966 bp, Artificial sequence
  DNA replication origin
atgcgacgagacaagatggtggccacgtcattgcccacgacatcccacttctcttgttcctgctgctcctcaaccctgcgcagctgaaaaccttgacagatggctgaaagcaggtcgctatgggcatcgcttatggcaggcaaggaggacttgggcttggtggtgtcagaaagcggtggtggtacagcaggctggccatctgcaccagtgaaagggggaggagggggccccggaggaggaggagggggaggaggaggtgctcctcttgttggctgggacaagggaggtggtgggagagttgggtagtcagctgccggtggtggaggaagaggtggaggggcagcaaaatcagggtgaggtgggaaagatgggcttgagggtggtggaggcgtccctggagacccaaatcctataggcggtggtggaggtgggatgcctatcattggaggcgggggtggtggaggggcaggtggtggagcaaacccgggtttagagcttggtggagagcctagaggaggagctggtggtggatggcttgggctgaccacactggatcttttgggtccagccaaaccagatcctctttggttgtccactgggtaactgaattctgctggtggaggaggcaagttgtcctcggagaaggaaggagaaggtgaagaagcagagtctgactgtgatggtggtggatagctacttgcatccacgttttcaacacagccaatgctgccattctggtacaccaaggtgggtggatacccaaaaggccccagcttttctttggactccacaaattcttgccccatcttaattttctcccactcttccttacgtgtcttgattttacgtgggtttacattccctcgatttggattatctttcttttctttcctgtgctttctcttctctttcatgatatccctggtgtcctgcagcatcttcttcttccaaagatcaaagaagtat

SEQ ID NO: 42135 - DNA, 1078 bp, Artificial sequence
  DNA replication origin
gtatttgtggccctcatgcttctgtggcttttcactggggccatctctttgctggaactggacaacttaagctgtgaaaaactagggatgggcaatgtttggatttatcaaaatgggtgggtgagttagacctgagaccctgcctgtgccctttcgggccttctttttaccctgagtaatcctgcaaggaaacaagccgtgggctcactttatgaactatttaaggtaaacctatcacattcagtgcctttccagggagaggaaacgtggggcagactggcttgctcctggtgcagtctccttgaaagatgcccaagggcactggaaataaagctatttttcctttctacttatagagaatcttgctagggtttcaggtccattgaaggccatcctatagtggggtgggggtgagggtcagatctcaccatttcaggtagatcttggactcctgcttcctgggacacaaatggcaagctgatggcccacatgtgggtgaatggaggtgagtgaagcacagacaggggaatggatggagatgaacatcagcatgtgaataaaaggattgggattggaggaagagagaggagggcaatgaagggctaagtggggagtgaatggagtaaagaggggcagaagggtggtgaacagggaagagtagggcgaaatgggggaaatatccagtgttgtgagttactggagaagaaacagttgagtgtaagtaaacatgagtagtgttggggagagaaggagggagtagactggcagtgagtgggtgcagagtggaggaaattgggagtgatatgaggcacagtgtgaatgacagtggttaatggggttgggtgaagagcagtgcaggaaagtggcaaagcatggcatgacgctaatgaatgaagaggggaagaatgccgggcagtcaaggtgggaagactgtgctggaatgggaggcactctgtgaggtgagtgatggggatctgtggtgtcagaggttataggttcttggggtctcagtgatgcatgaccttgcgttggtggtgatggggagttgggtggaggtgggaggtgatccctggggttt

SEQ ID NO: 42136 - DNA, 1566 bp, Artificial sequence
  DNA replication origin
agtgtgcatgcacaagctatgtgaggctaactttgctgctgcagagcgaggactcccactctctgtcctgggtatcctctaccgtcattccctacaggtgtgacctcctcatacagtaacctaagcagcaggtggctaggtgaaggagagtgagaagctgacaggtggctggtcccaccacagagtctgcatgatatgacattcccacccaaagacaatgagagaagcccccacgtggctggcgagtcatcattacaattgctcttatgatacattttatcaagaccacaaaagccttgccaattgtgagcggtcattttggaccagaagcagcaggtgaggctgacagagcaacagcacagaaggagccaggtctctggtgaccttggagctaccacactagccctggattacctgcctccaaaagaggaatctgcttccctcctcttgaagccactggtgtttgtggtggggttggtgcgtgcagccagatcaaatcctgagcaatccatcagatgcttctgtgttggccaatgtgagtgtcagtgaacaggagatacatgggactggtgggtgaggggcatgaataatggtgactgaagggcaaattgggagtaaatgagagcaaggagaggcaaagggcaatggaatggaggtgaatgaacaccagagtggagtggatgtgggccaaagtgagggaatgactatgcatgcattcaattatgaatgaatttgagattatgatgagattaagtaaatgatgggaaatgaggcacagtctcagcggaaaaaaggtgaaagtgggagcagactctgaatgaatggggcaactgaagggggtgaatgtgagtggagtttatgtgagtactgaggattagagtgtgaatgaatggtggttttatgaggcacaagatgaatgaagagaggggaatttagggagacagtaggagtgaatgggggtaatgtgggatggaaagggaagaatggggtgcgggagggacagaataaaagagtggagatggatacatggtagaatgtgaagcaggccgagtttgagtgtgggtgctacgagggagaaggatgactagagatgactgggattacatgggcgttatacagggtagtagcccaggaacgtgggtgcacagggatcccagtgggaatcggcaaatgtgaatgagctgaagagtgcacatgaatggaggtgatgttgggcagagtgagagggaatgaaagtgaagagcagaggatgggtgaacgtgggtattgtgaggcagagagtggatgaaggcttcatggcctcgggtgagtaaagcgaggaaacatggggagcccgatgtgagcaaaagtaacgaatttgaggcacagcgtgacagaatgcgggtactgggaggcagaatggcagccatgaatcaggagcagaatatgagcaagaagagggtgataggggttacagtgggaatagatttaaaggaatgaggcagtgagaggcagagtaagagtaaatggaaacaatgaagagaaaactgagaaagaacagtgactggagtgcagtggtgcgatctt

SEQ ID NO: 42137 - DNA, 795 bp, Artificial sequence
  DNA replication origin
gctcaggccgtgcctcttctggtggccgggaacgcccactcacccggacaagtcgcggcccttccaagcctcacactgctttcgtaggatcaattccgaatacccaaactcggagatatcacgaggactcccccgggcccccaaacgcacctctcctctggctggaatgggagcctccagaagcagtgcgagaccacggccagcgacagaggtcctggcgctggcggaatgacgccatttttgttactggtagagctcggcttcgtggctgtttcggagccaccgaaagataagctccctcgtcaccctgacatctctccgggaagactggaagggaaatggcctttcgggggatgttgaacgcatttgggcaggcggggagccaagcccggcttgagagcagagccggggtgaggggcctggctgagtgctgcgggtctatgtgatcagtgacggatggagacaagtggagggcctgaggaggggattgagtgacgtggagaacagtgataggggagcctgtgggaccaggggtaacagtatgtgggttatgcaaatgggagtttgtggggtgatgggggatctgtgcggtgtttgatgatgtctgtaagggtgagtgatggggcttctatgggatgggtgaagggagtctggggtgagtgatgggtggtctgtagggtgagggatgctgatccgtggggtgagtggatagggggatctggggtgagggatgagggtctatgaggacaagaatgggagtgtgtgtggggtcagtgttgacattctgtggggtcc

SEQ ID NO: 42138 - DNA, 1530 bp, Artificial sequence
  DNA replication origin
caaccatccgatttctcaatcttttccccacctttcccccttttctattccacaaaactgccattgtcatcatggccggttctcaatgagctgttgggtacacctcccagacggggtggtggccgggcagaggggctcctcacttcccagtaggggcagccgggcagaggcgcccctcacctcccggacgggggggctggccgggcggggggctgacccccccacctccctcccggacggggcagctggccgggcagaggggctcctcacttcccagtaggggcagccgggcagaggcgcccctcacctcccggacggggtggctggccgggcggggggctgacctccccacctccctcccggacggggcagctggccaggcagaggggctcctcacttcccagtaggggcggccgggcagaggagcccctcacctcccggacggggcggctggccgggtggggggctgacccccccacctccctcctggacggggcggctgccgggcggaggggctcctcacttctcagacggggcagttgccaggcggagggtctcctcacttctcagacggggcggccgggcagagacgctcctcacctcccagactgggtcgcggccgggcagaggtgctccacacatcccagacggggcggcggggcagaggcgctccccacatctcagatgatgggcggcggggcagagacgctcctcacttcctagatgggatggcggccaggaagaggcgctcctcacttcccaggtgggatggcggccgggcagagacgctcctcactttccagactgggcagccaggcagaggggctcctcacatcccagacgatgggcggccaggcagagacgctcctcacttcccagacggggtggcggcagggcagaggctgcaatctcggcactttgggaggccaaggcaggcggctgggaggtggaggttgtagcgagccgagatcacgccactgcactccagcctgggcaccattgagcactgagtgaacgagactccgtctgcaatcccggcacctcgggaggccgaggctggcggatcactggcggttaggagctggagacctgcccggccaacacagcgaaaccccgtctccaccaaaaaaatacgaaaaccagtcaggcgtggcggcacgcgcctgcaatcgcaggcactcggcaggctgaggcaggagaatcaggcagggaggttgcagtgagccgagatggcagcagcacagtccagcttcggctcggcatcagagggagaccgtggaaagagagggagagggagaccctggggagaggtagagggagagctgattgccacatttttataaattgaactgggccaggctggtgggcttgttttttttttttgagacagcgtctcactctgtcgccaggctagagtgcagtggcgtgacctctgctcactgcaatctccccctccccggttcaagcgattcccctgcctcagcctcccgagtagctgggactataggcaggcactaccacgccccacta

SEQ ID NO: 42139 - DNA, 835 bp, Artificial sequence
  DNA replication origin
ctgccccgtctgagaagtgaggagcccctccgcccggcagccgccccgtccaggagggaggtgggggggtcagccccccacccggccagccgccccgtccgggaggtgaggggctcctctgcccggccgcccctactgggaagtgaggagcccctctgcctggccagctgccccgtccgggagggaggtggggaggtcagccccccgcccggccagccaccccgtccgggaggtgaggggcgcctctgcccggctgcccctactgggaagtgaggagcccctctgcccggccagctgccccgtccgggagggaggtgggggggtcagccccccgcccggccagcccccccgtccgggaggtgaggggcgcctctgcccggctgcccctactgggaagtgaggagcccctctgcccggccaccaccccgtctgggaggtgtacccaacagctcattgagaaccggccatgatgacaatggcagttttgtggaatagaaaagggggaaaggtggggaaaagattgagaaatcggatggttgctgtgtctgtgtagaaagaagtagacatgggagacttttcattttgttctgtactaagaaaaattcttctgccttgggatcctgttgatctatgaccttatccccaaccctgtgctctctgaaacatgtgctgtgtccactcagggttaaatggattaagggcggtgcaagatgtgctttgttaaacagatgcttgaaggcagcatgctcgttaagagtcatcaccaatccctaatctcaagtaatcagggacacaaacactgcggaaggccacagggtcctctgcctaggaaaac

SEQ ID NO: 42140 - DNA, 1443 bp, Artificial sequence
  DNA replication origin
tggtgggtgaggggcatgaataatggtgactgaagggcaaattgggagtaaatgagagcaaggagaggcaaagggcaatggaatggaggtgaatgaacaccagagtggagtggatgtgggccaaagtgagggaatgactatgcatgcattcaattatgaatgaatttgagattatgatgagattaagtaaatgatgggaaatgaggcacagtctcagtggaaaaaaggtgaaagtgggagcagactctgaatgaatggggcaactgaagggggtgaatgtgagtggagtttatgtgagtactgaggattagagtgtgaatgaatggtggttttatgaggcacaagatgaatgaagagaggggaatttagggagacagtaggagtgaatgggggtaatgtgggaaagaaaggaagaatggggtgcgggagggacacaataaaagagtggagatggaagccccccttgaatgtgaagcaggccgagtttgagtgtgggtgctacgagggagaaggatgactagagatgactgggattacatgggcgttatacagggtagtagcccaggaacgtgggtgcacagggatcccagtgggaatcggcaaatgtgaatgagctgaagagtgcacatgaatggaggtgatgttgggcagagtgagagggaatgaaagtgaagagcagaggatgggtgaacgtgggtattgtgaggcagagagtggatgaaggcttcatggcctcgggtgagtaaagcgaggaaacatggggagcccgatgtgagcaaaagtaacgaatttgaggcacagcgtgacagaatgcgggtactgggaggcagaatggcagccatgaatcaggagcagaatatgagcaagaagagggtgataggggttacagtgggaatagatttaaaggaatgaggcagtgagaggcagagtaagagtaaatggaaacaatgaagagaaaactgagaaagaacagtgactggagtgcagtggtgcgatcttggctcacttagcgtaggctaagtatatgtgggtaacttcagctagtgtttgggagtaatagggacagagctccaggaaatgggggtgttcctgggacagcatctgagagaatagaggtgaaggaggggcagagggggagtgaaggggggaaataatgaggccccgggtcaatgaaagaagctgaaggctgggccacgtgcgagtaagccagagtcatttgatgcaggggcgggaaatagaggcaaagataggaaatgagtctgagtgagagtgagtggggtgaagaaggaatatgacatgaaagaatttgggtaatgctaagtagactgtgaggaattgcgataatatgaggcccagtatgggtgaatataagtggctgaaaggcagtgtaagtgaatggaggaacaaaaggcagaatgagaatgaagttgaaaaagcagtcaa

SEQ ID NO: 42141 - DNA, 964 bp, Artificial sequence
  DNA replication origin
tttccccacatttcccccttttctattcgacaaaaccgccatcgtcatcatggcccgttctcaatgagctcttgggtacacctcccagacggggtggcggctgggcagaggggctcctcacttcccagatggggtggccgggcagaggcgccccccacctcccagacggggcggcggcctggtgggggctgccccccacctccctgatggggctgctggccgggcgggggctgccccccacttcccggatggggcggctggccgggcgggggctgccccccacctcccagacagggcggctggccgggcgggggctgacccccccacctccctcccggatggggcggctgccaggcggagatgctcctcacttcccagacggggcggctgccgggcggaggggctcctcacttctcatacggggtcgaggcggggcagaggcgctcttcacatctcagacggggcggtggggcagaggcgctccccacatcccagacgatgggcggccgggcagagacgctcctcacttcctagacgggatgacggccgggaagaggcgctcctcacttcccagactgggcggccaggcagaggggctcctcacatcccagacgatgggcggccaggcagagaccctcctcacttcctagacggggtggcagccaggcagaggctggaatctcggcactttggggggccaaggcaggcagctgggaggtggagtttgtagcaagctgagatcacgccactgcactccagcctgggcaacattgagcactgagtgagcgagactccgtctgcaatcccggcacctcgggaggccgaggctggcagatcactcgcggttaggagctggagaccagcccggccaacacggcgaaaccccgtctccaccaaaaaatacgaaaaccagtcaggcgtggcggcgcgcgcctgcaatcccaggcactcggcaggctgaggc

SEQ ID NO: 42142 - DNA, 983 bp, Artificial sequence
  DNA replication origin
gcaatcccggcacctcgggaggccgaggctggcggatcacttgaggctaggagctggagaccagcccggccaacacagcgaaaccccgtctccaccaaaaaaatacgaaaaccagtcaggcgtggcggcgcgagcctgcaatcacaggcactcggcaggctgaggcaggagaatcaggcagggaggttgcagtgagccgagatggcagcagtacagtccagcttcggctcggcatcagagggagaccatggaaagagagggagagggagaccgtggggagagggagagggggaggggggggaggggagggggagggagagggagagggagagggagagctctttttttttttttttttttttttgagacagagtcttgctctgtcatccaggctggagagcagtggtgcaatcccggctcactgcaagctccgcctcctgggttcatgccattgtcctgcctcagcctcctcagtagctaggattacaggtgcccgccaccacacccggctaatttttttttgtattttttagtagagacagggtttcactgtgttagccaggatgatctcgatctcctgaccttgtgatccgcccacctcagcctcccaaagtgcaggaattacagatatgagccactgcgcctggccgtcaattcttaacagtagagggaaataggaaaacgtgtccaccagaaatattgaggcattcctgggagatagagtagttgggatcagactgatagagaaacccaaggagacaagaccacagctcaaatcactgtaataaagagatgctgtttgctttttgagacagagacttactctgttgctcaggctggagtgcagtggcttgatctcagctcactgcagggtctgtctcccaggttcaagtgattctcttgcctcagtcctcacagtaactgggattcacaggcgcccgccactacggccggctaatttttatatttttagtagagacggg

SEQ ID NO: 42143 - DNA, 1132 bp, Artificial sequence
  DNA replication origin
taacaaagcacatcttgcaccgcccttaatccatttaaccctgagtggacacagcacatgtttcagagagcacagggttgggggtaaggtcacaggtcaacaggatcccaaggcagaagaatttttcttagtacagaacaaaatgaaaagtctcccatgtctacttccttctacacagacacggcaaccatctgatttctcaatcttttccccaccttccccccctttctattccacaaaaccgccattgtcatcatggcccgttctcaatgagctgctgggtacacctcccagacggggtggtggccgggcagaggggctcctcacttcccagtaggggcggccgggcagaggtgccccacacctcccggacggggcggctggccgggcggggggctgacccccccacctccctcccggacggggcggctgccgggcggagacgctcctcacttcccagatggggtggctgccgggcggaggggctcctcacttctcagacagggtggctgccaggcggaggggctcctcacttctcagacggggcagttgccaggcagagggtctcctcacatcccagacggggcggcggggcagaggcgctccccacatctcagacgatgggtggccgggcagaggcgctcctcacttcctagatgggatggaggccgggcagagacgctcctcactttccagactgggcagccaggcagaggggctcctcacatcccagacgatgagcggccaggcagagacgctccccacttcccagatggggtggcggccgggcagaggctggaatctcggcactttggggggccaaggcaggcggctgggaggtggaggttgtagcgagccgagatcacgccactgcactccagcctgggcaacattgagcactgagtgaacgagactccatctgcaatcccggcacctcgggaggccgaggctggcggatcacttgaggctaggagctggagaccagcccggccaacacagcgaaaccccgtctccaccaaaaaaatacgaaaaccagtcaggcgtggcggcgcgagcctgcaatcacaggcactcggcaggctgaggcaggagaatcaggcagggaggttgcagtgagccgagatggcagcag

SEQ ID NO: 42144 - DNA, 972 bp, Artificial sequence
  DNA replication origin
attccagcctctgcccggccgccaccccatctgggaagtggggagcgtctctgcctggccgctcatcgtctgggatgtgaggagcccctctgcctggctgcccagtctggaaagtgaggagcgtctctgcccggcctccatcccatctaggaagtgaggagcgcctctgcccggccacccatcgtctgagatgtggggagcgcctctgccccgccgccccgtctgggatgtgaggagaccctctgcctggcaactgccccgtctgagaagtgaggagcccctccgcctggcagccaccctgtctgagaagtgaggagcccctccgcccggcagccaccccatctgggaagtgaggagcgtctccgcccggcagccgccccgtccgggagggaggtgggggggtcagccccccgcccggccagccgccccgtccgggaggtgtggggcacctctgcccggccgcccctactgggaagtgaggagcccctctgcccggccaccaccccgtctgggaggtgtacccagcagctcattgagaacgggccatgatgacaatggcggttttgtggaatagaaagggggggaaggtggggaaaagattgagaaatcagatggttgccgtgtctgtgtagaaggaagtagacatgggagacttttcattttgttctgtactaagaaaaattcttctgccttgggatcctgttgacctgtgaccttacccccaaccctgtgctctctgaaacatgtgctgtgtccactcagggttaaatggattaagggcggtgcaagatgtgctttgttaaacagatgcttgaaggcagcacgctcgttaagagtcatcgccactccctaatctcaagtacccagggacacaaacactgcggaaggctgcagggtcctctgcctaggaaaaccagagacctttgttcacttgtttatctgctgaccttccctccactattgtcctatgac

SEQ ID NO: 42145 - DNA, 1035 bp, Artificial sequence
  DNA replication origin
gcccaagcaatcctcccaccttggcctcctaaagtgctgggattacaggagtgggccactgcgcctggcctccagtttttattttgatagagactatacacttcagtcctggagcaggattctgcagcaggtggttgggcatctgggcctttgctctctgaatgattttcaagttcaagggctgggacggtccatttgggagtatgtggaaggagacacagatgaaatcgtcatctggggaacgtggaggaatgaggaagatgcgtgcactgtagaccgtgatggacagggaatagaagagtccactcagtctccatgcaggggagcaacggtgggaaagtcccctggacagaagcatgagactgcccatcaagggtctcaccaaccaagggcctgggggctggggtggggacgatgatttcggaaggggccagttctttctcacatgtaccattgcacagtgtggaggggaaacaggtctgcggaaggggagcgcagatgggagtctattttcgaaccaaccattgtgtgtgaatggagacatcaagtcctcccggttctccccagccttggaaggaggacactatcatctttatgcctatatgttagatgagagacggagtcccagccagatggcaggcgtcttgtctgaggtcccacagctggcaggtgcaggaggggctgagtttggagctcactgacttcagaaacattaaggaggacaggtgtgtgtggtggagggagggggaattgaacaagccccgggctctgtccccagtcacaaggtagaggctgtgggttcgttttccaagacaaggagccctaggagagagagagtgcggggagggagaggcagtcgtgatcacagcagggacagtgggagacagagatatgcagggtgggcagaagaggggcaggcaaagaagcaggggagacccaaggccaagtgggggctgccacagccaccagagggagagggtgcctggaaggaggttgtggggctccaggagcagtagaggttccccagatctgtga

SEQ ID NO: 42146 - DNA, 1600 bp, Artificial sequence
  DNA replication origin
tatgcatggctggtgatatggggatagggaggtacggacagacagaggcggaggcagggatgatatgatgggagatgtgtggatgatcagacagagggacagcatggatggtcagatggaagaggcagtggcagtcaaacgcaggggagagggagacagtcatatcgggggagatatggatggtcagagaggggattttggctagtcacaggggaggcagagacgggtgtccccatgtgtgccagctgaatggcagtctgggagaaggggactctggagggtggaggctggctttgagggacctggggcaagtctcagggtctgggcatgacagttccacgacctctacacctcaggccctccaagcgcaggatgcaggccgtggccaacgtgtccattggggccatgttctgcatgtatgggctcacagcaacctttggatacctcaccttctacagtgagtggggctggggctagggctggggggagggggaaggcctggggcaggagcctctgagctctttccttctgtgaccacggacctgtcagtttccaaacagaaggtgtgcctcacttgtgtggattttgtcactgtgcatgtatgtatgggtttctggggcattggtcctggtgctctctccacatcctgcatcccgtaccctctgtctcatggcccaggcagtgtgaaggcggagatgctgcacatgtacagccagaaggacccgctcatcctctgtgtgcgcctggccgtgctgctcgcggtgaccctcactgtgccagtcgtgctgttccctgtgcgtggggcccacggctgagagggacatggatggatgggtagagggcataggcatggatgtgtgggtcaaggctggaaacaggagtggatggatggatgaaggaggcaaggatggacagacaggaaagggcagcgttttcagatggacagagatggcaaaaatcgataaacagaagtggggaggacatagatagcaggagagagagggtcaggggacagggtagtcagttggagggaggaggcacagatggatggctagaaagaagagggaggcaggaagggtcagttggagggtagaattaagaaacagggatggacagaaaaagggtggaggctgaagtgatgggatgtaggagggtcaagtctcccagatggggaggcagaactaattagacagaggagggaggtagaggtcagatggagagaggcagggagctcacacagggtggaaggatcggtggatggtcagacagaaggagaaggcaaagatggtcagctagaggaggaggcaaggatttcagacagtgggtgcaggtgccgatgggtgttcagacagaaggaagagacgtggattgtcagaggatggaggcaggaagcctgttcagaacatagagacacagatgttgggttaggcagggtggagccatagatagtcagagggaggggaaatcagggatctcagccagagggtggagctaaagacagatgatcacgtggaaggggggcagcacttgggtcctgacttctgtcccaccctactctggccacagatccgccgggccctgcagcagctgcttttcccag

SEQ ID NO: 42147 - DNA, 955 bp, Artificial sequence
  DNA replication origin
acagcaatggagagtgaagctctcgtgggactccccagccaaggactcaacagcagctgtgaggcccagatgttcacagttgactcacaggtgtgtgtgcaggcatgtaggagattgcatcacactcaggccctctggttctgtcatatggtgcatcctgctcagagtggagctggatattcgacattgggagcttctatgtgtctgatatggagggcgattacggggcgggagggggatgggaagaaggggatggacccctgttggctctaatcccatgtactcgggcattcccctagatgtcctacacagtgcccattatggcttttgcttttgtctgccaccctgaggtgctgcccatctatacggagctctgccggtgagtgggcaggcaagtgggcctgaatgatgggccagcaagtggggtggtaaccagaatgtctgacactccctacagcagtcctgggactgtcacttggtggaagctaggttgtgtcatgggaggggtttggggtggccaggaggtcttggggcactcagggtagtgactgtttgctgattggggcttaagtattctcctattttaatatccagcacaaatgtggatggacagagttgggaagcagagatcagatgatcagatggagggggtgatatgcatggctggtgatatggggatagggaggtacggacagacagaggcggaggcagggatgatatgatgggagatgtgtggatgatcagacagagggacagcatggatggtcagatggaagaggcagtggcagtcaaacgcaggggagagggagacagtcatatcgggggagatatggatggtcagagaggggattttggctagtcacaggggaggcagagacgggtgtccccatgtgtgccagctgaatggcagtctgggagaaggggactctggagggtggaggctggctttgaggga

SEQ ID NO: 42148 - DNA, 2643 bp, Artificial sequence
  DNA replication origin
acccacaggcagagtctgagtccattggctatgtacattcacacacacatggtcagcagcagagtaaaccggacataaagagtcagcctccagccagaagcagccagaataagtcacaaaatcagcacacggtcgactggactcctgtggtcagagcaacaggcacacagaggaatcagtctgacccaagtggcctgcccagcagtctcaaactagaacatctggaagtcagctgcacacacagcgctgaagatactgaccgggcctcacaggcagagtcaaggggctgctggccagccaaggggtgttgctcactcacccctcggggtccatgtacaggaaggtgccgataaccagggggagctcagatttgatgatgaacaggtaactggacatggctggtgcaggtgggggaggtgtaagcagaaggattctcttcatgcccccaccccgtcttccccagcccagcctggggaagcccacctcactccgccctctccccccaagctgacccccacctcccagagtcctcacccccaacattgtgcagacagatgactgtggccaccactaccttccccgcaggcccgaatgccctctgtcccagctgctcataggctcggatgcctagcggggggagtcaggaacagggttgaaggtccaggaggccaggccagaggtgcaggccagagggcccaggagctggggagttggggcttgggggaaccggctttgactgatggaggatgaaggtgggggttaagcagttgggcttgagtttgggggcagagtctgggaggtgggatctgaggccagggaaaaggatgagggctggaggtaagagtaggggtcttggagccagactatgaactgagaccatggtaggagctggggaaccggggactgaggggtgggggttagaggtagagtgtagtggtctgggggtgggttctggggtgctgggtccgggatctggggtctgcattcagggagctgggtctggggtctggggtccaaggtctgtgttgagctctggatgtggctccagagtctggggtccaaaggggtggagtggggactgggatccaggctctgggtctcacctgcaataccagcacaggtcagcaggaggtggatggagtaggacgacagaagcgcaatgcacagcagcagggccctgcggcaggtggcacagctcagacctggccccaggcctcccacctgccccacaacacccctggccccgcaggccacctatggactcacaggaagaagatgacccccgtgtgggccatggcataggccagccccaggatgccgctgcccatgatggcgttgctgaggttgaacactgacattccaaacgatgtcttcccctcgaactgcacgcaaggagcaaagcccgggcacacattgggacagggcacagggtaaggagactaatgccagggccagggaaagactagagaagaagcaagcggggtggagagaagccaaggagagaccatcggaggagggaagaggctagcagggaagaagagttgaagatggaagaggctgcgaatggggagagctgggaagggggaaactaggacaaactttggagggagcagctggaagtggagaggaccgggggagggtgaagcagccaccagaggtaaaacagctggggaggggagacgctgcgggtggggataggctgaggatggggagtgctggaggaggaagaacagctggaggagaaaggcaggccgggaggggagcagccagggagggcagtcactgggccgaagagcgggtggggagaaacaaggccagggagagagctggaaagggcatatctggggaagaggagtatctggagaggggagcgaccaagtagtgtgtagctgtgctggggagatagctgggcaggggaacagcagggaggaggaggagtggggaagagggagcagtgcgggaggagattagctggggaaggtgccaccaggacagatcctgtggggccactcacatccatgaactggaccggcttgctcccaggagcaggaccacgactgggcaggaagccctcacgttcttgcctgtagctggatagggcagggaaataggggccgataagagggaaatcctgacccctgatccctgagcccacctccttggacccctgactcaccccacagcatccgaagggagggctccattcatctttggatcctgcagttccatcctgtgggcaaagaaatggggtggggggatcagagatggaacgagcatgcttcaaagtgaggggagctgaagaaggggggaggggagtcccatagagaccgatggaaagacggagaaagagacaaggcaggggagcaggaacagacagggatagaaatggaggcagactgacagagaaagagatgagagagagagaagaacaaaaatcagagaaggagagaagccaacagttagttactcagagagacacagagagagccagtgagagagaaatagtggggaagagagagacagaaagctacagagagagccggaccccagcgcagatgagccgaccacgtggagaagggatagcctctcctcccagaccccagactcacgctgtctctcttgccatctgtgtctttcattccc

SEQ ID NO: 42149 - DNA, 1028 bp, Artificial sequence
  DNA replication origin
agggtctcaaggagtcccatcccccaccaccagcaccctccggagcctcccacccacacctgaattcacttcctgggatcagggtacaaaaaggacctccccatacacgccattccattccccactagtgctaaaatgtctccaaggaaccccgagccccctcccaggacccctactcatatctcaggcccccaggaacaccatccccgcagcccacgctccctcctcacctacctgctcctctcagctcctgaagtggccgcaactcagactcaggttcgggcaccctctcggctgcctaggctcctgctctggagcggtacttttttttttttcctgagaagaaatgttaattttaatttcgtttccctccttctggccctgggcgggggaagaggtggagaaggggcgccccctatctggacccacttggagggagacagcggtttgtttgtgtgttgatggtgggggaaatggcctgaaagattgagggtgtagacccacagctagagagagtgacaggcagacagaggggatggactcacagagcagacggacagcaggatgggatggatggcagaaaaaggtgcagagaggagacagagagagagtaggagaactgaagttacaaagaaagcaggcatgagaaacagcacaggaacagacagaccacagaagggacagaaagacagatgggcgggaggaggggatgctaggggagcttggaagacaggcagagacagggagaaagggacacacaggcagactcagaaacaaacaggtgggtagggataggctcgtggaaacacctgcagaaaggcaacaggcaattgggctcagtcatagacaggagacacaggctggccaagaggtgggggacagagccagacagctccccaaacagagggtaggaccagacacaccagctcagagagatgaaggggcagagagagtggttgaggcagagagactcctggagggacaggagaaaagaggcagagagaggcagattcaggcagagaggcctg

SEQ ID NO: 42150 - DNA, 1851 bp, Artificial sequence
  DNA replication origin
tggattcagccgctttggccgtgcccgttgcatgccgggaaacgcagttcgcgagccccggatacgtcgacaatagatgacggggctcacgttgtacgttcacatcaggtcccggcccgccggaacctgggcgatccacgatgccgagtttgccacgctgcgacagcccataggcttgcccccccgggcattcgggtggactacgaacacaaactgaagccctaggacttgtcgcccgtttgcgctctcgccgaggcacaggctgctcgcggaccaccctgctccgaaaactaaggtgggccctggggcgcggaggacaggaatgcgggcggaggctattgaggcacgcctgcactgtcccgcctgcggggaaaggagggaggtccgccctgggcgccgtagctgtgtatggttcgggcggctggcaccgggtgggttctagacccaaggtttgtctgcagaaggggaccagtagacggggtggattcgaggtggggacatgggacgcagcggtcggagccgcctggaggggtacccggtggtcccgatggagctatcatctttgaggtattgatgaggagggacggggagtgtggtcagaaggctgttttgggaggttgggtggagcgtgagggtggggtgttactggggaatcaatgggggctaataagaatattttagtcgaactgttgttcattgattgattaatgaggggatggcagagtaagcaactagaatataacgagtgatggatgggaaaatgatcccccaggtattgatggaggtatgatattcaacgggttaatggaaagtgatggggcatcgtaatggcaaggatgatggtgaggttgtggggggaataatagatggatggaggtcatgatcaaggggccttggtgaaagaaaagataatgagaggctgatggtgttgtagtcagagtcagtagttgggctatggtggcatgaccgtcgaggaattaggggacagagtgagtaaagagagggcaatagtaaactagggttgggggggttaacttctgttgatacatagtaggtgaatagtaaactgttggagtgtgatcatccagtgatggatccatggagagcagggtggacagtgaggggagaatggggaactgatgtgtgatcagttaacgtgtttgttaatgaaagagttacagggcaggaggctagtgctgtgatctatgaagggtctattggagaaaactgagttaatgggggctgataaatcagtaattgaatgcttaatggggagctaatagaccatgattctccaggcattgttagaggttcataaggatgtagtaataaaggggcctaatcatctaagggattaatggcgaatggggtgaaacgagagagatatagggagtgggaggtacaatgaagtagtattaggataaaggtggaaaacaagggattaatgggggctaataggactatatgaatctaggggcaatggggacaactggggatacagtcagtgagattttaatgggcatgacatgagcagagaagggttgatagtggcagttgcagggtttaatgtgtggagtgtgggtgacagtgatgggaggtggacaggttcacaagtgggccatctatgggatgaatgttgggtttatggggtcttttgtgggaactgtggggtaagtgatgggggcgaggagggtctgtgtgataagcagtggagcctgagagttcagtgattgggtccttcaggccctataaggtcagtggggtcagtgccagggcttcagtcagcccatcttctgtgtgagctgtcatgtgggtcagatgagcccagtttagtttgtgtggttctctccg

SEQ ID NO: 42151 - DNA, 1324 bp, Artificial sequence
  DNA replication origin
acaaagtcctgcccaggtccgggggctgcaaggaggtggtggtaggagacatagcctgagggagagtcggaaaggtgatggggagggggtcctagcactcgcgctacagatccgcctggggaggccggcccagggatgggagctggggagccgcgtgcgcactactggcgacctacctggcaggaaagaagccgtggtcctggggaccgaggacgcgctgccgccgccgctgcctcctccgggcagcctcccccgcaggccgcaaggccgggaccagcagcggctcccagagcggcgcggcgagcgggccctttaaatcccggggcggcccggccgccggctcggccaatgggagagcaggaggggggcggggacggggacgcggaggaggggagcaggaggattgaggggagaccggcgcggggggacgtcggcgcgcaggacgttcacgcccgcacctttccggcctgtggcggtttcagccccagaccgtctgcctccggaggatttctggccatccaagaacaaacttccgaatctccaaatttccaagccttggaagtgagaagggaaagatgggggagggaggagggaagccgctgcacccccaaatagtcacccgcgcacgtcctctaaataccgtggtgtccccgtttcacagatgggaaaacaaaccgagatctctccttccccaacctttgagagaaccgaagtaactcccaaccctcccacctcctgggaccggccaggaacatttataagtaatgactgtgtcacctaggaacacaaattaggcgcctgtgcttcccctggggacgagctgtgagcacttggcgtgtcgtcgttgagaagtgatttgcatgcttaattccccagcagactctttgcttcgaaggtgaccccagcgactagtaaatgttctctgtgaactagagggaggctagtaccgagcacttaaaaggggggcatttataaagctcttaagggccaggctcggtggctcacgcctataaacccagcacttcgggaggccaagggtaggaggatagcttgaggtcaggagttcgagaccagcctggccaacatggcgaaaccccgtctctactaaaaatacaaaaattagccaggcgtggtggcgcacgcttgtaatcccagctactcgggaggttaaagcaggagaatcaggaggcagaggttgcagtgagccaagatcgcgtcattgtgggctacaagagcgaaactccgtctcaaaataaataaataaagactgggcgtggtggctcacacctgtaacccagcactttggaaggccgaggcggatgga

SEQ ID NO: 42152 - DNA, 1527 bp, Artificial sequence
  DNA replication origin
tttgaaaaatttcaaaataataaacctgggaaaaaatagaacatccatttaaaattaaaaaagaaagaaagaaaaaagaaagtgtagaaccttcggatctcagatttccagaaatctccgcctcctataggaatcttggggacttggaatctttcattaagatacaggcctgctatgactgtggaaacatttcagaatcctagaatccagaaatcgcatcatgccctgattatagaaatccacaatgccaacattttagaagtctagaatgtgagaatttcaaattgtcagaatctccaaacgctgtaatcatggtactttgggattccataaccctgtgacatcagcatgccaatgtcttataaccttgggatgtagacatttcagaatcccaagatccaagaatctcagctttctggaatcccagaactcaggaatactgaagggcatggcttggcatggcaggatgtggctcggtgtggcatggcatggggtggctggcatagtaggatgtggtatggtggaatggggtttggcctggtgggatgtggtggggctgaacatgttggggtccagcttggacatgctagggcctggcaggatgtgacagggtaaggtgtggctcgatatggatgaatgtgggaggtctgatatggcctggcatggtggcacacggtatggcaggcacttaccgagcctccagaggaggcggcaggcgaggcagatggcaaggagcagccagatctggtcaaggccctgctgggcagtaggcaggagacagccttgcagtagctgctggaaaaattcctggcggctaaaggtggccattgcagacccccacggatggatggccagatggatagatctgtcaaagcagggacacagagggagcgggtgtccgtggggcagacctcgcttaaaggatgcactctggcactcacatttcagtttggggctgcccagcccatgtagaggcacggtactggaggactgggggaaggcgtgagaagtcaggtacatcagactgagccaccaactgtgtgcatgtgggtgttcggcatgcacacgcacagcctgtgacctggagtgaatgaaggacctctgtctctccagtgctgtgaacagtccagtccgatggtgatgggatggcatacatttcaggcccatatatcaaatggggcgggcgacgggaaggggaatccctggtttccaaggtagagtcgctctgagtggagggcagagagggggattctgtgacacttgggggccgtgtgcatctctccttgtatggatgcggcggcacggggagggggggtgtcctgtatcctccgcgccccccatctcatccccacccggcgagaggccgccaacaaagtcctgcccaggtccgggggctgcaaggaggtggtggtaggagacatagcctgagggagagtcggaaaggtgatggggagggggtcctagcactcgcgctacagatccgcctggggaggccggcccagggatgggagctggggagccgcgtgc

SEQ ID NO: 42153 - DNA, 3055 bp, Artificial sequence
  DNA replication origin
ctaagcagagccaggatttgaactgaagtccacaggtcacttgatatttctttttttgagacggagttttgttcttgttgcccaggcttgagtgcaatggtgcagtctcagctcactgcaacctctgcctcccgggttcaagtgattctcctgccccagcctcccaagtagctgggattacaggtgcctggcaccacacctggctaatttttttgtatttttagtgcagaaggggtttcaccatgttggccaggctggtcttgaactcccaaccctcaggtgatctgcccgcctcagcctcccaaagtgttgggattacaggagtgagccactgtgcccggccttacagaggtcacttgaagccagtctacaggtatctgtggttttattatttattcttttccatctcttcaaaacttctcaagtacccagttgttttatgatggagggtctataaggtaatgatagacggcaggatgagtgatgggggtctgtagagtaagtgaggggtgtctgttgggtgaataatagcaggtctgtggagagtgacggaggatccctggggtggatgggagtctgtgggtacatgataggtgcactatgaggtaagtcatgggggtctgaggggtgaatgatggcatctgtgggtgagtgatggggtgtatatggtggattgtggaggaccgtgagttgagagatgggatggtggtgtgagtgataaggggtctgtgggatgagagatggactctgtgggttgagtgatggcttctgcaaggtgagttatgggatgcttatagggttagtaaaggggcatctgtaggatgagtggtgggtctgtggtgtcagtgataggggttgttagggtgactgatgaggggcttctggggtgagttatgggatcttcagagtgaagattttgggggtgataggggcctgtgggggtgagtgatggggttgaggtctgtgtggtgagttacggggtttctgtggggtcaataatgggcaatctgtgaaacgaatgaatgtgtgttggtagggagagtgatgggtatcttaggagttgatggggtatgtgggaagagtgatgggggatctgtggggtggcttatcagaagccaagaggctgagtgatggaatatatgtggtaggagtgttgggggctctgtgaggtgagagctgtggcatctgtggggtgagtgatggggagtgtcatgaactgaatgatgtcctcctccccaaattcatatgttgaagccctaatatcaggggaaccagcccccaatatttcaacataatgtcactatatctgaaatagagcctttaaggaggtaattaaggttaaatgagattataagggtggggccctaattcagtagaactggtatccttataagaagagggacactgggcatgagtgcacagagaaagggccacgtgaggacacagcaagaaggtagccatctgcaagccaaggagagaaaccccaccagacaccaaccctgatggcaccttgcacttggactgtccaacctcccgaagtgtgagaaactgtttgttgtttaagccacctggtctgtggcattttgttacggaagccagagccgactaacacaggggaggattagggtctgtggggttagcgatggggcctctctggaaggtatgatcaggggataataaactgagtaatagggatctgtggggtagtgacggggtctgtagggtcatgaggagcctgtggagtgaatggggtattgagtggcgagtggcaggattctgtgggattaatgatgggggctgtggggcaagtctgtagggggagtgaaggaggactttgaggaatgggggatctgtagatggctgatgaggatctatggggtgacgggggcatctgtggggtgggggaatgactgggggtctgtaggggtgctgatgtgctagctcataaggtgagagggctttgtggtgtgagagatggagggcctgtgagatgagtgggaggcacctgtggggttagtaatggggtgtcaatgggatgagtgattagagctctgtagagtcagtgatgagtgagtctgtagagtgagtgaagtgattaggggccaataagctgaatgatccaggggtggagtctgttggatgagtaatgtggctctgtgaggtgaatgacgtgaatatgtagggttcacgatagggcctgtggggtgagtgatgggggatctttagggtttgtgatgggaagtctatagggtgggtgttgggggggtccatgtggcagcaatgcaggggaatctgtgggctgagtaatcagggcatgtgatgggggtttgtggggtgaatgatggaagatctgtgaggctaagtattagggagtgagtggggtgagcacagagcggtattactgactgaatggtatctccccaaaattcatgctgaagccctaacccccaatacttcagaatgtgactgtatttgaaaatagggcctttcaagaggtgattaagttaaaatgaagttggtgaaggcgggtcccaatccactctggctggtgtccctataagaagagattaggacaccgacatgcgcaggcagagggaagactgtgtgaggacatggcgagaaggtgaccatctacaagcctcaggggacactaaactggttgacaccttgaacttggattttccgcctccagaactctgaggaaataaatttctgttgtttaagccaccaggtatgtggcattttgttatggcagttttagaaaactgacacagattttggtcctgggaagtggggtgctgccataataaatacctaaaacatggaagtagctttggaactgggtaatgggtagaggctgaaagagttttgaggtgcatgttagaaaaagcctatgttgctgctatgatcttaatatttgtgtccccccaacctccaattcctatgttgaaacctaatccccagtgtaatgatattaggaggtggggcctttgggaggtgattaggtcattcccttataagggatgaagggaccggagttctaccctcccaccat

SEQ ID NO: 42154 - DNA, 1993 bp, Artificial sequence
  DNA replication origin
gaggcggggtgtgggcctgacgtcatcacgcagcctcttcctttccccgcccccttctcttggcgaacgaggcgtcagtttaacacctccgtgaatccggaagtatgctgtcaaaacaaccaaaccacggggctgggggaggcggggcctcagtaggcgtctgcacgctagctgaaatagagcaaaatgcccgacttttgggggcggggctcctggcaacagcactctaggcgcaggcgcagaggcgacctccaggcagggccaggtgggagggacggtggggggtagggtcgcgcggcgccctctgcgcctgcgccccggcacgaggtggggcggcgggcgtcagtacagtagagtgtgcgccggggtggggggcaacggtcagccgtcaccctgagacgggcggcggcgggatggcaacagcctccggggcctcggacttgtctggctccggagcgcccccgcccggtgtgggagctcaggcggcggcggccgctgaggaggaggagcgagaggtggtgcgggtccgagtcaaggtgaggctggcggtgagtcggcccagccgccgaggcatcccaggggagggggaggcggtggctgtcataggatggagggcgggacctgagatttcggacataacctgagcggcgaagcttgagggccaagtgatgatggcgaggggtagggagggcctgagagcctgagagcgttagcgacgtaccttggggcgtgggactgaaaatagagggacgaggcgggggtctatgggatgaatgggtggagcttatagacaaaggggaggggctatggggctggaggaggggccgcagtagttgagggtggggctctgaggaatgagaaggtgctggctctggagtcagtcaacccatgtgttgagagtgcacttatgtgcaagttcccactttgatgagctgacaggctcgtgggtggagacaactaaagaaatgagatgcttcggacactaaaataatgaaaaaggttatgaaatagggagtcacgttagccaaggttgtacagggaaatccccagaggaggtattgaaggagcagagacccgaataaaaggagtcagccatgtgcatattagaagggaagagtattctaggcagaaggaatagcaagggcaaagactagaggatgggaatgagcctggcatgttcccgtaggttcctgattgctggagtggagagaatgaggggaagagtggtaggaggtgaatcagagcgctaagacagagacagatcgccaagggcctttggtgtgtatgctgaggaagaacgctgttgccatagttccagtaaacaatgatggtggctccgaccaaccagtggcactggcagtgataagagggtccacacatcacttcagtgtaatagagctctaaggtagaagtttgacattcagaaaaaagatgatgcctgagctgggcgtgaaccacgtgaagaaagtgggagggatgttccagacaggggatcagcacaatcaatggcctggagtcaggatggtttcaaggtaacttctaacagtttggtactactagagtgtaaagttcaaaaaacctggtgagaggctggctggggccccataggcccgcttgctgggactctagggttgccattgaagagattgaagcaggggagtgttgtaggtagatgtgttagattggttacagcaccatagaggactgatttaacaggagccagactggacacggtgattctggcaaccatagttgaagggatatagaagaaggattgggggcctgaactcttgcagtagcctcctcctcactggaccctgtggtccagaacacctgccttgatctggcccctggcacctctctgactttgccttctaccactctgcacctcactcttcagcatggtgatggggcccctggtggcctaccccatgtcttctctccccagaaatgtgagagcttcttgccgccagagttccgctcttttgctgta

SEQ ID NO: 42155 - DNA, 1182 bp, Artificial sequence
  DNA replication origin
cggcagccaccccgtccgggagggaggtgggggggtcagccccccgcccggccagccgtcccgtccgggagggaggtggggggtcagccccccgcccggccagccgtcccgtccgggagggaggtggggggtcagccccccgcccggccagccgccctgtccgggaggtgaggggcgcctctgcccggccgcccctactgggaagtgaggagcccctctgcccggccagccgccccatccgggagggaggtggccgggaaggaggtgggggggtcagccccccgcccggccagccgccccgtccgggagggaggtgtgggggtcagccccccgcccggccagccgccccgtccgggagggaggtgggggagtcagccccccgcccggccagccgccccgtccgggaggtgaggggcgcctctgcccggccgcccctactgggaagtgaggagcccctctgcccggccaccaccccgtctgggaggtgtacccaacagctcattgagaacgggccatgatgacaatggcggttttgtggaatagaaaagggggaaaggtggggaaaagattgagaaatcggatggttgctgtgtctgtgtagaaagaagtagacatgggagacttttcattttgttctgtactaagaaaaattcttctgccttgggatcctgttgatctgtgaccttaccccccaaccctgtgctctctgaaacatgtgctgtgtccactcagggttaaatggattaagggcggtgcaagatgtgctttgttaaacagatgcttgaaggcagcatgctccttaagagtcatcaccactccctaatctcaagtacccagggacacaaatactctgcctaggaaaaccagaaaaaaaaaaaaaaaaaaagaggttttagtacagctttgggtatactggaagcagttttatttgcagaaggtaaaaggctgtgcaatagactgaatgtttgtgtctccccaaacatgttgatatcctaacccctaatgtgatagtattagaaggtgggacctttgggaggtgattaagtcatgacagtggagccctcatgaatgggattggtgcccttatgaaagggaccccaggctgggcgcagtggcacacgcctgtaatcccagcactgtgggaggccgaagcaggtggatcacctgaggccagaagttcaa

SEQ ID NO: 42156 - DNA, 1249 bp, Artificial sequence
  DNA replication origin
gtggtggccgggcagaggggctcctcacttcccagtaggggcggccgggcagaggcgcccctcacctcccggacggggcggctggccgggcggggggctgactcccccacctccctcccggacggggcggctggccgggcggggggctgacccccacacctccctcccggacggggcggctggccgggcggggggctgacccccccacctccttcccggccacctccctcccggatggggcggctggccgggcagaggggctcctcacttcccagtaggggcggccgggcagaggcgcccctcacctcccggacagggcggctggccgggcggggggctgaccccccacctccctcccggacgggacggctggccgggcggggggctgaccccccacctccctcccggacgggacggctggccgggcggggggctgacccccccacctccctcccggacggggtggctgccgggcggagacgctcctcacttcccagacggggtggctgccgggcggagaggctcctcacttctcagactgggcggctgccgggcggaggggctcctcacttctcagacggggcggttgccaggcggagggtctcctcaattctcagacggggcggccggacagagacgctcctcacctcccagacggggtcgtggccgggccgaggcgctcctcacatcccagacagggcggcggggaagaggcgctccccccatctcagacaatgggcggccgggcagagacgctcctcacttcctagatgggatggcggccgggaagaggcactcctcacttcctaggtgggaaggcggccgggcagagacgctcctcactttccagactgggcagccaggcggagaggctcctcacatcccagacgatgggcggccaggcagagacgctcctcacttcccagacggggtggcggccgggcagaggctggaatctcggcactttggggggccaaggcaggcggctgggaggtggaggttgtagcgagccgagatcacgccactgcactccagcctgggcaccattgagcactgagttaacgagactccatctgcaatcccggcacctcgggaggccgaggctgacggatcactcgcggttaggagctggagaccagcccggccaacacagcgaaaccccgtctccaccaaaaaaatacgaaaaccagtcaggcgtggcggcgcgcgcctgcaatcgcaggcactgggcaggctgaggcaggagaat

SEQ ID NO: 42157 - DNA, 1239 bp, Artificial sequence
  DNA replication origin
aggtggaggttgtagcgagccgagatcacgccactgcactccagcctgggcaccattgagcactgagttaacgagactccatctgcaatcccggcacctcgggaggccgaggctgacggatcactcgcggttaggagctggagaccagcccggccaacacagcgaaaccccgtctccaccaaaaaaatacgaaaaccagtcaggcgtggcggcgcgcgcctgcaatcgcaggcactgggcaggctgaggcaggagaatcaggcagggaggttgcagtgagccgagatggcagcagcacagtccagcttcggctcgacatgagagggagaccgtggaaagagagggagaccgagagggagagggagactgagagggagagggagaccgagagggagagggagaccgagagggagagggagagggagaccgagagggagagggagagggagaccgagagggagagggagagggagagggagagggagagggagagggagaggaaacctctttctttagcactattcatgttctcttctcctggacgtcagtaccttaaatagagtcatcctccctcatggactccacacttctctctctctctctctctctctgtctctctctctctgagatagggtctcactctgtcacccaggctggaatgcagtggcaagatcatgggtcactgaaacctccacctcccagggctcaagtgatcttctcacctcagcctcctgagtagctgggactacaggcatgtgccacagtgcctggttaatttttgtattttttgcagagatggggtttcactatgttgcccaggttgatctcaaattcctgggctcaagcaatcttcctacctcggcctcccaaagtactgggattataggcatgagccactgtgcctagccatatatccttctctctcttatcctactccagtctggctttggtccgcacttgttcactgacattcctctctgtgacatgatgagttctctgtgggcacactgagtttgaggtgtcaaagcacataaaaatggaaaggtctactaggcagttgtttatgtggtccaactctcttttggttcatatttgcttggtgtatctttttccatccctctattttcaacctttctttgtggttttattctaagcgtgtttcctgtcacaggtctgtagttgaattaacaacaacaacaacaaatccaatctgataacctctgttttcaacaggcatgt

SEQ ID NO: 42158 - DNA, 1326 bp, Artificial sequence
  DNA replication origin
cactgcgcatgctccagagcggcgaccaatgggagcccggcgcgcagggacggaggcgggcccgggccgctaccgagaagcacagggacccgacttcagtcatcgaccaatcagagctcacagccccccacaccccctcccccccggccctgagccaattgccagctcgtgtgcgggagggccgggtcaagactaagtcaaaggaggagagggcaacgcggtgggcaggagagaggccaacggccgcccggggcgaggggagccggtaggacgggaccaggactggccgacccggccccgcgcggggaagggggcgccttcctcccacaacacaaaacggtgcgcccgggttggccgcccctccccagtggtgcggccccgggtggacgcttccgtgcgcgcgtccatgcccagccattgcgggctgcgggctccaagggtcgcacacgctggagagtgcaggttgccgggtccacccacagggctgtagacacccctagggtcacacagacaaggctctggacacccacaggggcacacacattggggagtgggcactcctgggctcacaaagactgaggcgcaggaaggtagggcgcgcccgcccagagggagttggtggtggctgagggtgagggcaaggtagggactgggaggagacttctggttccctggttggtcctggtggggcctgactgggccagggttttcctgtgcaggtgcggggagtagggcggggtctctggttggcggggagggctccaggagcctgtcccagccctgggggtgtctggctgagccccacagaagggaactctgagatgggctttgcagcaggggaaagaaaagggaggtcgcgcatactggcttcctgaccatccaccaatggtggtggaacctggaagcctgagggaggaaggtgaggaggcgcttgagggaggggggaatctaggcgtcagggatgatagttcattgatccaagttactcagctatttcatagaaacggcaacagtaatgaataattataacacgtgccaagctctcctgatcactttacacaaatcatctcactgcatcttcacaacaaccttaactactattatcatcttcgcgttctggatgagagacctgaggccctgtagaggttaccagaaggcacacagctgagaagcgccagggccagggcaagggtcaggctgtgcactctggactctgtgttctgaccactgcgtcattgactctacagatgtctctgctttctgtgctcaccctgtcctcattccgcccccggcaggacagagggcccctgaagcatccatttgccc

SEQ ID NO: 42159 - DNA, 1310 bp, Artificial sequence
  DNA replication origin
tcctgaacatctaactgaatgacagcctgcctaggactggctggggctggtagcctgacagtggaaaagacaggcagcctcctgaggaccttgcaggctggctgactgatggcccgtggtgctactgcctgcctgggtggccggatgttgtgaatgactattgtcaggaatcacagctggcgggggaatgtctagatgttatactgtctggcaccgtgtaaaggagggccacctggggaaacttcaggctaactgatcaacagacccgtggctgcttgctaggcagctgtatctggtgatcaactatccacgctgctcgaatcacagcatgctggagggcctggctgggtgctctgactgactgatcacctgacagacggtgcggtcagtcggatgctgagaatgactgacgatgtgatgaggggcggattgaacgagtcacaggccagctggccaggagcaaaatcggcatagctgtctgactcgatggctgtacgtggttacggactgtctgccctgatagaatctcagcttcaacgcatcagaggagactgacttgaccaatggtggggatgagtcgcctgagaaatgacagactggctgacccactgacaggtggtgtggaggcttaatcctacctctagttgctgtgactatttgctttgagggcctagctggatgttgtgactgatcgtggtgtgaatgagaagtaatctgagggaaagacagtgaccaactgatagtgcccgacagggctgtattagatgctgacagtgacagcttgtcccgacctaatcacagcccgcctgggggcatggctggatgctgcagtctatgagaggatttagccagggagaatcgcagctggtcccagggctatggtgggtggagaggaggactgattgatctgctgacaacgtgaggacaggatggtcttagggaatgataaggcaggctggctaacagtgctgtctgcctgcctccagggagtcgccgctggccagggcacaaatggaagccagtattgactgcccagcagtgtggatgggggccgggagtctgactaggcacctgtctggggcgaccgcctgagcagttggatacggcactagtccacctgggagccccggcctgcttggggttaaaatgagatgacgggctgactgacggtgataacagggagtatgacaggactgaggaaccactgcgactggctgataacgtgattggctagcagtgtgacagacagaccagcgcacgggcagggcctctggcaactttagctaccgccgctgtcgctcccgctgccg

SEQ ID NO: 42160 - DNA, 1196 bp, Artificial sequence
  DNA replication origin
gttcggtcacggctctccggttggtccgcgcgggtgctgcgagtcgggagccgcggccaataggctgcgcgttcccggccacgcccgcgcgagcgctcttctcgcgaggccggctaggcccgaatgtcgttagccgtggggaaagatggcggaaaatttaaaaggtgaagcagtggaggcagaggcgcgggcccgctggccgggccgggtgggctggaggggtggcgttgccggctcggggccccggcgtccgaggccccggcgccgggagccggaagctcggcgcggaaaggatgaggctcggggagcgcgggcctggtgcgcggggctgggcggggctcaggggagggggcgcgcgcctcggaacgcagcgggcctggggctaagtggggacgcaggaggggggcgcgcgctgcagatcgcggccggaccggcgcgcgcacgcgcgggggcttgtcgaggaggccgcgcccgcgcgcgggaaaatcggcccctggtgaccgttacccattcggtgtccacgcgagacgccggaaggggagggaagataagggggacagacccccccttcagagtgcggggactgagaactcttctgggggaaagtatcgcctctcggcgtgatgggggaagggtttggaatagaggatctcccagaagagagaaatggggccttcctaataggacagctggactcccccatgtgcagggaaagaggggtgactcagttatgttggggggcccctctatgtgacgaaagccgcagggaggatgggttccacaagtgggaggacctctgaggggttcaggagagtccacctgtggccagttccggagccagcagctggagggtgttaattgggaccacttaagtggggtttcaaatgcaagtgaaggaaggggtttgcgaggacaggctgtagggagaggaaagcgtgggcacaggcgggctcagtctccacttggtcttgcctaagtagggggggtagggcttgcacacgaaataattttgaaaagctcttgtacgtttttaggttgacatctaaagtttaggtgtgatttttgcaatgggaggcagaaaatattaaacattttaaaaagatgatataggatgaggactgactgcccttggaatgttttgagacatgatttgataaaatggcttctaaagtactttgattaagaatgtgccttga

SEQ ID NO: 42161 - DNA, 946 bp, Artificial sequence
  DNA replication origin
gggcagcagtgggggaggtgcatgtagcttcaggccccctcagtcagtctggcctcagacttctaagggctagaagaggtatttgcggcaggactcagtcccacacttgcattcaatacggacccgcttcttaggggagccagggagcccagccaggccaaagttggagtccatgcgggtgctctccatgtccacggggtccactgtggagtcacagccagggaggagaggagggaaggaggcagggagggagggggagaaggagggagggaggaaggtagggaaggaggcaggggacttgttagaaggcctggatgaagggtcccactaccctttataccatgagaccaaggatctttggggctgggagcaactctgggatttgagttgggagatcttagggttggtggtttggggctagggccagggctcagcactggaggttgttcaggccaggggttgaagaatgctgggggaggcagggagccgtcaaggaaccaggagggtcgttttaggtgtgtgggggggggcaggggcaggaatagagggccacctgggcatccagaggtacatctgaactctcctgccaaagacctgcccttgagggtctcagaggtggctagcttatcaaggaggggactggctggaggccacaagggtgtccagaggcttgggatgaagaaggccaaagggagctaggagtggggaggggctgggggatgagggaaactcagtcaagactggagtcaggagtttcttaactctccaggaatcttgggagaagttggtatgaatgcctcagggttagggttcaggggctgggaatgaggggactcgaggggtaggcaggggtctagtagtccgaatgggggactgggagtcaggaagagcatcttaaagctcccgctaaagaattttccttggttctctgagtgactggtgtgcc

SEQ ID NO: 42162 - DNA, 1654 bp, Artificial sequence
  DNA replication origin
tgtttttcctttctcttcatgtctcttttgtctcttgctctttgtctctgtgtctctgtctctctcttcccatctctccctgtttctccctctcttccctgtctcattgtgtgtcttctgctcactctttcaccactattccctcatcccctcaactccaccttacccaccatgatctccctccagccccactgcccccaacccctgcacctcacacgttggtgagtccagggctgcccacccctcccatggcaggggcccagcctcctcacccccagttatcactctccggacagagataaagtttatctcgaggctgggggatatgaaagctccttatcagctgccccactagagtaagtgttgccccaacggcggcagcaggcagcagctggcaccctccactctccctcggccccagcccctcaccccaggtaacgttccaatcccagccctcaagggagggtctcaccgggctgaagggagcagatataaggtctagggggcagatatggggcttagggggagatagaggtggaatttgaaggtcagatatggggttaagtcagagaggtttggggtgtagccatggagtttgtggggaggcagatatgggcggggttgtggagcagagacgagcttggaagttcagagacacattttgggctcaggaataggttgtgaaaacagacgaggttgggggatcggggcgaagtttgagagtcagaaataaagttgagaagtagtgtgggagtcagattctgagggtcatagaaaagtctggggagttcaagggtttttctggaggagagatggagtttaggagtcaaagatctgtttgggcagacagaatgtggctagtaaaggggagtttgagaagccaagatagaattggagtagagaaaggcttggagctggagagattcagggagacaatgagatgtgttttagggctgagatacggtttggggaaggcagacatgagggttcatgcggcagaacagattttggggagttgacttggtgtttgaagtgacaaagatattttactgagcaggcagggagttgggagagataaatggtttgcggagatcagagagaagtcattgggaacaaagagtgggtttgaaaggcagagatggtggtaagaggatggagctagggtttggcagatcagagacaggtttgggggctcagagagagtggggcaaagacaaggcgttgtagagcagataaggggtttgggagcagaaaagtgaggtttggaggagaagtcagggagacagagacaagtttgggtgagtggaaatcagatatgggacagggaaaggatttggggagataaagtcatgttttgggagacagagttagtgtttaggggagacagacctaggggtatagcgagcaaagtgaagggatccagaggatatagatatcttggacggagtggatgagagggcagaaagaggtggggtttagggggtagatttggggtagaaatgggagttggaaagacaggtgggttggaggagctgtaaagggattcagggctggctgacactttggggaccagctgtgggttggggagcctggagcaagcataagggtaggggcagcaggcccagggttgccttggtgggggctctctgggggc

SEQ ID NO: 42163 - DNA, 1438 bp, Artificial sequence
  DNA replication origin
ccgatcccccaacctcgtctgttttcacaacctattcctgagcccaaaatgtgtctctgaacttccaagctcgtctctgctccacaaccccgcccatatctgcctccccacaaactccatggctacaccccaaacctctctgacttaaccccatatctgaccttcaaattccacctctatctccccctaagccccatatctgccccctagaccttatatctgctcccttcagcccggtgagaccctcccttgagggctgggattggaacgttacctggggtgaggggctggggccgagggagagtggagggtgccagctgctgcctgctgccgccgttggggcaacacttactctagtggggcagctgataaggagctttcatatcccccagcctcgagataaactttatctctgtccggagagtgataactgggggtgaggaggctgggcccctgccatgggaggggtgggcagccctggactcaccaacgtgtgaggtgcaggggttgggggcagtggggctggagggagatcatggtgggtaaggtggagttgaggggatgagggaatagtggtgaaagagtgagcagaagacacacaatgagacagggaagagagggagaaacagggagagatgggaagagagagacagagacacagagacaaagagcaagagacaaaagagacatgaagagaaaggaaaaacagagagagagaaactcaacgagtaagagacagagacagacagatggccggagaaaaagaaggaaagacccgggagcagaaaaggagatagaaatgcagagatacacgcaggtagcactgtgaagaggcagagactaacacagaattagagacagagaggaaagagatggagaccaagatggggaagcaaaacactctcttcagagagcaacagcaggcaccctggggctgagaaggtgttggcggtgggcacacttgtggcccatctctttcctagcataactcccaagcctgggcctgccccttagcctgtctataccatgggtcatgtaagcaggagtgaggggcagtttgaagacagccttctagtctagccctgtcactccaccctacagacacagaaacagagcaggccagcacaatagggccagggccagcattccaggctccttatcctgagctgcatgtggctgggtacggtcaggggtatgggactagtaagaggcacgtggacataaggtcagagggcccaaagagagggaaacagagggaacagacaaacaagcaggaagagtgggagagatgcagagatgttcagagagataggagaggagagggagaaagcaagagtaacagaaagagagagccagagagagaaacatgggaagacagaaaagaagacagaaaatcatcaaacattacaaaagcacagaaagaggtcgggcgcagtgg

SEQ ID NO: 42164 - DNA, 1053 bp, Artificial sequence
  DNA replication origin
cttctagagggggagggaagaaaggacggggggacggggagaataagaggaagtggaggaggggaggagaggagatggggaaagggagaaaaggatgaacagaaaagggaggagaaggatgaagaaattggaggggaggagaaaatgagtagtaggagaaaggagtggagagtagatgtagacaggggaagagaggccggaagtggtggctcacacctgtaatcccagtactttgggaggctgaggtgggaggatcacttgaggccaggagttcaagaccagcctgggcaacagagtcataccccatttctacaaaaaaaaaacaaaaactagccaggcctggtggcacacacctgtagtcccagctactcaggaggctgaggcaggaggatcactgccgggaggcagtggttgcagtgagccgagatcgtgccactgcactccagcctggcaacagaggagaccctgcctcaaaaaaaagtgtgtgtggatgggggagagggagataaggtgtgtgagaaaggtagaaaaggagaatgaagacaaaaagagaaggaggacaaggaagaggggaaacaggaaaggagaaggaggaggtcaaggaggaaaagaagaaggtggaggagaaaaaggaagcaggagagaatgagaaaagagtggaaagagaaggaaatggggaagaggggggcaaagaagagatgggaagaagagagacgggagaaagacaggaggaaaagggaaggggggaagaagagagagaatggaaggaagaagggagaggtagaagcagatgagagtggaggaagagcgagaggagggaggagaggaaagacaaacggcaagagggggagaacgaggaggaagatgaaaggaggggcacacaggagtggaacggggagatgcaggagggaaaagagaggagagggaggaagagaaggaggggaaggagaggggagactaaggtgaggaggaggggggaatggggaggtgggaaggagaaatatggagactgaggtgatggagtgggaggagggggaaaggagggaagaggag

SEQ ID NO: 42165 - DNA, 1446 bp, Artificial sequence
  DNA replication origin
cacaattcccgctaccgctgcccccagccaccaccataaagccaccagctggtccttcggctgctcctgtgcctcccagactggagccccgtttctttttcccttttccagatgccttgcggtttcgagtctgaataccatccttccgcatggtcagtggccggttcacctgccaaaaaggaggctgcgggtgtccccaactccagacctttgcctctctgtgtcaaccagggacaccctctctaccccacttctttcagggtaagataatttttgggtgctgagattgtccaaggaatcctgaggctgtgaggccctgagcttaggaaagcctccaaggctgataggagctgcccaaggtctagggcagggggttggacattagctgatgcctggaggtgggggagaggagaggaaggaggagggcggaggaggagggaatggagaaggaaggagggagggtaataacagagaagggggaaagtagaagagatggaggaagggggaaagtagaagagatgggggaagggggaggaaggagggaaaggggaaagaggaaagagggttgtgggggaagagagaggtagaacaggaacagagtggggggcagtgtggcatgaagacagggaaagcagaggggtggctccaaggggcagggcgtcacctggtgtagcttgtagtagaggccgcaggcattgcacacgggatccccactggcatttctccgccacagtgtcgtggtggtcgtctggcagttggtgcactgagtacctgcccgtttactgacaatctaggggacgacaggatgtgagatcagtgccctggggatgtggaagtgggggtaaggggctcacaggggatgtcaggaggacccaagaagtgagggtcaggttgaaggcagggctttgtttacagggtgatgcctgaggattctgtatggggccagtacaggggttcctatctggtataagtttcttttgttctgtattctatgggggactacattggtggttctcagctttggctgcgtatcggaatcacttggggagctaaaatatcctgatgcccaagcagcatcccagtccaattccatcagcacatctgggagaagggacctggggtgattccagtgtgaagccaaggacgaaaacactggtgtgcagggtgaggacaaaggtttctgtttgaagcttataagggtaggttgaggataggagcttctatagatctgggttcctgtacaaggaaagggcaggagttctcatgcagggtgagggcaaggatttccatatgggatgaggagattttcctgtgtaggatgaaggcaagggtttccatgtgatattgggacaggggttcccatacagggtggcctgcagtagcttcctgtaatcatgagaacagcgttcctatataatgggaagatgtggcttcttgtacagggtg

SEQ ID NO: 42166 - DNA, 1663 bp, Artificial sequence
  DNA replication origin
cgcgcgggaagtcgcggggaaaaggtaagatgccccttcctaattccctcgcttccttgcttgctctccagacaccgccgacccgaagggctcctaagtgactggacagggacggaggggcggcggctatggcatccgggacgacagcgacgatagccgaggcaagaaaaagcttgcaccgcagccctgtcgggaaccgccggcgcctgccttttacgtaggcgcagcacagctggcgtagcacgccgacgcaccgccccgtcgcctgtgagctcgcggtgtggctcagcccagctggcgtagcacgccgacgcaccgccccgccgcttgtgagctcgcgagaggtgtggctcgcgcgaggggcgcggccttgaggcacggtcccctctggaggcgggatctgggcgggcagtcgagagacgaggcccaatggaaaagaaaagcctgagcgctcgcgtccccacaggtcgccagaaacttggtggagcgagccaagggcggagtttgagaaaggggctgcgtccaatgagtggagcggtgagtacagcgcgtcgacggcggaggcgggaagggggcggaggccgaccgaaggcggctagggactggctgaagagggttagcgaaacgttagcggtcgggtctgggcagggggtggagctggttgaaggaacggggcagtcccctgaggagcggggctggttgaaacgctaggggcgggatctggcggagtggaaggtaccggtccggcccgataaggggtggagttaagtgaatcgttaagggtggagtcgaaaccggggtcggggccggggccggctgagtgaaagggtgggtgattatcccgggagataggccgaaagggcaggttcgtgaaggaatggggtctgggctgggcttagagggtctgggaatggggcttaggagagtagaaggggcggtgattggttggaaagggcaggccctaagacggactgtgtgagcccgggggctcattgctccgtgaaagggcaagaccagggaaagagaatcgtgtaaaaggggtggagtctagcgggccgggcggggccgggtagaatggccacctgagtggagggagaaggcctgagagaggcggagtttggaaggctgtggagaatcagatcgcgtaaggaatggaatctaatagagggggcggagcctggaaaagggcagagaggtggggtcctcagggcacactagccccctcacatacccacgctcctccccccacccccagaaccgcggcaggggccaagcctcctcaactatgacctcaaccggccaggattccaccacaaccaggcagcgaagaagtaggcagaacccccagtcgccccctcaggactccagtgtcacttcggtgaggccctagacccgccctgatgagggggagagggagcaagttggtcatgccctggactctgacccttctctctgattcacagaagcgaaatattaaaaagggagccgttccccgctctatccccaatctagcggaggtaaagaagaaaggcaaaatgaagaagctcggccaagcaatggaagaagacctaatcgtgggactgcaagggatggtgagcagggcctggctgcagtttagcctcgtatgacaatcaaaacccaaaggttccccaccctggacagt

SEQ ID NO: 42167 - DNA, 1767 bp, Artificial sequence
  DNA replication origin
ccccgaaaccaggactccacttcgggctcggtgtgagcagcgtcgcccgggcatcctgtcaagacccatcccgactccgggtgaggcggccccgcttccagccaagcgccgacacccctcccggccggccgagtgaggggccgctcgcccgggagaaggcttggcgcttgggggacgatcccccaaagccggcgcggggatacccccaggcctggcagggccaggggcaccggcgcctcgctcacctgtgtccgtggggaggcgggcgcgctgggacgctctgacaggcctggcggggggcgacgctgctccccggggcaccccggcggcggttgggggagtggacatgcgcagccgccctccctcggctcctcaggccgcccacccccctgcgccgcgcccctgcccctgccactgccccgcccctgcccgtgccattgccccgggggagcaaggggtcgtgcccccccaggcggcttgcgcacaggcacgtgggtgccacagcggcctctaggggtgcacggacggcggccaaacctccccgtgtgtcccctgtggcgcctctcccttgctttcctgttggtggtgtgtgtgtgtgggagagttgggtgttagattttgaccaggatggcctgactttgggaacggttttgtgggaagctctttcaggccacagagcctgtgctgcctcaactcggttttttggtagctctggagaaaagacagtgacagaggaggggtcattctgtcagggaagaaagaccctgattggaggcggctgcctgtcaaactacacatttcccaggctcccttgcagctatggcaaccacatgcacagtcctgatcaatgagagggcagcagaggtggggcatccagagggctcttaaaacagggcagcccctggcccgggagtggtggctcacacccataatcccagcactttgggagaccaaggccagcggatcaccaggtcaggagtttgagaccagcctgcccaatatggcaaaaccccgtctctactaaaaatacaaaaattagccaggtgtggtggtaggcacctgtaatcccagctactcaggaggttgaggaaggagaatcacttgaacctgggaggcagaggctgcaatgagccgagatcgtgccactgcactccagcctgggtgacaagagcaagactccatctcaaaaaacaaaacaaaacaagaacggggcagccccggcccttccccatccctcctcttcttgactcagtaaggctgtggtggtcagcttgggatcataaggtggccatgaagaaaagtcctggaaacctcagatccaactcccttgagctgccaaagcaattctcaccacgtgggagaaattcagctctcagactgtcctccaatttcccacctgtggtcaatggcaggcaccccttctgccaagaagctaccatgaccaccacattcaagttaaacctggacctcccaccatccccagtcaggccaatgagacagtggggaaacaggcctggtaaggatacttcctgctagttttcttgccttctcagcctagggtgtgggtgtggctgggactggctgtgaggctcctatttataaggcaagcacccattttctcatggattctaccattttatatcccgtggagccagtcaagatggctgctctattttcagttagttttttgggggcaatggatgggcaggggattgacctgacagagacccactccctcattccttcattactcatcggctctgctgg

SEQ ID NO: 42168 - DNA, 1106 bp, Artificial sequence
  DNA replication origin
ggttaaaaagggggcggggcacaatggctcacgcctgtaatcccagcactttggaggccgagtcgggtggatcacctgaggtcaggagttcgagaccagcctgcccaacattgcgaaaccctgtctctaataaaaacacaaaaaaattagccaggagtggtggtggacgcctgtaatcccagctactcgggaggctgaggcagaagaatcgcttgaacccgggaggcggaggttgcagtgagctgagatcacaccacttgcactccagcctgggagataagagcaaaactccgtctcaaaaaaaaaaaaaaaaaaaaagtgaactatatgtcagtagcgggtgataagcatgcagaaggtgctcagttcatgccaggcttttaaattataatttaatctccattcattaattcaagaatcttccttcgtgccaggcattgtgatatggcagttaacaaaacagaccccagtccctgcccttgtgaggattggattctggcagagagaaagagacagtaacaagataaggaacaaggaagttgcatgttcgaagaggatgggcacacggcaggtggtcaattagtgttagttattagcagcacatccccattcactcagtgaatgcccctcggtgtccttgggctcaggaagtgccctgcttagtgcatcctaatggctgttgccacgactcccctccgaaagcctggcgcagcggcagtttgggggcggatggtggcttcgaggtttggtggagctggagatccggaggtcggagtcggggcaaggtcccaaatggggatgcggccgcggcgtcctcagctctgagggatccctgggaatagtcactggcggcgttggcccagaaggagcgggggcgggataaagagagcaggaagcggaggacggagcttgggggtccccgacggttggggacaggaagaagacctggaggactgcggggaggggcgaggcggcggcgcacgtggagggagaggtcggcttctgggggtcctgtaggggtgcccggccatctttagggatgggtcagaaggcagaggcggggtcgaggctgcctcttaagtcggggtctgagcggctggagtctg

SEQ ID NO: 42169 - DNA, 1258 bp, Artificial sequence
  DNA replication origin
tgcttaccccgtggagtgcgaacccctaagtcctggggcctaagagggagtgaggtcctggatccagggagtccaggcaaggatgcctggctgactcagtgggggaagtggaccccaggtcctgggaaggggagagggaggcggggaagccacagttttctgggatgaaaggcgatgacggctgtctactgaaagcagtgggctgaggacgccttcttggggagggaaccgtgtccccaggcagtatgtggttgtggatcctgcgttctgggccccgagcgtggggcgggggaacgccccaccgcggacaccgcctcactgctttgcgctcggccctgcaggtacttgctgggacggattcttgcgggaagcgcggactccgagggggtggcagccccgcgccgcctccgccgtgccgccgaccacgatgtgggctctgagctgccccctgagggcgtgctgggggcgctgctgcgtgtgaaacgcctagagaccccggcgccccaggtgcctgcacgccgcctcttgccaccctgagcactgcccggatcccgtgcaccctgggacccagaagtgcccccgccatcccgccaccaggactgctccccgccagcacgtccagagcaacttaccccggccagccagccctctcacccgaggatccctaccccctggccccacaataaacatgatctgaagcagctctgtgcttgtctgtgtgagtggcagtttctaggggctggtggttccccgcggtggtggttgcccttagaccaggagagaggagactctaccctgggtcctgcactttagagcaatcacctgctcagtctatgtctctcctaggggtggaggggaagacatccacatggacaatcgcggatcttgtgtcccccttttaggcctcacttgggtatggggatcccaggctttgaggccactttcagggcctgcaccatcatcttccaagggaccatcctcctgagggccaaggggtggctttgtggggcacgtgagtagagcttgaggtgctggctgggatgtcgcaggcacacatgaacacctcctgatgtggggaagagaaaaggagagagcggagagaaagggagagggcactgagggtcgggaggccccagtacaggcacactctttggcagacaggcacattctggcagggaactctgagaaggctgagaaattggagcctgggtatccaggtcactaataaagtgtatttgccaaagtaggatagggtgta

SEQ ID NO: 42170 - DNA, 825 bp, Artificial sequence
  DNA replication origin
ggcgctcctcgccgcttccggcggtcagtgccccgaggtgaggcggcgggggcggtgcaggagctggcgcgggcgctggcgcatctgctggaggccgaacgtcaggagcgggcgcgggccgaggcgcaggaggctgaggatcagcaggcgcgcgtcctggcgcagctgctgcgcgtctggggcgccccccgcaactctgatccggctctgggcctggacgacgaccccgacgcgcctgcagcgcagctcgctcgcgctctgctccgcgcccgccttgaccctgccgccctagcagcccagcttgtccccgcgcccgtccccgccgcggcgctccgaccccggcccccggtctacgacgacggccccgcgggcccggatgctgaggaggcaggcgacgagacacccgacgtggaccccgagctgttgaggtgcccggcagggggtggggaggggtcgggcgcctgcgtccggagaggacgagggcgaggaactgggaagcctgcttaccccgtggagtgcgaacccctaagtcctggggcctaagagggagtgaggtcctggatccagggagtccaggcaaggatgcctggctgactcagtgggggaagtggaccccaggtcctgggaaggggagagggaggcggggaagccacagttttctgggatgaaaggcgatgacggctgtctactgaaagcagtgggctgaggacgccttcttggggagggaaccgtgtccccaggcagtatgtggttgtggatcctgcgttctgggccccgagcgtggggcgggggaacgccccaccgcggacaccgcctcactgcttt

SEQ ID NO: 42171 - DNA, 770 bp, Artificial sequence
  DNA replication origin
tcgccctcgtcctctccggacgcaggcgcccgacccctccccaccccctgccgggcacctcaacagctcggggtccacgtcgggtgtctcgtcgcctgcctcctcagcatccgggcccgcggggccgtcgtcgtagaccgggggccggggtcggagcgccgcggcggggacgggcgcggggacaagctgggctgctagggcggcagggtcaaggcgggcgcggagcagagcgcgagcgagctgcgctgcaggcgcgtcggggtcgtcgtccaggcccagagccggatcagagttgcggggggcgccccagacgcgcagcagctgcgccaggacgcgcgcctgctgatcctcagcctcctgcgcctcggcccgcgcccgctcctgacgttcggcctccagcagatgcgccagcgcccgcgccagctcctgcaccgcccccgccgcctcacctcggggcactgaccgccggaagcggcgaggagcgccagtctcagccaagggcggagacgctgcgcttaggccgcggggctcctgcgggaaaatgaggtgggggaaaagagtttgtcagcgtccgtcgagacagggacccccagcccgggaagcttcgtaggcctcaaacatcccagatgccaccaaaagcaccgtgaccatccaaatatacccggacacccctaaggccactggaaaccaccaaatatctccagacgcacttaagaccaccaaagatccccagacaccccccacccccaccccacagcgcgccagtgatc

SEQ ID NO: 42172 - DNA, 1464 bp, Artificial sequence
  DNA replication origin
gggtgggtggggtgggggcgggggggggggggcctggttccgggcgtgcgcagccgcagagcgccgcagcctcgccagctcgccccggcactgcgcacttgccagccagtccgcccgtccggagcccggctcgctggggcagcatggcggggtcgccgctgctctgggggccgcgggccgggggcgtcggccttttggtgctgctgctgctcggcctgtttcggccgccccccgcgctctgcgcgcggccggtaaaggtgcgaccccagtccggcgaggggtgggggttgggggaggatgccaccggcgagggttggggttggggctgcgccgcctcacccccgcccgagccggctcccgggacgtgcggagagatcgacgagggtggcccgggctccggccgccggtccgcgcccaggccacgccggcacacctgagacctgacttggtctctgcctgtgcgggtggcgttgtccggggcgccgccggtaaccgtgccctgcccacctctccgtgcccggtgcctgtgacgctgtccacggcactaaggcgctttaagaaagggcgcgcgcgcatcagtgtgtgtgcgtgtgatgtgaggagagcggtgtggaggtgtcgtgtccttgaaagtgtgtgttctttggtttgagcgcttccaagtgtcctagaaaggtgccgtggtgcgtctgggtgtgtagtgtgtgtgataccgggatacttctgtgcgcgattcttttgtgcgtccgattgttttctcagtgacaccgtgtggatatttgtgaatccttattatgtgtgttggcttggcctatgggcgtgtctctctctctctctctctgtctctctctctctgtgtgtgtgtgtgtgtgtgtgtgtgtgtgtgtgtgtgtgtgatttcgtttgtgtttgagagggaatggtcttcgcatctccgtgtgcacattccatagtggttctgttggaccaagtgcctgggatttcgtttgcgtgttcctgagactgtttctctccgtttctttgtggagctgtgtcatcctgaggagaggagccatgatgtctctctgctgcattgtgtctttaaggatggtgcatgtccttgcacctgggtggcttggcgattgtaactgcaggagcagctgcggatgtgaacgtgtgcaggtccttgcatgtggctgtggcagtgttgggctgtatatgtgacatctccaggcctgtcagtcctcatgagtgtgtgtgaggctgtgattgctggtgagtgtgataccccggggtgactgaggagtggtgggcgccagcaagggcacttggagaggcatcctcctctagctcttcaatactgtctgcatcaaagatgggaattaaaaaaaactgttaccttatatccgtgtaacaatgtgtttaatatatatgtacaatgtaaagaatgatgacaaaataactctctcgtgtagcagtcactca

SEQ ID NO: 42173 - DNA, 1408 bp, Artificial sequence
  DNA replication origin
tggcctgggcgcggaccggcggccggagcccgggccaccctcgtcgatctctccgcacgtcccgggagccggctcgggcgggggtgaggcggcgcagccccaaccccaaccctcgccggtggcatcctcccccaacccccacccctcgccggactggggtcgcacctttaccggccgcgcgcagagcgcggggggcggccgaaacaggccgagcagcagcagcaccaaaaggccgacgcccccggcccgcggcccccagagcagcggcgaccccgccatgctgccccagcgagccgggctccggacgggcggactggctggcaagtgcgcagtgccggggcgagctggcgaggctgcggcgctctgcggctgcgcacgcccggaaccaggcccccccccccccgcccccaccccacccacccgaccgacgcaggcgcagcctggggagctggcagccccaccagacctcccgtcgccatggagatgcccaaagggcaaggtggagagctggcggttgccatggcagtcggagggcagttgctggggcaaccgaccttactgttaccttagtagacaggaaaacaggcaagaaaaattgactcagtggagtggaatgggggtctggtcctcatctctcttcctgggggaggagatggactttagtttgttcattagataaatagttaatggatcacccgcagtgggcccggcccgcgccagggagatgggttcaatctaggtgatgtgaccatggacagctcagttggccattctaaggctcaggctctcagcggcgtaaaggggttactactgacagcctccctcaaagtgaccttggaggtttagaatgacattcagtaggagctccataaatgctcctttccatcctctccttgtctctttgtgtttttttttttctgacagtgtctcgctgtgtcctccaggctggaggacagtggccggatctcagctcactgcaatctccacctccagggttcaaccaattctcatgcctcagcctgccaagtagctgggactacaggtgcccaccaccacgcctggctaatttttgtatttttgtagagatggggtttcgtcatgttgccaggttggtctccaacttctgagctcaagcaatcggccctcctcggcctcccaaagtgctgggattacaggcgttgagccaccatgcctggccccagcccaatactttcatctctccatggctctctgtgtttatctttctgcccttatgtgcccacagctctctctgtgtcttcctctccccatatgtctctccttgtctatgactttctctcctttcatctctccaaccgctgtcttgtctctgtctttattttactgtctatatctacttgttttccatagatagatatatacatagata

SEQ ID NO: 42174 - DNA, 1036 bp, Artificial sequence
  DNA replication origin
agagaagagcaagggggtccagccctgacaggtgtgggatcactttactcacttcctcagggacagaccccgacaggtcagggagaaagagacagacatgggggaatcaaagggacagaaagagaatagggagaaagacatagaaagagaagccagagtttacggagagatcaaaggagagagagatgcagaaaaagataccaagaggccgggcgtggtggctcatgcctgtaatcccagcgctttgggaggccgaggtgggtggatcacctgaggtcaggagttcgagaccagcctgaccaacaaggtgaaaccccgtctctactaaaaatacaaaagttagctgggcatggtggcacatgcctgtagtcccagatactcgggaggctgagacaggagaattgcttgaacccgggagacagaggttgcagataactgcactccagcctgggtgactgaacgagaccctgtcttaaaaagaaaaaaaaaaagtgagaaggaggggccaggtgcagtggcttatgcctgtaatcccagaacttgtggaggccgaagtgggcaggtcacttgaggtcaggagtttgagaccagcctggccaacatggtgaaaccccgtctctactaaaaatacaaaaattagccaagcacggtgacgggcgcctgtaatcccagctacttgcacggttgaggcaggagaattgcttgaacccgggaggcggaggttatagtgagccgagatcgcgccactgcacttcagcctgggagccagagtgagaatccgtccaaaaaaaaaagtgagaaggagaaagacacattggcaaagacacaaggcagaggtaacagggaaaaaagaaaaacaggagcagagagagaatgagattgagaaggtaaaacggatacagaggagcaagagatggagtcaatgcagaggcaggaggagcaaaagggagacggaagagaggtgcacgcacttcaccttgagtcgggctgctggtctcagtgttcctatttccgctgctctcttagtggcatttgg

SEQ ID NO: 42175 - DNA, 1431 bp, Artificial sequence
  DNA replication origin
ccaccgccaggccccgcccctctcccgcgcgcgggtccagctgcgcagtctccaggctgcgggcggccggacccacccgcggggcctaggagcggtccttctgcgtgccctcggcccgggtggcttgaccgcttgcggcgacgttcggggcctcctccggccgctggctggggcggggctggggggccggagtcacctggagtggggcgggagcagcaccacgtttagaagcgagggagcgggctgggaaaccgaggctaggggcctcgcgtgagagttgcagggaggctggggacggtgccgggggaggggggactccgtggaggcctcgcgtcaacggcatcacccaggctcaccaggcccggagctggggctggggcgccctgggtcgtccgcggctcgcgagctggggcgcgcggctggggcgagccctgaggccccgccctctgactgacctaggcccggggccggcggcctctgttcctataagaaggaaatacggggtgagacccttggttgtttcgacgagaagagactacagagaccaagggaagacgggggatggagagataaagagagggagagaaatagaaacagacatgcacgtagggaggtagagaccgacagagaggtggaaagagatggaggcagagagacacgcaagagatcaatgaaaagagacagagaggaggagagacgctaagaaatagaagaagctgcgtgagggtcagaaacgcaggcaggtagaggggaataccacgtcagatgcaggcaaacacaggagacatagtgaggagcgggtgagctgtgagctggcttcaggccgggcctcctccggctgccgcccacccacaccctagctgcggggcctcaggggacagatgccttacctgcatcctcttggtgtctctctctggcactctcccagtctcgtcgctcatttaatcccatctgcttccagcaaggacttcagcggctctgtctcaggttcctcctcctgtttcttcctgcttcctccctgcctaagcccttagtctctgcctctatctgtcttgatctctcagctccgcatcctcattttttttgctttggtctccctggctggtgctttcacagtgtgaccccggtggcccttgagtttgccacccacctgtctgcatggggagaagggaaatagtctgtgggcaagaggggttaaggaggtgggtgggatcagagaagagcaagggggtccagccctgacaggtgtgggatcactttactcacttcctcagggacagaccccgacaggtcagggagaaagagacagacatgggggaatcaaagggacagaaagagaatagggagaaagacatagaaagagaagccagagtttacggagagatcaaaggagagagagatgcagaaaaagataccaagaggccgggcgtg

SEQ ID NO: 42176 - DNA, 1291 bp, Artificial sequence
  DNA replication origin
ggtcagtcagagggcggggcctcagggctcgccccagccgcgcgccccagctcgcgagccgcggacgacccagggcgccccagccccagctccgggcctggtgagcctgggtgatgccgttgacgcgaggcctccacggagtcccccctcccccggcaccgtccccagcctccctgcaactctcacgcgaggcccctagcctcggtttcccagcccgctccctcgcttctaaacgtggtgctgctcccgccccactccaggtgactccggccccccagccccgccccagccagcggccggaggaggccccgaacgtcgccgcaagcggtcaagccacccgggccgagggcacgcagaaggaccgctcctaggccccgcgggtgggtccggccgcccgcagcctggagactgcgcagctggacccgcgcgcgggagaggggcggggcctggcggtgggaggaggtgggtccagaggctgccgagggcgggagcctgcgggtctcggggagcgtggagaggcgcagcctcggaggagccgggtggttgtaggaaggaggtggggcccgccgcgggctcaggggacggtgttgagcgaaacgaccagggcgggtccgaggggcagggccggagaccaagggagcgtggagcctccaggactctcggaagggaagggcctccaggagctactctccaggggcggcgctagatccacgcaagtgaaggcctgcagggggcagggccggcccaaagatccagaaggggcgggactaaaggaggtattggccccaggacacaaggaacaccctgggtctgactggcgctccgatctcaaagatgcatgcctggtgctgccgccgcggtacttgtggagatgcgggttcgaggcctaagcccgggccccgcgctgccctccctggtccctcagtggcgtggctgcgccctgcccggcattgagtcgctcaaacaggtatcacagctgtcaccgctgaggactctttacattcccacggaccagttttgtaagggactggcttgcaagaaagggacgtttttcatgtctctcgaggtattcgccactggagcagtttgtgcagaggaaacccttaactcctcaggaagcttttgagcctccccgtggcttctgcaccccagtgtaggcaatgtttgccccacccaggtagagcttttcgcagaagtcacagcttgggggcgggggtatgtccacccagaaaaatctcctagctcccccatcccaaaatgaaaactcatttctggttattttgtggttacc

SEQ ID NO: 42177 - DNA, 1423 bp, Artificial sequence
  DNA replication origin
cacggaccagttttgtaagggactggcttgcaagaaagggacgtttttcatgtctctcgaggtattcgccactggagcagtttgtgcagaggaaacccttaactcctcaggaagcttttgagcctccccgtggcttctgcaccccagtgtaggcaatgtttgccccacccaggtagagcttttcgcagaagtcacagcttgggggcgggggtatgtccacccagaaaaatctcctagctcccccatcccaaaatgaaaactcatttctggttattttgtggttaccctttaaaaacactagacctggccgggtgcggtggctcacgcctgtaatcccagcactttgggaggccgaggcgggcagatcacctgaggtcaggagtttgagaccagcctggccaacatggtaaaaccccgtctctactgaaaatacaaaaattggccgagcgtggtggctcacgcctgtaatcctagcactttgagaggccgaggtgggcggatcacttgagatcaggagttcgaaaccagcctggctaacatggtgaaacctcgtctctactaaaaatacaaaaagttagctgggtgtggtggtggacgcctgtaatcccaactactcaggaggctgaagcaggagatcacttgaacccgggaggtggaggttgcagtgagccgagatcacgccactgcactccagcctgggtgacagagcaagactccgtctcaaaacaacaaataaaaacacttgaccacactgagcagaggaaagcagaaaagcagctctgtgacagaaggggaggctgatccagggcaccttctttgaaggagctaggtctcctggcccccttcttccatcccagatccaccctgaggccacatggagggaggggaatcaccttcacaaatgccgtgctgagtgtccagaaagaagggactcctgtgaggccacatttcccagcctcggtgacgggggcttgtggaccaggagtcagggatattggagtgtgtggggggggatggggtcaggggtgcaacgtccagaaccacccccatccccagcaatcctggtgttcattcacttctttcccaagcttgttcctctgacagctaggacccatcaccaggccccagacaaccttattcatgtccctaattcacatcttcattctcccttcctgctcatccatcccatagacatttactagagcccacttgctgtgggcctccaagtcctagggcttccaagtccctgaagcaggctctgcccctcatcctaaggaggggccccataggcagttcaaggagtccacacataggcatttcaaaacgggctttaaatactcatcagggtgccacacaaaggagctggggtgagaacttcgtacatgtgagtgtggggctggggtgccctgagagagaaaaaggg

SEQ ID NO: 42178 - DNA, 1179 bp, Artificial sequence
  DNA replication origin
acgaacgcggaagtggtttttctgttgccgaggggacgggccgggcagatgccaacatggcagcggttggggctggtggttccaccgcggcgcccgggccaggggcggtttccgcgggtgcattggagccggggaccgccagtgcgggtgagacagtctgcccgagcagtcgcatgggaggcggaggtcgggatcgctgggagtcgggaatgttcctcactaaagtgagagggagcatcccgtgtggaccgacgtgtgtgtgtgtgtgtgtgtgcacattgtcagtgtgttgggggcggggaagagaacattctgagagtgattgtgggatccttccgcatatggagagtagagaccattgtgagtgtggtgggtaattctttttgggaaggctaaggccaccgaaaccattctgaatatgtggagtccttccgtgtggaagagaccattctgcgggtgtgggagttcctcactgaagaagggggagactattctgagggtggtggttccttccttataaagggacagagactattgtgagttagggtggggcgagtccttctttatgtgactagagagggtccattttgaggatgggggtgtctttcattatgtgcggaggagaccgttctgggggctccctcctaatggaggtagagttcattgtacattcgggtgggagggctcatcgttatatggtggagaaagaacgttctgagagtgccgggtccttccttatagcagagagagctcattgtgagtgtgggtagagcaaggaaaaattcattagctagagggtccgtgtgcggtggtgggagggcagaccatgtggagtgcagggaagtatttcctcatctggttgagggagccagacctttcttggtgggataaccattcctgatacaggattcagtccctgggagcatgtgggaatcatttcttgtatttagtagactattctggttcgagaggaaccagttgtcacaggagtgaggggttggagagaccattctgggtatgaggaggatcattccatatgggatgtaggccattctcagtgtgagggaatcgaatcatttcttagataggagaaagaccgttcttagggggtgaacatacctcatacagtggcctcattccctgcattgatgtgttattctttacatgagacagtccctc

SEQ ID NO: 42179 - DNA, 1243 bp, Artificial sequence
  DNA replication origin
agatcgactccaggtatccgtcatgagggtcttgggagggtcaggtgcgtgtggcgggggcgggggtcctggccctggaatgctggttgaccgaggagtgagcctgcagagtgtgtagaggaccaggtgtgtgtgtgtgtgtgtccgtgtccgtgtccgaggagtgagcctgcagtgtgtgtagagggccaggtgtgtgtgcgtgcgcgtgtgtgtgtcggtctaggaggttatgggcggggggggggggcagggggcttcagattccggagttccttgaccccggggtccaggctgtgtatgtgtgggaaagcagggacctagatgtgagatttgtgggacttttggaggtaggtgtccagtgtggagtcatgcggaccaggaccctggtacagagttggggtgtcgtagagctaaataggaagattgtgggcctggggtatcaggaaatctagaactcaggacttggagtgatgagtcctgatgcctgagaacggagagcccagggctaaggaaggtgggagagataaacttggttccgaggacctggagggcaggggagacgccctggtacgcgttctgtggggtgctgtggttggggaccagaaagactagagtgctggtagatggaggaatactggaggtaggcagaaggtctagactgggaggggtctggggatcacctgctggcctccttatcacggccttcttctccaggtggccatcaaagtgattccccggaatcgtgtgctgggctggtcccccttggtgagtaccttcggagcccttcctaacctacctactccatcactgatgtattcacctccttgcttttccaggggatgtatgactccctgggccctgtaacagtgagaatactgccagcccatttatactcccttggggtgacatacagttctgattcaccccaattcccctagagccctggattctcccctccaacaaacctttaccatccttcctccaaacactgctgggggactgcccgcagggcgtgctggtggggaacaaggggcagaggtcactggttgccatggtgatggtggctgcttctctcttgccgttataacgctaacggacatcagggcgggtctgggcaagttgtagagttgggagcgccccctggcgggctctaggggaaactgcgcctgcgcagtccatgggacccaaagggagagggtgcgcctgcgcaatatcggtatttttgcatctcggtgagaaa

SEQ ID NO: 42180 - DNA, 717 bp, Artificial sequence
  DNA replication origin
tcagtagcattggggctggcgcgcgcggcgaatctcaacgctgcgccgtctgcgggcgcttccgggccaccagtttctctgctttccaccctggcgccccccagccctggctccccagctgcgctgccccgggcgtccacgccctgcgggcttagcgggttcagtgggctcaatctgcgcagcgccacctccatgttgaccaagcctctacaggggcctcccgcgccccccgggacccccacgccgccgccaggtgagtacatcctcccctactgcaaccagacggggtgggctggaatgatgggttgcagcgcggggggagggagtcgtggctgggctcagcacgccgccaccctgacttcctcgcctccgcctgcgtaggaggcaaggatcgggaagcgttcgaggccgagtatcgactcggccccctcctgggtaaggggggctttggcaccgtcttcgcaggacaccgcctcacagatcgactccaggtatccgtcatgagggtcttgggagggtcaggtgcgtgtggcgggggcgggggtcctggccctggaatgctggttgaccgaggagtgagcctgcagagtgtgtagaggaccaggtgtgtgtgtgtgtgtgtccgtgtccgtgtccgaggagtgagcctgcagtgtgtgtagagggccaggtgtgtgtgcgtgcgcgtgtgtgtgtcggtctaggaggttatgggcg

SEQ ID NO: 42181 - DNA, 942 bp, Artificial sequence
  DNA replication origin
aggctggagtgcagtggcgcagtctcggctcactgcaagctccgcctcccaggttgatgccattctcctgcctcagcctgcggagtaactaggactacaggcgcccaccaccacgcctggctaattttttgtatttttagtagagacggggtttcaccgtgttagccaggatggtctccatctcctgacctcgtgatccgaccacctcggcctcccaaagtgctgggattacaggcgtgagccaccgcacccggctgaaggagctgagttttattccacaaatacctactaccagtctgtggcaggccctgttttcagtatatggggatacataggtgagcccagcagaccaagatccccgtccttgtgatgttcacagttttgcagagtgaaataaaataataaatataatgaataaattagttgggaagtgctatggatggaaagtgtagagccaggataaaggggctgagcaggaatgtgcgttcacggtatgaaatagcgcagtcagggtaggcctcagagcaggtgagatttgagccttgcagaaggtgagagttagctgagcgcacatggaggggaggacagcaggcccacacacctggtacaactcaggcacagcccagagggaggccggtgtatccgaacagaatgtagtagtagatgaagtcagagaggttgtgggtccaattgggtaggggcttgtgggctgtggcgaggactttggcatttactctcagagaggcagaaaccatgggaggattgtgagcagaggacggacaggatgtggttggggatttaataagatcgccttgcctgctagtcatccagtggagtctggtgagtgagggcagaagcaggggccagtgaggaggaggctactgcagtaggccaggtgactggtggccagtgctggcagtggagttggtgagaaggggttgg

SEQ ID NO: 42182 - DNA, 1545 bp, Artificial sequence
  DNA replication origin
tagccccctcatccgggttctctcccggcgtgccccgcgccgggtttgttggggggtactcggcagtgcagccatgactatactccccaaaaagaagccgccgcctcccgacgccgaccccgccaacgagccgccgccgcccgggccgatgcccccggcgccgcggcgcggcggaggtgtgggcgtgggcggcggcggcacgggcgtgggcggcggcgatcgcgaccgtgactccggcgtcgtgggggcccgtccgcgagcttcgccaccgcctcaaggcccgctaccaggaccgccgggcgctcttcatcgctgggcgctggccgtgccgcctggtgcagtggcgggtccccggccacaacaggcttctccacctccttgcgggggcccaggtggtcccggcggcggtcccggcgacgcgctgggcgcagcggcggcgggtgtgggtgccgcgggcgtggtggtgggtgtgggtggtgccgtaggcgtgggcggctgctgctccgggcctgggcacagcaagcggcgacgtcaagctcccggggttggcgcggttggcgggggcagtcccgagcgtgaggaggtcggcgcaggctacaacagtgaggacgagtatgaggcggctgcagcacgcatcgaggctatggaccctgccactgtcgagcaggtaagagctgtggggtgaggggtgagcggccacggcagatgggacccccagactgtgaagggactcaaggaaggctgtttgagatcgccccaagggatctaggcgttttcactgggcctgacagtcttctctggcggtagggatgtgagacaccttctttcctcccctccaggattttggggctagaggcctacggtaaggtgtcagacttaaagatccgaggtctcttttaaggtctatagtcgtcattccagtccctgggacctcatcatatagggccaataggtgggaattctccaagagatacaggtaggatcgcgcccctcttgagtaggagtctcaggtctcccaagagacttaggtatgtgttcagtggcttaagagctcttttcctctgggatagaagtttgagattccccttccaggaaagtcaaataaggtggagacctcggagatcggggctgaacatccccaaggagcctaagccctttcaagagtctgagacactctgcatataggacaatcctctcccgcttcgctgggtaacactgcacaggaccactgaatagccagacctgagacctcaagggtcctaagtctgtcttcaggggcctgagagtcctgcttctagaatcaaggtcctgacacacacacacacacacacgccccctttaaggatagggatcttctaagctttttccagggatgtaagacttttcacagggagatatgattcccttgcccttggggacagggaccaaaaccaacacccaatgaccagcagctttacttatctcctttctgagtgacaaaggtctgcatttcctatcagtggcctgagacctacctcttgggagacaagggcctgaaccgcttca

SEQ ID NO: 42183 - DNA, 1367 bp, Artificial sequence
  DNA replication origin
ccactgcaccaccatgcagactactttattgaacacttcctatgtgctgggcacagcaccaggcccttcacaagcattaatctctgatcctcggattagaattattgccaatttatagaatagaaattaaggatgggtgctcacttcgcaccacatatactaaaattagaacgatacagagattagcatggcactatgcgaaaggatgacacgcaaatacgtgaagcgttctataaaaaagtaaacaacaacaacaaaaattgaggacggggtgggttttaaatgactgacaaagatcactcagacaggaagggcagagctaggattagcgtgtagctctccagctactcaatagcagggattctgccaaccccattttgagacgctgactggtgacagagctttcataaacctcgatcgacccaagcaaactcagttttagaaaaaggctgggcttggccaggcgcggtgactaacgcctgtaatcccagcactctgggaagccgaggcgggaggatcgcttgagcccgggagctggagatcagcctgggcaacatagtgagactttgtccctacaaaaaagtgaaaaaaaaattagccggtcgtagtggtgcgcgcctgtggtcccagctattcgggaggctgaggcgggaggatcgcttgaacctgggagttggagtttgcagtgagctatgatcgcgccactgcattccaacctgggcgacagagtgagacccctgtctcaattaggaaaaaaaaaaaaaaaaaaaaaaaaaaaggctgggccgcgcctgcgcactagccataggggcggggaggtcaacgcgaggccgagagtgctgtggtgccagagaaggcgtgtctgtttcccaaacaaccactgtccccacggcgcctgtctgtcccaaggttggtcggtatgccgcgagtgacggcgtctcttaaccaatcaccgcagaactcaggctgttgccggggcgaagcggtgtccgcctcccccggaagggtatttgtaggtgggtgggaccggaagtgacgctacaggggccagctatgctcccgggagtgttgatgttttccagtcattccggctgacagcgttcaagttggaatcctggaggggaggtgtttttcctgtcgtacgtgggacaggccacgctgtccgtccgcagtaccgacgcctgcaggtcagagcttcggggagaaaagtgaagagcaagacggaactgacggggagaaaggctgggaaccagggtgtcgactttgactgaaatttgagacggagggcaccggagggcgagcactcgcctgtgattggcccgtgggcgtcgtcgaggtcccacgcagctgctcaattggttggtgtt

SEQ ID NO: 42184 - DNA, 1434 bp, Artificial sequence
  DNA replication origin
tggatgcactcctgccgtgggcaatgcagccgccccgttcggtagaagttcagcacatggcggaacatgtcagggtcgcgatcgaagaagtactcgcctgagtcagcatcgtagaagaattccttctccgagctgcccagcaaggtgtctgggtagcggtccagcgtattcttccaagtctcaaagcgccgtccgctcacgttcaccaccagaacctcatctcctcgagatgccttcacccccggtgccgggggcaggggttgctgggccaggggcagccagcccactgctgctgcccgagcaaaaggcagccacgtggccaggcctgccgccatcgtgccactccccaagcccagggagacttagtgagggtggcgtttaggagaatgtggctgtctccaggatggtgggggcttggagacaccttgagccacccaaacaaggaaactgggggtgtctagagaggccaagaggaaccaggaggaagaactaaagagatgggaaggagtctgggggacatttacagaacctaggaggggcctgggcaatgttctgagggactgagaagggccttggggacatggagaagagcagaaaaggggtgtggggatggggccaagaaggagctgagggagggtttagagagactgagatgattctaaaggagtcagcctgtgcctgagaggtgtctgggggcgtctagaggggccaagaaacacgtggggaattctctgcactctcaagagtctcagggaaggcagaagagcctggaattcctttgcagtggtggagaggagactggggcatccagaggggtagaaatgggaccagaggtgcttgaaagagactgagagtgcctggaagtgggggttctagaggggctgagacaggtgaggagggttgtccacaccctcaagacttctaggggaagcataagagggttagacccccctcatggatctggaaagggagctggtgcatcttgaggggtggctgtggatccaggaggttgtaaagaggctgaaaggtgtcttgggactgcctagagttgccaagaatagcccgggggggtgtctatactctacaggagttctggggaagaaaggagaggccagagcctcctagtagggctggagaggggaaggggttatctaaaggggtagacagggggctgggttattttttgagaggctgagagttatctgggggaggtgggtatctagacgggccaacaaagcctggtcgacactctcaggagttctacagggaggaaaaaggggcctggggaattccaagggccgggactcaaatgttaggaagttgggcacaatcccagagcacccaggggatctatgaagactaaataagaggaagggggttaaccccaaaatgggattaagaggggggtggggtgttgaaagggagttgggtgtg

SEQ ID NO: 42185 - DNA, 833 bp, Artificial sequence
  DNA replication origin
atccaggaggttgtaaagaggctgaaaggtgtcttgggactgcctagagttgccaagaatagcccgggggggtgtctatactctacaggagttctggggaagaaaggagaggccagagcctcctagtagggctggagaggggaaggggttatctaaaggggtagacagggggctgggttattttttgagaggctgagagttatctgggggaggtgggtatctagacgggccaacaaagcctggtcgacactctcaggagttctacagggaggaaaaaggggcctggggaattccaagggccgggactcaaatgttaggaagttgggcacaatcccagagcacccaggggatctatgaagactaaataagaggaagggggttaaccccaaaatgggattaagaggggggtggggtgttgaaagggagttgggtgtgtctccagggaggggggctcctgggctttgcaggaagctggcaggagacgccgggagaaggctgggtcccaccgttgggggcaggtctggggaaaccacaccccgaggggctggcggtgtgtactgggcagtggcagtagcagcagcggcagcaggaggaagagaagcaaccacagccaggcataggagagaaggtggcataggcagggggagggtgcggggtccctggaaggaggcctgggaagggcaaggtccagtgggacccctggggactatcccaggatgggttagggcgtgggggctggaccagggaaggatgaggacagcgctagtggtggtccccctccccctctctctcggggcgtcctcacctgtgtccccgctgcaggagcagcaaca

SEQ ID NO: 42186 - DNA, 1259 bp, Artificial sequence
  DNA replication origin
aaccaggtgacctcagggctcaaagccttctaatcccagcagagtgagcggccccatctgtcaaattactgccccccagcagcaatccaggacctgtttcagcaccacggacagtgctccagggccagaccctgtccaatcactctctgccgctgttaggtttcagcccagatgacccctacccctcatttcccctttgactatcccaggcaccagcaccttgctgaactcggccattagtgtgctgttctgcaaacggaagtcctcctcctggctgtgcagctttgcctgcagcatctcattttcactcagcaatacctcgacttcctgcagtggcagacaagggccaggactccagcaagggcaaaaaggatagggaggtagggcaaagaaacagagagagggagaaaatgacatgggtgggagaggacatagggtacagagaatgaggtgatataggagaaagagacatggggagggataaaatgagagacagggaaaggaagataaagacatgggaaggtagagagaagggaatacagggaggaagagagcggaggaaaagacaggaagataatgattggggagagaggaagtagagatggggaaagggggagagatagaaaaggggagagggattgggagggagagagtgaaaaagacggagagaagaacaaacagaaatcaacagggagagaacagaacagggagaagaggaggggtcaggaaaagaaatgagttaggaagagagaggaatggggtggaagaaacaaggagttagagagagaaagcagaaaaaagagaaatcaccgagacaggaacaggagggggagagacaaagagaagattgggaagagaaatgagtcagagagacaggaacaggaaaacagacagagacagaaagagactcagagaaaagaatggaaagagagagaaggaaagagacacagagttaggacaaatacagggaaacaaggacagatacagcaacacatggcagtgaggtagtagcagatgtaaaggcacacaaagaaagaaaggccagtacaaggaaatatcagcatacagaaatagcccaccaagacatctcccagtcacactcacccacaagggatccccttacctgagctttcttgctcttgctcagtgcctaaagtgggggtgggtgggaagagagctaaagtgaacagagatggactgccttactaggatatggagacaattgtgccaagcgttttgggaggacaaggatgacaggg

SEQ ID NO: 42187 - DNA, 1104 bp, Artificial sequence
  DNA replication origin
gggtctcccggaggaggggcgggaacaagaccagagcgaagcttccgctttcatttctatggttattaagttacccattctcattaaaggaataccgcggaagggtgattttctgtcggcaaagacttccctagcgacgagtccacccatgaaacggggatgtaataatgtcgtatcacaatgggtggcctagaagagtccaaaagccaatcagatgacttacattcgggtagaacgttgtattacagttcacctgactcgtcggtttcgttctcttctctgcgtctccaaaatgctgcccttcggaattaggttctaccccctccattcctggccagtggtttggtccgaccttaatactgccaggaggcgcgagctgcgtctgcgcagaaagctggcgggggggtggggggaggaacatggcgcaagctctgtctgaggaggagtttcagcggatgcaggtgccgctcgcggtgggaaagaccacccggctaggcgaccgggggcggggtagcgagaggtcgtgctatcagctctgagaaggggttggttgggatggaccctgagtttatggggtgggtctggagaagggaaactgaggctcggagtggtgagactattggattccgagatactctgcggctttgaaggttggactctgttagcattgtgggctgggagagcgccattaagtaggcggtaccttactcagacctggaggggacgagacttttgggcccgtgcaggggacaccgtcggcgggtgatgataatgggctttgagggaaggagatcctgagaaggcgaaaccattttgtctggagaggaaggaagcgggtgttgggtcgtttgcgtcatggtggtgggagcccttgagagggcagaaccattagcgggtgggaggtggtaagttttgggggagataccactgtgcccggggattggggaaagaccccagatgttgtcattgttcctgggaggtggagatcctgtgccattggtggttggtagtgcatcctaagagggggcggcaccattggatgattaagggtgatcccattaggcctggggtgaagaaggccatgaatgggtaataccattaatc

SEQ ID NO: 42188 - DNA, 967 bp, Artificial sequence
  DNA replication origin
ctgcaggccacaccagccaccccagctacactctctgcatcgtcttctgcagggggctccaggacccctgccatgtcgtcatcttcttcatcgagggtcttgctgcggcagcagctaatgcgggcccaggcgcaggagcaggagaggcgtgagcgtcgggaacaggccgccgcggctcccttccccagtcctgcacctgcctctcctgccatctctgtggttggcgtctctgctgggggccacacattgagccgtccaccccctgctcaggtgcccagggaggtgctcaaggtaaggtgagatccagaggccctgggagggggctcctggtgactgaggagtgatcctaggagctagggatggcctcgatgcactggtgatttgggggcaaggtcttaggggctctaaggaaggtccctggtactgtttaaattatctgtgttcatgtctcatgtgttttgggtttctgagatgatcttgtgaaattgcgaggagttcgtgggggccatgaggatgtcttggtggaccatggaggctcatgagtgccccaagtgggccctggctttgtaggaagagcttcatgtgtgtgggatacattagttctttggccattagggggtcttgggaagcattgtatggttcccaggtctattaggtggtgtcagagactaggtggggaatcttggggactgtgacagggttttccagaaactacgagggatcctgtcagtcatgggtggatcttggcagctgtgaaggatttctgagaaagagagtttgggtcctgggggagactcgctaatatttttggggtgttctcagattctgggcccagcttgtctgcgtgagtctaggcaccaatgagttaggagggtcaggctggggctcagaattcacccctttgagtcctgttctgccttgtcccctctctttccttgtctaccttatttcacaggtgcagacccat

SEQ ID NO: 42189 - DNA, 1432 bp, Artificial sequence
  DNA replication origin
ggccatccatccccagtgcggtcacttcctgtggagtttccccatccctgggaggagggaggagggggaagaagacgagggggaggagggcggtcgtccggggttaggttgagggggggcgtcggtccgttctgggcgggggatgactcacagcccatcccatctccccgacgccgcccgcccgcgcagtgctagctccatggcttagcggaggaggcggcggtggcgagctggggggaggggggactcttattttgttagggggaccgggccgaggcccgaccggcctggcagggctcgcccggggccgggcgtcatgtctcatgcggccgaaccagctcgggatggcgtagaggccagcgcggagggccctcgagccgtgttcgtgctgttggaggagcgcaggccggccgactcggctcagctgctcaggtgcggggccgcctggggctgggagtgccgactggggctcccaggggcctgatctcgggggcagtgggggccccggactgggattggaggccctcggcctagccttggaggacgtcggggcgcccgtcttgggggggcacctaaggaatccggcagtggcctgcttggattgtggctttattaaaggagtcgtgggagtgcattaagcggggtctgggtcaggtttggggagcccttgactgcgtctagaggggcctattctggagtatccagaaactggtctgagatagctgaacttggtagacagggtctctgattagaggctgaattcggggattttcagtcggacatgaggggaatgaatttgaggggacactgtcaggtgaggcactggttttaagggaatcctagaatcttttttccctcagtgtgggagaaggggtcctgagggacagaagtgctgtcttgggagcttggtgcctctcagtgactggttgctgtgtttggggataacatgaatctggagggatttggaggtatctcagatatgctgcctgggaccagccttgtgagtgcgtgtgaatgaacaagagaagcaacattcagcaagacttgaccagaataatcctttcccctctgcccgcctacccagctggggcagatcccaaggatagtggaaaagccctcttcccacacctgttaagggcctgaatggaagatagacagccaggcagagggcgatgatgttacctcttagctcagaggcctcagaccttgtttgggaacccagaggaggctcttgttcatgctgctactcgctctagcctctcagcccttcccactccctagccccacaccccttttctttttatcttcttttcgatctccgagctcctgggggtaatcttgaatctgtccatagagctggaacgagtacagattgcaccatccctgcctgggtggatcccctctggcctcttctcatccttactttcatcaa

SEQ ID NO: 42190 - DNA, 838 bp, Artificial sequence
  DNA replication origin
gttgctcataatttaagacaaggttggggctgggcgcagtggctcacacctgtaatcctagcacttggggaggctgaggcgggcagatcacctgaggtcgggagttcgagaccagcctgaccaacatggagaaaccccgtctttactaaaaatacaaaattagccgggcgtggtgacacatgcctgtaatcccagctactcgtggggctgaggcaggagaatcgcttgaacccaggaggcgaaggttgcagtgagcagagatctcaccattgcactccagcctgggcaacaacagccaaactgcatctccaaaaaaaaaaaaaaaaaaaaaaaaagacaaggttgggcatggcggtcagtgaagagtggtttgaggttacagtctgggtctgcagttctgggaccaaaggaaggtagttagtgggtagagtcatggctggggctgttggaaggggaattttaggggtggggtttggaattgttggagagtagtttagttaggtttgggtattactgaaaaggcattttggggatattcttgggagttgataaagggcagtttgaggatgtagagcagactgctggaaggtgctttaggggtgaagatgaggctcgggagggaagtttagtgatgatatttggggattatagagtggtctggggtacagttgagggctggtaggtatggtccagtgtgcagtttgggggtctgttttgaagtctggatgtcagaggggtgttttgagttgtggttgaggagctattggtgggtaatttggagagaagttaaagatcattggatagactactgttcagcaataaaaggaacaaaccactg

SEQ ID NO: 42191 - DNA, 1032 bp, Artificial sequence
  DNA replication origin
cttaggtaaatttactaaagttgttgcattgcacacttaatcgtggatgacttttatggtacataattatcattattattttttgagatggagtctcactctgttgcccaggttagagtgcagtggcactatcttggctcactgcaacctccacctcctgggtttaagcgattctcctgcctcagcctcctgagtagctgggattacaggtgtgagccatcatgcccagctacttttttgtatttttagtagagacggggtttcaccatgttggccaggctggtcttgaactcttggcctcaagtgatccactcgccttggcctcccaaagtgccgggattacaagtgtgagccactgttcccggcctggtacgtaaattatatcccggttaagttgttttaagaaaaaaatcactgagagtgctttgtaatttaggtcacttaagtatgatccagggtgcaagtaagtctttggagggcttaggggacacatttggggccactggagtatgatttgggagcccaattgggtaactacagcaggatggttggtggctattcggaggtacagttgaggactgttggagagtgtttgaggtgcagtttgggtcagtggagtgtgggttagaggtgtagatggtgctggagggtggcttgaaatgcagttgaaagaccacagaaagtatagttgggttatatggcacagtgataggggctgttggaaggtaattttgtggggatacgaggggaggtcaatgaaaggtggctgggtaagaggggtccatggaacatggtttggaggtagtgtgggtgactgttggaattattttgtggtgcaggtgaggcccacgttgagggtaattaggaatgtttgggctggtgttgggggctcctggagagccattttgggtcaatggagtatggtttggagggtacatggagaggagtttggggtcaatggagggtgttacgggtgcacattggaagtagatagcaggtgatttggacatgctgtttggagggtaatggttt

SEQ ID NO: 42192 - DNA, 1363 bp, Artificial sequence
  DNA replication origin
ccaggaaagcagggatcatgcacccagaatcaaacatggcctagaagattcatacatacccctgggtcccccatctcttcatattttcttaactcttccccccaacatgaggcagtccccaacacagcaagactggaaacatgacccagacctctcagactcccagagagtcactgaataatttagggtattctttcacacttgcagagggcaggggcgtaggaacagttgcatgccctcctggggcaggaagagaaatgtaagctctatgtaagatcactagggtggggataggggagatcacacacaaaaacccccatcagccacgcagggcacatagggctgcttgctcttgctaagagaagcatttgggatgtacttcggaggtcctgggaacagcagaatcttcaagttccgggcacagtataatgggacccctgtcctcggctcagaagggatggcaagtggatattaggaaggaagaagatctgaacagggtggaggggcatggtaaggggaagaacaccctggggctgggatgggaagggacagaacaggaaggagtgtaggggacaagatagagccagagttatcacaggatggaggtcaagaggcaggatggggaatgagccagaacactggccaggggatgggataaggtggggttcaggacaagggtcagagaaaaagtacaagaaagagacaaaacagcagggcaggggtcaggattaacatagaacagcagtcagaagacatgactaggaaaggctaagccagtggtcaaaggaggggacagggaaaagggcaggttcaggatggaggtcaggaacaggaaaagaccaggacacaatgaggataggaatgagtatggtgatgggacaagaaaagagggaaaaacggggcagagtcaggggcagggacaaggcaggagacgaaggtggtgagccaggatgcagatcacgagtatataggagaggatatcacatagggtgcagagaaaggacagaagttagagggcaggaatcaggacagaactacaccagattgtggttagggggacaggacatgactggaagaggtttggagactggataagagtttagggaacagacaggtcaagcgtcaggacagaaactggggtcagtgttgggcattaggatagggcaagatgtttcagagatgagacggggtcaggcaaggatcagggtcaggtcaaagatccccaggacataactggatggggtttggggtcaggactggatttagggggacaaaacaggggttgaggaccataccaggccagaatatggttaggtcagggctcggatggaaggtcctgaggccaaggccagcaggggttgag

SEQ ID NO: 42193 - DNA, 1262 bp, Artificial sequence
  DNA replication origin
gccatcccaccttttgataatgttgtcctcaagcttccagtgagaactaatggttccctcccctctgatcctccagcccaccctcagattccccttacttgcagagctgggggccagcgccccgggtgaggacaggggtggcaggcacacttcgcccctcaaaactggaggcactcctgggcagcgagcgtgtggggctagacagagacaggcaggcctaggttagagactgtacccaccagcagaccctctgccagcccaggcttgctatcccattcccagctcctgcggaggggaggaggggctcattctcacctggtggggctggccacagagttccgccggctcttcagatccccataaagatctgatggaggtggtttccatggggttcgccgctcagggctccccccagatactgcccgcagctggtcccaagccttgggtggtgaggggcgctcggccagagagaagcagccatggggctcctctgagtggaagagagcaagtgggatagaattcaatgaggggggcccagagggggcaggacaggctggggggcaaggccatggggaggggcaaagtgctgggacaggttaagcaggctgaggaggaactaaggctgacaagtaggttctggggctgtggggctggggtggggtgaggctaagaagatgggggacccataggaagatggagcatggctaaggagaagctgaagcagcacaggaggggctgggcatcaaaggatgggctgatcatgcaggatgtggtcggatgaataaaggggatgggctaaagggacgtaggagtcgggggcaggtttgggggataggagtcctcaccgttgtcatggctggccccagactctgagagggagctgctctctgagtgcagaactacgtcctctacaggtgagagggggagaagtgggcctctcactcccaggcctgggtgctgcccccttacaccactgggtgggcacctctacttgggccaccttctggccagtttccgcctcatcctgttcctgtcccaagaatctgcttttaccagagcccaagaccaccccagtttggttcctgactgtcctggcagatattcatcagtcccccacagtttgtcctttccggtaagccagtttgtcacaactcttctcacgggttgggccacttgagttgtgcctacctcccggttttcaccggccagtcacccatcccagccctaccacgtccatttgccagtgtccactctcccaccct

SEQ ID NO: 42194 - DNA, 1075 bp, Artificial sequence
  DNA replication origin
gccacagggcttagtgcgggtggcacgggtgtgggggtccttggtgcggaggagggggctgttgctgtcagctgcatacacaggtggtgggccggggagcatggtgaggagcccatcccggcgggagaggggtcctgggacctcagctgcaggcggcagctccccccagcctgttccaccgccactgcggggcaggccccggtccaaggaatagtccaagaggaagtctccacacacaggtgggagccggggggcacctcgggaggcaggggcagctgagctaggccgggcggcccggggagggtctggggggcctgctgtgcgggaggagaaggcaggggttggttgggggcgctcatacagcacctcactgctcttgcagactggggggccagaggcagagggagccagaggggcaggcggggagccagctcccccaccagcggcccggtccaccagcagggcctcagaactgttgctgcggcgggtgcgagctacgaagagggaggcgcgatcggaggcagggtccgcccgggggaagcccatctgggagtcctggctgccggaccactgacgagaatgaaggccttcaggtctggggtgagaggcgagggtcatgggaatagggtcagaaaaatcaggcagaaggcgtgcagtgccctccctaccccagccctttctaagccttcactttcacatctccaaatgggcccaaggttggaagctgtgtgtataaaggtggcaggtagtgacatgtaaagggcagctgaggttctatcctaggctaggcggtcaggggtagaaatgcgtgggggaggcctggcactgttagctccaagggaggtgtaaatctgtgtagggactcagaggaaaggctagcagagtagatgccgggcagggggctgttcctaatccagctgacccctccccctgctaaggccgttctcatggctcgcacggcctccaggattaagtcctaggccttagggctcacatgtaaaaccctgcctgaattctctatccgaccatacgtatgaaccacccaaagctaccatcccaacagccaccgttcaca

SEQ ID NO: 42195 - DNA, 1565 bp, Artificial sequence
  DNA replication origin
gttttaagggttgggagcatctcgcttcgtggcaaaggcttgatttcccggcagcctttgctgctttcctgagcggcgtgttagttgcttttccggtcacgtgcatcgccgcccctgcgcaatccacctaggaggttaggaaaaagctgcccagcccagactccatttcccggtgtgccccgcggtggcgaggggcgtaacggttgttgtagtccggccccctcctggctggtccagccacattaaccggcaggatgtcggaggtgcggctgccaccgctacgcgccctggacgactttgttctggggtcggcgcgtctggcggctccggatccatgcgacccgcagcgatggtgccaccgcgtcatcaacaacctcctctactaccaaaccaactaccttctctgcttcggcatcggcctcgctctcgccgggtgagggagggaggcgccggttggccagggacgtctgcagagcgtgggggtagacccacaggtctttgaggaccaggacggggaacctgaggggggtgcaaggccgggaagggcgaagtcagtagagatggacggcctgaggggcttggaaggggggccttgaaggaggtggagcctagttataaggagggcctcagggagatggagcctggctgatgaggagggcctgcgggggatgggggtctgcaaggaagatatggggaggatggagacaagtgtgggactgaaggggaaagtgggctggaaggtgaaccggaaaaaaaggagggcccgaaagggggacatgagagtacttgaggggcgtagggggggtgtgatgtgaatgatggggccagattgaggccgaccctggagtacttagggcagagaccgggaaatagacggtaaagttggagggtttggaagatgtatttattggggatccggtcttggaggggagcctggctatgattggaaggcgccaggggcaggtacctgttggggaacttgggcccaggaggaggatccatggttggaaagcctgagaccagagagggatggagaatctggaggaaggacttgagcagtgctgaaagttcagagtggggctgacgacctggaagaggtcctagcaatgatggagggaggaatctatagggaaatgggagcctggagggcggttctataaggaccctaggcctggggagaggggaacgtgtgaagacagaaggcctgaaagagggatttgcaggggctggtgttaaagggggagcttgcgggcaggctgatgaggggccctacgggggcagagtcggaaggaaagtccagggaagtgttgggagcccgggggtgtggggagtgtctagcaggatgggagggcctgaagcggggacctgaggaagacaggacagtggaattgacaaggaggaaaggaggggtctacaagggtgagtcgggagccctggcagatgggcctgctggagatagggctggtgggaggatgtgccaggctggagtgtccggagacgggagaccctggctcttggggcccagggtgggtggtggtccggaggccgtctctccgcccggccgg

SEQ ID NO: 42196 - DNA, 1186 bp, Artificial sequence
  DNA replication origin
gcgttggaaggagcatgcggctggtcttgggagaggggcgaggcatcccggacagagtcttggaatggaggtgcaaaaaaggggtgttgaaagttggagctgtccagagaataactctaaggcagagctgtccaaagaaagagcatgaggcattccagtggagggtgtaactgaaagaaaggaaggagatttggactcttggaggatgggggagggagtatgtctggccagagttattggggagttgaggatttgaagggaagttgggggctctatggcagtaatcttagtaggggactgcgcaggcatcttaggggttgaggttctcctaggtaggagttttgggtggtttgttttgggcaagggtcttagaaggcaagggtgccctggggcggggtcttggataggggtctagagggggaatcttaggaggatggggggggttcctggggttgggtccaggccaggttatgttgtagtcaaggacagcagaacacaaggaaggagatgtcccaggggtggaaaatttagagtgctagggggaatcctagggtagagtccccagggcataagccaatctaagggaatgtctaggctggccctgaagggtagttaccaaggcatgagaaggggtcatcccaaggtaggcatcctgaaggagtttggggaagccggttgagggggaaaggtgtgagaggactctggggtggtcaaataggttggggtacagttagaagggtatgagcagaggagttcctggggatggcagaccaagcatagcagtcccagggccaagtcagggaggtacaagaagtgcatctcctagcccacttttgtctatttattgagagagtccggtgctaggtcaggtttgaagatgagaaatgggttgggagtggttccaggccatgtctggcattgggatcaagattggctggcggtggggaggagatatcacgggggcaccccctatcacattacttcctgacaagtcagtgagggccagcatgtaaagaggaggtgtggggtccacgtcagtgtgggcctggagcttgccaaacctgaaagaaggagggttcctggccatgttgtttgggatcttgggagcttagagcagagaccctgggactctctgtttttatctttttcttccccccgagacggagtctcgctctgtcacccaggc

SEQ ID NO: 42197 - DNA, 933 bp, Artificial sequence
  DNA replication origin
ggggcggctactctcggccgccgcggaggtccgcgtcttgttagcagggaaggtttactcccccattgtgggtgaccaaggggctgagggcttggccggtttcgctttgctgggggcaaggcacgctctctctccccacccttccgggttccctcagacagtctcggccttgaggaacccccttcgcctccggtcccccagccaaccttcctccgctccccgcgccctccccggagaaccccactgtcactcgcgatgctccgaagacccgggaactaggcgaggaaggcggtggccgcctttttccagctggggtgagtcatttcctgcgacaggctccctcccccggaagtagggcctgatgtaaacacccgagccgggctccaaggcccgggaggtcagaaaaccgggccgcgggcggcaccgacagctggggcccgggtcagggacacgcggaggtcaggccggtgaaggcggcaggaagctggagcacgatcccagggttggttgggtctgggggaggctggaagtctttcgagtaggggtctaaggcagaggtcttgagtgggtgctggcgttggaaggagcatgcggctggtcttgggagaggggcgaggcatcccggacagagtcttggaatggaggtgcaaaaaaggggtgttgaaagttggagctgtccagagaataactctaaggcagagctgtccaaagaaagagcatgaggcattccagtggagggtgtaactgaaagaaaggaaggagatttggactcttggaggatgggggagggagtatgtctggccagagttattggggagttgaggatttgaagggaagttgggggctctatggcagtaatcttagtaggggactgcgcaggcatcttaggggttgaggttctcctaggtaggagttttgggtggtttgttttgg

SEQ ID NO: 42198 - DNA, 1638 bp, Artificial sequence
  DNA replication origin
gtcaggccgtgttctcccgggatatctgggggaaatgggtcccctgagatatcgtggatgaagagttgggcatccagggtgattagggggcagtcgaggacctcacggggtgttcggaggtgtctaggactattgcagtcaaacagcgatctccagggacaccgtgagagcaggctgggggtgcacccgctacccgcgatggtcggggatcgcatgagaggggagggacagcagtgacctccgaaactaccgagggagtggccaggggtcgccgggtatcctgaggggcatttctagtctttgagcgtccggaagcatgggggttggcggaggccgatggtcggcgttgacctgtcccctcttgcgcgcaggcctgggcccctcccgcccgcgtgccccagcgcccttccgctcctggcgcggctggacgcgcgccccctggctgcgagggctgcggtcgatgtggcggcgctagtacacagggcgggcgccacattgcgcctgcgccggaaggagggtgtgtgacgggggtggggcctcccagggggcaggttcggagaggagctgggttcagaggagcaggcctggggggtcagcagctactgccctgccttgggtggggccaaggggcgcgatttgggagggcggggatcggaggatgcttcggaggatgcttcgaaggatccttggggttatcctagaatattccttgagggttatcgcagtaggtgagggccagattagttgagtgtgcgtagctggatccccgttctggtcggcggggccttgagggtcctttccgagggcttgaggcctggagagtgctgggggcgagcacgcagcgaaggggcaggcctgaaatgtgagtcatggggatggagcctataggcccatgggggcggggcttgcgatgtcaggaatgggatgacggttagaggctgattaaagggtgtgctctggaaggttcgggagtcaaattttttttattatcattattatactttaagttccagggtacatgtgcacaacgtgcaggtttgttacatatgtatacatgtgccatgttggtgtgttgcatccattaactcatcatttacattaggtatatctcctaatgctatccctcccccatccctccaccccacgacaggccccggtgtgcgatgttccccacaggagccaaattttgaagtagcattctccagggtgggccgaatggagtttgcctgtgtgtgtgaccatatttggagataatcctaaaggtgttatttgagaaatgttttctgcgctttattaaagggagataggaagataaggtctggaggtgttcaaatggccgggcccaagattctttaaggaggtggagctttggggattacttgagatgagggtggggagacagtttaattggaggcgtggctcggacgtaaattcaaggagctgcggctagaaagtgaatttaaggggcggggctgagacaatttctatggagagtctctaaccgctttctccgcctcttcaatcccctagcctttatcgttctgggctgtaaggacaataatgtcatggatagtcgtctgccccacagacccccttgcctttcatgcagaggttctatcatgacaaatacagccaggc

SEQ ID NO: 42199 - DNA, 1058 bp, Artificial sequence
  DNA replication origin
ccgccagataggccaccccgcagatacaggaaccaggcacgggcccgccaccctgtttccagggtctgagcgggtcaccaggtgagcacgccccagagctcaaaactcgtcgctggctgccctgcgtccacccggccgactactggccatggagccgcgcacagggggcgccgcgaaccctaaggggagcagaggaagtacagggattggggatgttggggaaggacagagcgagtcgccgccacccccgtcccgcctgtctgctccacaccttttccttctgacaggtggtaaacagagcggctctggcgcccaagtgaaggtggcagggggcaggggcccagcgatggaggctgggctggaggtcccctacccacacccacacacgagggaaagggccgcgcaccagagcaggggaggggctctcaggagtctccagggagacgtgcagatgtgcggggaggggtctgcccgtggtcactggggacacctgggcactcagggtcttagtgaactggggggaggggagctgggggcccctggggacctgtggagggggactctggaggtatgtgggccatggggggaacgggccctctgagggaattcatgggggtagcagcggttgcctaggatacctagagggggaattgggggttccggggctacggggtcaggccgtgttctcccgggatatctgggggaaatgggtcccctgagatatcgtggatgaagagttgggcatccagggtgattagggggcagtcgaggacctcacggggtgttcggaggtgtctaggactattgcagtcaaacagcgatctccagggacaccgtgagagcaggctgggggtgcacccgctacccgcgatggtcggggatcgcatgagaggggagggacagcagtgacctccgaaactaccgagggagtggccaggggtcgccgggtatcctgaggggcatttctagtctttgagcgtccggaagcatgggggttggcggaggccgatggtcggcgttgacctgtcccctcttgcgcgcaggcctgggcccctccc

SEQ ID NO: 42200 - DNA, 983 bp, Artificial sequence
  DNA replication origin
gggagccaggcacgggacccgccagcttcagcctccagggcctgggcgggccgccaggtgagcgcgccccagagctcaaaattcgtagctggcagccctgcgtccacccggcggactactggccatggagccgcgcacaggggacgccgcggaccctagggggagcagaggaggtacagggattggggtcgttggggaaggacagggcgagtcgccgccatccccgtcccgcctgtctgctccacaccttttccttctgacaggtggtaaacagagcggctctggcgcccaagtgaaggtggcagggggcaggggcccagcgatggaggctgggctggaggtcccctacccacacccacacacgagggaaagggccgcgcaccagagcaggggaggggctctcaggagtctccagggagacgtgcagatgtgcggggaggggtctgcccgtggtcactggggacacctgggcactcagggtcttagtgaactggggggaggggagctgggggcccctggggacctgtggagggggactctggaggtatgtgggccatggggggaacgggccctctgagggaattcatgggggtagcagcggttgcctaggatacttagacggggaattgggggttccggggctatggggtcaggccgtgttctcccaggatatctggggaaatggggtcccctgagatatcgcgggcgaagagttgggcatccagggtgattagggggcagtcgaggacctcacggggtgttcggaggtgtctaggactattgcagtcaaacagcgatctccagggacaccgtgggagcaagcgggggtgcaccggctacccgcgacggtcggggatcgcgtgaggggagggacagcagtgacctccgaaactatcgagggagtggccaggggtcgccgggtatcctgaggggcatttctaggtcttcgagcgtccggaagcataggggttggccgaggccga

SEQ ID NO: 42201 - DNA, 1499 bp, Artificial sequence
  DNA replication origin
tctggggaaatggggtcccctgagatatcgcgggcgaagagttgggcatccagggtgattagggggcagtcgaggacctcacggggtgttcggaggtgtctaggactattgcagtcaaacagcgatctccagggacaccgtgggagcaagcgggggtgcaccggctacccgcgacggtcggggatcgcgtgaggggagggacagcagtgacctccgaaactatcgagggagtggccaggggtcgccgggtatcctgaggggcatttctaggtcttcgagcgtccggaagcataggggttggccgaggccgagggtcggcgttgacctgtcccctcttgcgcgcaggccgcggcccctccccgctcgcgggccctagcgcccggcagctcctggcgcggttggacgcgcgccccctggcggcgcgagctgcggtcgacgtggcagcgctggtacgcagggcgggcgccacattgcgcctgcgccggaaggagggtgagtgactggcgcagggcctccgctgggggagggttcggagaggagttgggttcagtgggacaggcctggggggtcagcagctactgccctgtcttgggtggggccaaggggcgcgacttggggcggggatcggagggtgcttcgagtgggaggagccttggggttattctagcatattccttgagggttattgcagtcggcgagggctagattagatgagagtgcggaactggacccccgttctggcggcggtcctttttgaggaggcagggcctggagagtgcttggggggcgggcacgcagcgaaggggcaggcctgaaatgtgagtcacgggggtggagcctatagtcccatgggggcggggcttgagatgtcaggaatgggatgagggttagaggctaattagagggcgtgctatggaaggttcaggagccaaattttggagtagcattctccagggtgggccgaatggtgttgtttgagggatgtgttctgcgtgttattagagggagataggaaggcctggaagattattcacatggctgagcccaggattgtttattaagaaggtggggtcagaacagttaatttgtttgggctgagaacctttaagattacttgaggggatggtgcgtaaatggtgggccagtttgtatatgagctgcaggggcaagacaagtagatgaggctagaatgttaactcagggaacaggtcctaggtagtttccatggcatgtcccccaacagccctctccactgcttttatctcccagctgttagcgtgctggactctgcggacatagaggtcacagacagtcgcctgcctcatgccactattgtggatcaccggccccaggtaccatctcatccttctatcggaggcctcctgcctcagggcaaactatgtacacctgtgtcctttattccagcaccgttggttagagacatgtaacgcacctccccaattgatccagggtaaggcacgtagtgctccgaagccatc

SEQ ID NO: 42202 - DNA, 1274 bp, Artificial sequence
  DNA replication origin
tccagggtaaggcacgtagtgctccgaagccatcccaggcctctggtcatttctctgtggagctggttcgcggttacgcaggctttggcctcaccttaggtgggggccgggatgtagctggggacactccgctggccgtgcgcgggctgctgaaggatggcccagcacagcgctgtggtcgtttggaggtgagccctgaagccccttccactggtaggtgctatccctgcctttgttggggtgctctccttttgcctttccaacacgactgcattgcactcctccaggtcggggacctcgtgctccacatcaacggagagtcaacgcagggcctcacccatgcccaggccgtggagcggatccgagctggaggcccccagctccacctggttattcgtcggcctctggagacccaccctggcaagcctcgaggggtgggagagccccgaaaaggagttggtgggtttcccaagggagagaagtcagagatcagtgaggagaagggagaggttcacagagtggagaagctgagattctgggtgggaagggtttggtggtctctgtggggagggtctgcaagaggtcatggtattctcacaagtaggggcagggaggggtacagggtcccaggataggaataacgtaggggcagggaggggtgtcagtctcgaggataggaatttcagagggtgggttttccaggtactgggggaagagaagggaaggggtctaggataaaagcaagtgtttggaaggaagggtcttagttctcagaggcgaaggcagagtggatcttagccgggggaaaatgggatggggatccagagggtagggggtctagttctgaaaaacaaagggtcggtggtttgggagtcaacggaggtgggatgagagaggagagagcaggggctcctagatgagcggggtttgatttcctttggagattgtgggaaatgatttctgaggggcatgttctggatccaggaggggaggggtctcgggaaaggaggtgtcggggttgtgaggggtggtgccgatcccagaaggcctggaggggagatttctctaagggtcagggtctcatctcccgcagcctttgggttctcctgtccatcctcagccaaaggcctggatttcccttccctacttcaccacccaatctaatccgtagtcccgtcatggccagatcgcagcccagatcctggagggccggaggtaacggggtctcgcagcagcagcacttccctagttcagcaccctccatcccggacgac

SEQ ID NO: 42203 - DNA, 1105 bp, Artificial sequence
  DNA replication origin
gtagctgggactataggcgcccaccaccatgcccggctgatttttgtatttttagtggagatggggtttcgccatgttggccaggctggtcttgaactcctgacctcaagtgatctgcctgcctcggcctcagcctcccaaagtgctgggaatacaggcatgagccactgcgcccggccccaatttctactacatttgggacaaagttcttgcagatggtagtctagtgcattgacaaaggggccgcctgtttgtacctctcaccaaggtccttgtgtctgacaagggacttcccttcacagcaaatgaagaccttgggaggcaaaaccaagtcctgggccagactttcctccatgtctgaggacaagtgtgacttgctgtgggtcacacgatttctgccagaagcaaaggcagaaatggtccctggctcctcaaacccttcgctctgtgcttcagagctgctcccatggcctttacccctgcgacgattttggagtggtttcctctctcaacaaggacaacaatggaggtgatcaggtagaggattgccgctatgagggttcggaagaaatcctgtgaggtgtagggaggagaagagggaagtcagcaaccacagttccccgacaatcctaactgcccagacccctccctggtcttgccattgtggaccccttctcacactccagggccagttgatgaatggtatcttggtgtgcaggtcacacatgtagacaacaaagaaaatagcagcaaggatcatctcaatcaccgacagggaggagtagcctggtgtggaggcactgaagcagatcaggatcaccaggcataatatctggaagggtgacatgggaaaggggacctcaatcagcaaccagggctgagaagattggtttaaattgggggtcccatactaagatgcctacgagggctggggaaatgacatacaataatagctaaacactttttatgtgctcactgtgttccaaattcaatcatcacgacaatctaatgctctgggtactattattactctttctaatttatagacgagaaaactgaggcacagagaggtttaatggcttggccagggtcacccaacaagtaa

SEQ ID NO: 42204 - DNA, 1226 bp, Artificial sequence
  DNA replication origin
aaggtctccattgcagtgtcctgagcaggcatgggcctgcacaaatgcgggggcagagggatgcgctctcctaggaagaagccatcatcctctgatgattcggaactggaactggagggcgagctggagcaagattccgagtctgaccctgatcccgcgtcacattgatagtggcgacgtctgcttgggtggcggttgtgatggtgatggtgattatgatgatggtggcggcgacggctgggggccctgggtgggggactgcgtggcctgcggcgctgggccgggggtgcactcagggtccggcgcgggcctccttcagacaccagagggtcgcggaagctgacgcgtggggtgctctgacgaccgaaggcactatcatctgggcgcaggttaggctggccgggggactctgggggcggctcggggacactgcggagccccagttccggcatggagtggcggtggggagcccctctcagaaagcgggagggctcctcagggcctgtagctgttaagggggagacagagtgactccttgtatctgccctcccactggccccctcctaagaggaggcctgcggaagggccttctttcctccactaagactgggaaagtgggggcaggggtcggagaatggcagggaggtgggaagtctgggaagtgtgaggcctggagcaggctctgggtgttgagagggttggaaggaagaacacggagcaagatgggactggtgtggggggcgtggccagggcacccggggtggcttcggatggaagaggtgtggcataggctggagtagatttggtttgcaataaaaggggtggggcctgactgcagaggatgaagggtgaccggctggagaagaggaagaggaacttggggtcaagcagagacaagttgaggtaggggaccagccctgtattgacagggtggaaccagggttcatgaggcgggtgtagtttgggatggaaaccaggcctggactggtgtggggaaggaggatgagctgagaaatgggcggggcccagggatacagcaggtgaagggcctgggctagtcaagaaggaagggccagggctgaggcaggggcaaggacataggggtgactgggctgtggctgggtgtggctagagggttagctcacctggcgctaactctgtgctggtgcctttggtggtggtctctgatgcccccttcacagcagagaaagaggctgtggaggctg

SEQ ID NO: 42205 - DNA, 1074 bp, Artificial sequence
  DNA replication origin
aagtggggctgtgacagggccggcactccagctgcggcggctcggccctggagctgtgggctcggacccaaggctgcaggctcgagagcagaagattaggcctcggcgtggcaggaatgggcggcccagcagggcccgcccacagcgactacagcagaagcagcggtctgaggcatgccagtgctggccctcgtaagccatctggccttggtccaggcctgtggggaacgacgagggggaaaaactgaggcagaacccccaggcgtaaccccacccctcgtgaacgagtcccttctcaagaagaggtggggaatccgaggcagggcacccctgggtgccttcctccctcctccagaatggggcccttttggagaaagcaggaaacaggttttggttctctcctggagactggctggtgaacctctctctcactcctccctttctttcccagggtgctctctcccagagcggggtgggcattggactctaagattcgggccaggcttagacattagggggtggctccaagtggaaggagaatggaaagctgggcctgaagaggaggcctggctggtgggggcagggcttagcaggtggggagtggccctgttgagaaaggagtggttctcagaggatagggtgtagctagaagctaggcctgacttaggctgatacaggagagtggaggagaacggggcacagcttggggtggtagaggctaggagtagggcgagccctggggctggaattagagcaccctctggaggtgggtgtagacatgtggtggtggcctagcattgtgttaggtggggtttagaaagcatggcatagtggggacattgggagtgggacttgcaaccaagcgtacaggtctatagtgttggggctggacaaagtacagggcacaatggaggatggggcctggaggacaggaggagtcctggtggggtaggactgtggcccagctgtccatccatccctctgtccagtcccacagcattcacccaccgatgtgctccccacagccatcacagtactccgcgtggcgggcctcgtagcaggcgcagcagtggg

SEQ ID NO: 42206 - DNA, 1074 bp, Artificial sequence
  DNA replication origin
aaaccccctaatcacctctccacacactttcatcagcactcctgggacctggtggggacccctctcttatgaattgtgggagggaatcctgagggccagagaactgggtcttgaagccttaggttgagcaggaacctcctgagctgctgctttttttttttttttttttttttgagactgaatctctgtcacccaggctggagtgcagtggcgctatctccgctcactgcaacctccgcctcctgggttcaagcgattctcctgcttcagcctcccatgtacctgggattacagacgcccgccaccgcgcccgcctaatttttgtatttttagtagagacaaggtttcaccatgttggccaggctggtctcgaactcctgacctcaggtgatccgcccacctcggcctcccaaagtgctgggattataggcgtgagccaccgagcctggccgacctcctcagcttctaaaggacacagtaccttggaggaatgtgcacggagggatggagtcctacactcctgggatgccgaaatgctgagagtcaagagactgggatttggggggacaaggcttccagggttccgcctgagcaagggagtttttgacttcttagataggaggttctttcacttcctttggagtgggtctctgacctgggaatgtggggtctgggtttgatggtccggagaaggaataaatagccctaggatgggatgggtaaaggccaaggtttcttgggatgggggtttctgaatggagcaggggcctcctgagatcctggggagggtccccagttccttgggtatcagggcatgaggccagggtttaggggaggagctcctgagcttctgaagagaggggcagggttcacgtggggatctcaaggaagaatgcggtctcgtctcctaccctgtggaactggagtgctgctggcggcgtagatggagagggaaccgggatgaggccggggagaggatgcccagagtaggggttctgtgctctagtggggagagtacaatgaattataggggaggtgcttgagccctggaaggatctaaggctggtgggaggt

SEQ ID NO: 42207 - DNA, 755 bp, Artificial sequence
  DNA replication origin
tcgacacaaaacgtcaacacaagcaccctagcgcgccacccctctcagtccagttggccacctctgagtctccccatcctccactacagaaccttcaagccccaggtcccgtgagaggccacgtggcacgccgggattctgggggtcgtgccttgtgacgccccgcaccggcccggagcgggagggcagaggcctttcccgcggggcactccgggctacgtgcagttcacctctaggcagggggcgccctggcagcggagagaccacatgcccgggggcgggccctgcggggcgcgctcctcccacgagggtgtcaggtttacggaaccgagttcccaggccggacgcgcggtggcctgacggtcgcaaggattacattcgcctgacccggcccggcttgaccctgcccgggcgcgccatgttcgcgcgtgggtcccggaggcgccgctccgggcgtgcggtgagcgggagtcagggcagcggtgggggtcgggggtaaactgaggcccaggcaagggggcaatggataggcatagcgaataggtgccccacagaggatctgggaatcccatcccctgcattcccagacctggggctggggctgctggaggcgaatggatggaggaaggtgtagatctggtggcccaaaccccctaatcacctctccacacactttcatcagcactcctgggacctggtggggacccctctcttatgaattgtgggagggaatcctgagggccagagaactgggt

SEQ ID NO: 42208 - DNA, 1815 bp, Artificial sequence
  DNA replication origin
gtgtcttttgtctctacaggtcagtgaagcccaggaggacctggggggggcaagagctcaggagaaggcctgccccccttcccacccctataccctaggtctccacccctcaagccaggagaccctgtctttgctgtttatatatatatatattatatataaatatctatttatctgtctgagccctgccctcactccactcccctcatccactaggtgcccagtcttgagtgggccccctctcttaccccgtccctttccctgcatcccttggcccctctctgtttaccctccctgtcccctgaggttaaggggatctaaaaggaggacagggagggaacagacctcggctgtgtggggagggtgggcgtgacttcagactctctcctctctctccctccactcctcccaactctggccttggttcctccagcaatgcctgcctgaacaaaggccgttagggaaatccaactccagggttaaagaaaggcagagattgggggggcttggggtagagaggacagtttaggacccaaggtggtcttggagaggaggtgtggagtggaggggtcagcaggggggttgggttccagacagagtggatctggagtctgaaggagaggagtgcgctagagcattctggggtggggcttggaagggcgctgagggcagggttctagaaggggcgaggctttaagcgaggcagaatggtgggctccagagtaggtgggtcttggattggtaccagagcctatggaaagggtgtggcttggaacatttgggagactgagcttgattctaaaggggacagatcttgagcaaggcaagaagtgggattcaggaatgggccaagccagggttccagacagggtggggcttagaatggggcttccatggtggtttcagaaagggcagcccctccccatggtgcagtgaagaaaatgttttacaatggctgggtttgggcagtggagaggggacttggataggagcttccagatgggttttgttaggggtgggggagaatggctctggctacgacttgggacggaagtggcctgagaagagtcgagtgatatggcttgtagggtgaggcgtgggatccagagagaagcaccccaccacacacacccttccccactcccgtgatgaaacagctaggttaataggaggacagaaccaacgggtctgtgggactggcccacccctcttcccccttcccctgcgccctccctccctccacacctccacccgtcctggggtggttggaggcctggtctggagcccctatcctgcaccctctgctatgtctgtgatgtcagtagtgcctgtgatcgtgtgttgccattttgtctggctgtggcccctccttctcccctccagacccctaccctttcccaaacccttcggtattgttcaaagaacccccctccccaaggaagaacaaatatgattctcctctcccaaataaactccttaaccacctagtctacccggctctgatttctcagtgtgtctttttcgggcgccggggaggaggttggccgggggagaaaggagggagaggtggtgagaacaagctccacccggacccaccgaccgcagttcagcttgctgcaccatttcaggccccttcaaaagtgttaggcagagcagcatcctctgggaagcctctcctgccaatcactctgtcactctctgagtagccctgctcaccctcccactactggccaccaaatgcccggtctttctaggagttggttctaattctggtcccttagccaagcctcttccgagcccctgtggaaccctctc

SEQ ID NO: 42209 - DNA, 841 bp, Artificial sequence
  DNA replication origin
cgggccccaggattcctacgggcctcagggcggctaccagcctgactatggtcaaccagccggcagcggtggcagtggctacgggcctcagggcgactatgggcagcaaggctacggcccgcagggtgcacccacctccttctccaatcagatgtagtctggtgagtgaccggcgagcggtgcggccaaggagggtacaaggaaggagacgagcgggtcagtgaaccaataagagtcaggggtagagagtacgtaaggcgtttactggggcaagtaaggactgaagtttgaaggagccaatcaagaggcagaactacctgctaagagctgaaaaactagctaatgaatggagaaaagaagaatggtgcttcaagatggacagaatgaagagccaatgggagggaggtagaagggcaactcggcggaaaggcggggggagagaagcagagcaaccaataaagggagggaatatcgggggacttgcgcagtggcgaatcagcggagcgcaagagccacggaagcgacgaggaggtgggtcttagaagtgactgataagccaataggtgataaggccaatagatggtgagggtaaatgggcgtggatcttgaaggtcagacgagctcaccaatccgggaggaggggatagatctgccgcctctccccaacgctggaggggagggaagtagtgtggaatttcaaaggaggaagagggatagggtggggtcctggaaaggtttgccggccttcttgctgggccttaaaagagaagtgagggtcggggcttggtggctcatgcctgtaatctcagcactttgggagaccgaggcgggcgggccgctt

SEQ ID NO: 42210 - DNA, 2544 bp, Artificial sequence
  DNA replication origin
ctcaaaaatgtgtatagaatgaatgaatggggattaaataataatattggctaacattaattgggtacctactgggttaaggtatgtatatacacctgtcttacttttgtatcttgtttattgcctgtcccttaccccttcgctggaacagagccagagggccacagcctatgtctgccttgctcaccacatagtcctagagtccagagcagtgccaggtacaaggcaggtgctcagtgatcccagtggatgtagcctcgaggtgggagctgggcaggagctacttgcggggggaggtattggccggttccaccctgccccttcctctcccaggtctgttggtatcccagggtgggagcacacctgaaggggtactcgaactcgacctcgatgctgaggtcactctcggtcttgttggcacaatccacgctcagctggagctccccactgtagctgccgcatgtggcaaaggcgaagatggcgaagaccttgggcagcagggatggggatggccacagtgaacctgtgtgcatgtgggagggaggtgccctcctctggacagatcgggggcccagcacaggcagcagcagatggagcagtccccacccccaccccctaatcagggctcatcgggaccaaggacaagctgattacaagggtatggctgtctcttcctgtttctctctctgtgtctctctctgtctctgcctttccatgctgacctccctcttctctgtttgtctctgttgttctctgtgtatctcactgtgtctctgtttctctcggtatctctgtttctctatgtgtctttgtctttctcagatgtctctttgtctctctgtgtctctgatcctctctgcctctgcctatctgatctgtcgatgtctctttttgtctcttttttctctgtctgtgtaagtgtatgcctgtatgtctgtgtctttctgtttcttggtctgtttgtctctgtctctctgtcctgtctctcactcggtctccggatggttctctctctgtctccctcttgcctctgtgtgttggtttctcttttttctgagtgtctctttctctctgtgtctctctctccctcaccctgttttcctgcctctctccctgcgtctgtttctctttgcatctgttttctgtgtctcctttttctttgtttctgtttgtctcttctctcttatgtctgtatctcttctcatctccatatttcttttttttttctcagtatttccatctctgtctttatcattccctgtccctcattctctctgtcaccttcactgtctctgggtttctctgactttgcatctctcacccagcatctgctacaggctccacctcccccacccctccctcacttcaagagaggaggtaggacgtcacagtctcccacttcacaacgggggtaccctcagccctatgtgacgtcacagctcatctgttttctggcttcagacccctgaaacctcaccctggagcccaattcccccatcccctacaacccccgcactcatccctggctactcgcccctactccacccctgctcttctggaccccatgacctccctctctccctgcactctgccccaacagcccggaccacactcacccattgcagcaccttcacaaagccgaggggctccttgaccacccggaactgacccccagccaccagctgaggagagaaacagtggggaaggggtggggttgttggaggtacagggaggtgagcggcaaggctgcccatcaatgaccccaggggatggagcatgtgacctcggggagagggtgagaaggagaaagtgacaccttggggatggtgtgagccccagggtccaaggactggtgggaaggtctgaagagatggtgagtcagatggcagaggaagtcgggggtgagggagatggggatgaggtcaggactagttaaggagggggagcaggtttgaaacgtaaaggcgagtcggatggggaaggggttcgggtagagaatggggatggagtggggtgcattcgggtgggggggttgtgatggtgaaggtgagtcataacggggcaggagtcggtttggctcaggtgggggaagggtctgcaggggtaaaggtgtgttagacggcggtggcggtagatatttgaggtgatggggatggggaagggttgggactgattgggggtgagtttctgaggtggcaaagacgagagacatggcggagagggtctggactgattaaggtgggggagggctgggacacggcttcagtcgctatgtgttgggggtgaggaggctgggggttttggaaggagtaaaaccggattgtcccctaggtgtgctctgggggaaggggtggtcgcctatgggggtacagtctctgtttgggaggggcgggtgccagccctctcccccatccccgcccccacaccttctgtcgctctatttcctagcttatccgcagcaccccccatcttccttccactctcccctccccttgtcccttgccctcactccagcccccaggcccctattcctcccctcgcggt

SEQ ID NO: 42211 - DNA, 942 bp, Artificial sequence
  DNA replication origin
atttgaacctagaacatattgctccaccactatgtcctgctgcctccatgctggagaccccagaccctttccccagttcctcacccctcctcacccatctaacctgtttgcacatccacaggggctccttcctggtatacccagatggagacgtgtcacggcccctggtccgggagcggctctgggtcaacagtgatttcaactttgacaatgtcctttcagccatgatggccctgttcactgtctccacctttgaaggctggcctgcgtgagggacagggccctgggtttatcaggggatgaggcaggggtctctgcaggattgggttgggatctcctgggaatgggtgggagtgtaccttggggatgtgacgaaggtctctcgagactggatagggttttctggagagtggtgggtgtatcagaggactgtagaggtggagttcccagaagctgggtgggggttctttggggacttgagtgaggggtctccaggaattggacagcggtttctaagggactaggtagctagatagaagcctggaaaggattggagatggtttggggggacagagtggaggtctgaggggactgggattggtctctgaagagatgaagcagggattcagcgatttctagaaagctgtgcaggtctttgggatactcattgtggggctctgtggggagatggagtggggattcaagttgatgggacagggataaatttacagatcgttgggggcttgtgtggaagttctggggaggcgcatgggggtctccaagtggttggagaaggggatttgaaggtctgtggaaacttaggggatttctgggtctttgaggttctgaatggagattctctggaggactctatgggggtttctgagggcatgggacagaggatttggactctttgagggcctggtagaggtctcttagagt

SEQ ID NO: 42212 - DNA, 1848 bp, Artificial sequence
  DNA replication origin
tgcactgcactccagcctgggcgatagacagagactctgtctcaaaaaaaaaaaaaaaaaaaaaaaaagaagaagaagtaaagaggtaggggaaagttgagagtttggggttagggttggtggtaggggtataatgggagactgggagatgaggttaggatggagtttttttttttcttatctttttttttttttttgagatgaagtctcactgtgttgcccaagctggagtgcagtggcacaatctcgtctcactgcaacctccaccttccaggttcaagcgattctcctgcctcagcctcccgagtagctgggactacagtcacttgccaccactcccggctaatttttttgtatttttagtagagacggggtttcactacattggccaggctggtcttgaactcctgaccttgtgatccacccgcctcagcctcccaaagtgctgggattacaggcgtgagccaccgcatccagcctaggatggaggtttaatggaagttggtgaagctagaattgggtttcagcttgggactgggcctggtgttggggatggggttgtgatgtatttggggttggagatggagttaagggtaagttgtggttgagggctgggatagaggaggggatgggatgagactggggctgaggctggaaatggagttgcagttgaagatagggtgatggttaagggttagggacgtgggagttctctttggggattgaggatggtattatggttggtggttagtgacagggatggggctgggagttagggatgaggtgggagatggagttgggcttgggaatgggtgttagcgttgtaaatgggctcataggtgacctgtggttgggggttgggatcagagatggtattgtggttgggggttgggatggggtttgggctgggaatagtatggcattgaaatcggagacagggttggggaaaaacgttagagcaggagttgaggttgaggaaggcaatggaaatggagtagacattctccccagtggatgaagacaggaacttgtgtctgctttgattcctggtgtttccctagggcttggtagggtgcctggcacacagcaggcactcaatggatgtctgctcaatgaatggtgaagcagatgaagttatcattggagcttgggtgggggtgttgaggctgtgtttgaggcccttgtcttccccctcccctaatacaaacctggtgaccttaaagatcctgaggaggcgcacacatcggagcactgagatgcccaagggctgcatggcacccacctccaccaaggtggtctctaggatgcccccacagaccacaaagcagtcaaagcggttgaagaaggaagacacataggcagaggggcccagaccgtacaatttgagaagcatctccaccgtgaacagacagagcaacactttgttggcatactctgtggggagagaggcagggatgatcgggctggccagtttctgtggtgacatgtggggaggtaactagggaccatggggtgacccacggtagctggtatcaggccaggtgctggctgagggaaggcttagggctagggattggggtgagtttgtaggtcagagtaggtgaagttttgaggggcttggagatggggatgaggggcagagtcggggtgggggccagagtcagtgtctatgagtccagaagacccaaattcacaagtagagttagagtctagggtttcttcgggactggggctggtttgtgggttatgggttagaaatgtgctcggtattcaggctggggctgagattataatgaataatagtaagagctgacacttataaagtgttagctatatggtgggccatac

SEQ ID NO: 42213 - DNA, 799 bp, Artificial sequence
  DNA replication origin
gggcagggaggcggaggtcaggccttgggattcccccctccaccctaaccttctcagaaaagcacaagtccctgtaactagaaatagaaatgggttttaataatattcctgattctggctgccgaatgggggcggtctgaaagagtcgctttcctgagcccagaattcagcgggcctgacggtaggaaggcgactagggtggggtgcctcccgcagacgcgcacccgaccacgacgatgatgaagtcgagtaggttccagccattgcggatgtaggcgctggggtggagcaccagcccgtaggccacgatcttgagcaccgtctccacagtgaaaatcaccaggaatacgtactccacctgctcctgggggtgggaccggggggcgggtcgggaagtcgaggagttatttgaaggcgaggtttgacgggggcgtggggagcatagtcaggaccgagggtggggctgagccaggcagggccatccgggtcagagagggggcggggtctggctggaaggagtgagctctactggggctctatttggctgggaactggctggggcggggcgggccttaccaggttgtggttggcagtgttggagtcgtcctcagggaaggggatgtaaactcccagggccacgcagttggcaaagatggtcagcaggatgaggatgtcgaagggcctcaggtggacacagtcaaggaccctggcagagtggcattggaacccccctactcccttgggaacctcccacccagtgctgacccttgacgcccaaggtgacaggtcctggcattct

SEQ ID NO: 42214 - DNA, 863 bp, Artificial sequence
  DNA replication origin
gtgtttggggaactggagtttgaaggatcccaagtatctggtccagggattttttggagtccccgagtgccagggtcctggggttttacgctccctggttcttagggcacaggtgtcttagggtctccagataacagggtctcagggaactgatgttaagattccccagattacagggttccgggtcttgaggtttcaaggttgtaacgtctcaaggtgtctgggtcccagagctttgggtgtaccaaatatcatggttaaaggatttgggaggcctctgatgtcggtgtcagggagggcggtgtgtgtgtgcgtgtgtgtgtgtgtgtgtgtgtgtgtgtgtgtgtgtgtaagggggtgagggtcttaggatcctggagttggagccctgaatgtcaggatcccgggttttaaggttcccgggaaacggggtcctgggctttagagtcccggatgtgggcttcgggggtgggcgggggctctgtccttacgtgccggcctggcgcagcgaatggatgaggattcggtccgcctcctccatggtggagccgtgtcggagtcgggggctgggtccaggaccgggtccgagaaagtggggagcagctgtagaaaccctgctccgtgctcgcggtccacagagtgtcacgggtcgtgtggggagagttggaaagtgtagttctgtgagcgagcacggcgcatgccggatgtgaggcctggggtgagtgtgcacggaggttgagcttgcaatagctgctgggaactgtagttcttccacctgcagtccagtgggctcttccaagggaaaaaggaacaacccgtgtggtggggagtggaggggccggacagaaaggggcttcctgact

SEQ ID NO: 42215 - DNA, 1084 bp, Artificial sequence
  DNA replication origin
gtggacagagaggaagaggggacagatataaaggtggacagaaggggaggggtactgatacctgggtgaacacagaggaagagggaacagaaataggagagcagaatggagggagggaaaaagagaagtggacagagaggaaaaggggacagataaagaaatggacagagggagaggggtgacagagaggtggacagagagaaggaggggacagatgcagaggtggacagaggaagaggggacagataagtggacagaggggaagaggggacagatacagagatggatagagaagaagaggggacaaagaggttgacagagaagaagagggggctcggcatggtggctcatgcctgtaatcccagcactttggaaggccaaggtgggtggattgcttcaggtcaggagttcgagaccagcctggtcaacatggcaaaaccccatctctacaaaaaatacaaaaattagccgggcgcacgcacctgtagacccagctactcagatgcctgaggtgggaagattgcttgagcccgggaatttgaggctgccttgagccctgatcatgccattgtagtccagcctgggtgacagagcgagacaccgtctcaaaaaaaaagaagaagagaggacagataaagagatggacagaaggggaggagggacaaatacagaggtggacagagaggaagaagggagagataaggggacagagggaaggggcaacagatacagaggtggacagagaggaagaggagagagattaagaagtaaacagaggcagaggggtgacagatatataggtggacagcaaggaaggggagagatacagaggtggacagagcagaaggggacacagataaaaaggtgcacagagaagaagaggggacagataaagaagtagacagaggagaagggggaacagatagatagacagagcaagagaggaattcagtacagaaatgaggagacagagaggtaagaaagaggagcagcaaaaacacagaactagaataatggggacaggcagaaattgtgcaaaaacctagaaaccagaaaaatgaacatcagtgacaagtgcagaaac

SEQ ID NO: 42216 - DNA, 921 bp, Artificial sequence
  DNA replication origin
ataatacagcaacaaagaaaaagttgggagagaaaagatgaagaaaagttggcaaaatggtacataggattcactagaatattctctctacatttatgtttgaaaattactacagatataaaaacaaagacagacagccaggcgtggtggctcacgcctgtaatcacaacactttgggaggccgaggcagatggatcatgaggtcaagagatcgagaccatcctggccaacatggtgaaaccctgtctctactaaaaatacaaaaattagctgggcgtggtggtgcatgcctgtagtcctagctatgtgggaggctgaggcaggagaatcacttgaacccaggaggcagaggttgcagtgagctgagatcgtaccactgtactccagcctgggtgacagagcgagactccatctcaaaaaataataataatgataaaaaaataaaaatgtaaaaagacacagaggtgaagacagaaagagaggacagataaaaaagtggacagaccaggagggggccgacacagaggtggagaaaaagaggggcagacagagatgtggacacagaggaagaggagacagataaagaggcagacagaaggggaggggggccaaatacagaggtggacagagaggaagaggggacagatataaaggtggacagaaggggaggggtactgatacctgggtgaacacagaggaagagggaacagaaataggagagcagaatggagggagggaaaaagagaagtggacagagaggaaaaggggacagataaagaaatggacagagggagaggggtgacagagaggtggacagagagaaggaggggacagatgcagaggtggacagaggaagaggggacagataagtggacagaggggaagaggggacagatacagagatggatagagaagaagagg

SEQ ID NO: 42217 - DNA, 1019 bp, Artificial sequence
  DNA replication origin
tgttagagaggcctgtgggggccacaggggtgtacagtcatctgtggagctccatgggggctgtggcatgtgactgggtatccaccggccaggcagagtctgagtgccggcacagcaagctcagtacagcagagcgtgagcaggccctgcgcctgaagagccgcgcggtggagctgctgcccgatgggactgccaaccttgccaagctgcaggtggggttggggctgtagctgggcggagaggggcagggtggggtggggtggggttggagggcccagcctgtgtgacatgtacccatcccccaccagcttgtggtggagaatagtgcccagcgggtcatccacttggcgggtcagtgggagaagcaccgggtcccactcctcgctgagtaccgccacctccgaaagctgcaggattgcagagaggtaagcagtggggccctgggctgtgggcgggccagggcaggctcggtccctctctagggggccatccctatgctctgctcactgtcttctgcctgtgggctcatggcagctggaatcttctcgacggctggcagagatccaagaactgcaccagagtgtccgggcggctgctgaagaggcccgcaggaaggaggaggtctataagcagctggtaaggcctgtgtgagggacctgggtagcttaggagggtggggggatggtcctggggcagtgcctgctatatccctgcctagatgtcagagctggagactctgcccagagatgtgtcccggctggcctacacccagcgcatcctggagatcgtgggcaacatccggaagcagaaggaagagatcaccaaggtacactgccagggccatggagggtgggtcatgtgggctgtcaggcatagtgtggccgcacagggacctcacaccctcaggcagagctgtccagtcacactctaacacagaatagtcacacacaatccatcccagtcacccctgacacagtgacacagtccctgtctggtacacatgaggaccctccactgct

SEQ ID NO: 42218 - DNA, 1405 bp, Artificial sequence
  DNA replication origin
ggtggggggatggtcctggggcagtgcctgctatatccctgcctagatgtcagagctggagactctgcccagagatgtgtcccggctggcctacacccagcgcatcctggagatcgtgggcaacatccggaagcagaaggaagagatcaccaaggtacactgccagggccatggagggtgggtcatgtgggctgtcaggcatagtgtggccgcacagggacctcacaccctcaggcagagctgtccagtcacactctaacacagaatagtcacacacaatccatcccagtcacccctgacacagtgacacagtccctgtctggtacacatgaggaccctccactgctagccagcctgccccaggcaggggctcatggctgccatggtgtctgccagatcttgtctgatacgaaggagcttcagaaggaaatcaactccctatctgggaagctggaccggacgtttgcggtgactgatgagcttgtgttcaaggtgtggggcaggttgggcgggggtgagtggggtgaggctgggctgctgccttgtgcatctgctaattggctggctggggtccagacccaggccctgtgcgaggctggaggtgcactgatacccagggctggctttgtttcatggaggatgaagctagtggggtggtgggagagggtggccttcttagggcatggagatggtcaagggcagcccactgatacctttgaggtccctgtgtctggtcaggatgccaagaaggacgatgctgttcggaaggcctataagtatctagctgctctgcacgaggtgaggggagacatgtgcctggggtggggctgctgggggtgggtgggactgggtgcaagccttctgctcctgttgtccccagaactgcagccagctcatccagaccatcgaggacacaggcaccatcatgcgggaggttcgagacctcgaggagcaggtgaggcctgggggcaggatggggagccaaggcgggccggggggacagttcctcaggttatgctgacagaggctgtggagccacacacagccgatggctggacacccagccctgccccttagtgcctgtgacctgggacaggcaagtggcctactgtgagccccagcttccaccccaagggccctcctgtctgcctcccagggccatgggcagaggcttcagcttaaagatgtagggggaatcctgccacatggcgaaggatgctttgggtagagggaacaccacacgaggcctggccatgggacagagcaggctgttggagttggtgggaggggcccagagtggctgtgatgggggctggtgagcaggagctgggaaaggggctgtgtgtgctgagggggcatgtgttcacattgcctcagatcgagacagagctgggcaagaagaccc

SEQ ID NO: 42219 - DNA, 1034 bp, Artificial sequence
  DNA replication origin
aggcctggccatgggacagagcaggctgttggagttggtgggaggggcccagagtggctgtgatgggggctggtgagcaggagctgggaaaggggctgtgtgtgctgagggggcatgtgttcacattgcctcagatcgagacagagctgggcaagaagaccctcagcaacctggagaagatccgggaggactaccgagccctccgccaggagaacgctggcctcctaggccgggtccgggaggcctgaggagccgccggcagaggtctctccccagcctcaggcagggatttggggtgctggaggcagtggccaagcacatgccctagctacttcctccgctgtccagttcctcctgctgcggccttggacccagacccctgcccactgaccgcaacccttatatggggtgatagtccagcatgtggggagctcggctgcagtttattggggacggtactgtgggttgggggccttggatcccaaataaatgagtagttcctctgcagtctaagctgaggcatggatcagggctcagggaatgggagtgaggtgagtggcaggggagacacggggtatttttggcaaggcagtgtgtgtggctgtgtgtgtctgcacgggactcaagagacccactggggggctgtgcgtgtgcatatgcgtgagatacacaggtgaattctaacaggccgtgtgtgtgagcgagcacgtgttgggacctcagatcctgagggtactgacgctgcttctgtgtaggcctctgggcacacccctgtgttgacagtgcccctgtgggccctgaggctggctgtgggtgcgtgccttggggtgtgtgggttgtcagggctgtgcttgtgtgtgattgtgtgatgatgcagctttgaggttgtttgagtgtactgaggcaggctctctgtgttttggggtttgtgttgagtgagggacaggattgtgacattttgtgtgtctgtgtgacttttccagccctgaagtaatctgtgcgagcagctgaggcaggctctgtgtggctggttg

SEQ ID NO: 42220 - DNA, 1990 bp, Artificial sequence
  DNA replication origin
gtcaggggccaggtgtagggttggaacacctgctgggcctctggctccgtttcttgcggaactccagctcatccacggtccacacagcccccttctcgctctccacccgcacaaagcacttgtgcagactcaggttgtggcggatggcgttctgtggaaggccggggacagggagcaggtgggcgtcaacctctgaggccagcagccaccaccaacaacccacatcccgttcctccccaatgtgcctatgagcccagacccaggcctgcccactttgagctgcgatggcacttgaggccatcccagtcaccgccacctcagaggagctcaccttccaggtggcaggatggtttctgaagaaggcaaacatgcgtgtgaaccagtggtagatctcattgagtgtccgctgcttctctggagcctccaggatggcctggaagttggggggtggggtaaggggcacattccccaaacttggggtttagaggggctatgacctaccccgagccatctgacatgggggcggaattgtaggggcaggtaatcagggacaggactagatgtggggtgaagcatggggtcaaagatggggttagaaaaggggtgaagtgtcgggttgggcagggttagatgggtgtgggtatggttgttctgggattaggtaagggatcaggactgaggttgggagtggggtcttgttcagggctagggctgaagtgaggtgaaaggtctgggatggagttggagttggggttctctgtggaggtgacatttcagggttggggaaggtgaagggtcagaagtggggtcaaggatttggaaggggtaaagggccaggccaacttaagggtcagggaaggggtgggttaagagtcaggctggggtggactcaggtggggggtctaggggtgagggatgggatgacttggctttaggtcagaagccagagatggtttgaattatcgagtatcttacgtgtcagggacatggttaggtggttaggctcagggcaaggatgaggttagttgtggggttcggtgtggagtgaggctgagggtcagggaatttgatcagtttggattcaggaatgggattacagagtcagcgatgatgattgcagtgaggctatcagtcaggatggggctaggtcagggtttcagttcagagacagtcggggaatatctggtatcatgtaggggtgaggttcaggtttggggttaggtgtggcgctaggatgaaggttctgagaaggcattggggaggctgagatgaaggagttgggatggggtgatgaagttaaggatcaaatgggtgttacaaggaaaggttgggaatggtgcccagttgggggtgtattgacatactggggtacgttggggccagggaaggagatggggttgggttggcataaaggctggggaaggagttagagtaagagctggggtacgtttagggcaaggtgcagagatggggttagctttaggctattttatgggtccaggagagggttaggtatggggctgaggtggacatctggaaaggggtaggtttagggtcagaatttggcatgctctggcctggatggtggtttaggtttggatttgcggacaggtttggggtgaagccagcatgaggggtcacatttgaggcacggcttggggatccttggggctggggcttgggaatggaggaacccactctgagggcactcagagggagacaggagtttgggaggcaggtcccccaccccatctttgtcttcctcctccttggggccgagctgccctgcttacccagcggatgagcgtggcgtaggtgaaagggggtcgcatgttgtggaacttgaagtagtccatgttgtggaggaactctgtcagagggtggggatgaatcaagccccatgcaggacctcctagctagctccctgtcccctccccctacaaggtgagtctacaggcctgagatctcaccgtcaacacccgtgtccacg

SEQ ID NO: 42221 - DNA, 2050 bp, Artificial sequence
  DNA replication origin
cagcgcctccagctccaccatgacgcgccccaagcgctccagacggcccggcgcgggcggcagcgaaaatgtggggaccaggtaaaaccccccgccagcggggacggggcacagcggtgagggctcggggcaagcctcctcttcctcctccccttcatccccatcctcgccatcgtcgtcctcgtcggccccgccgccgccgccgccatcttgcccggccgccgccgccatcttgcccgccccgggcccgccccacggccggtagcggcgcaactgcgccagcggcagccccaaggcctcgtcggcgaacagcaccctccgcggggccaccgccgcctcgaccgaggtgcggggctcacccgcggccggcgaggggggcgcggaatgccgcagcgggggctccacaggggccgtacgcgccatatcggcggcggcggcggcaccgacggcaccggcggcgggaccggcgggggcagggcctgaaggggcgggcagccaatgggaaggccagcgcggaggggtacggctcacgggggcataggcggtgagatgaagacaagtattgcagagggccaatgggcagccatgcacggatgacgtacagcgaattgagagccggagaagcacgcagccaatggggatgcccgggagtgggcggtgtagggggcgggatgatcgaggaatcaatggagaggccggaatgggggtggtgcgaaatccatgatgaagaaaacagaagcagacagctaatgcggaagtctgagcgagagaggcatgtgggcggtgggaaaagtggaatggctacaggcgatgagggcagccgggaacgaacgcagaggcccaaaaagtgggagatcccgcgggttgcgtaggcggtggaacggtagctagagagagagaacagccaatggagagccacgcgtgggatgacgacaatggctgcagcgagccaatggggaggcttgtgagcgtgcactgcggcttcgaaggggtggtgccaaggtggagctagccaatacgaaggctaaaaggagaccaagaggcgggtgtgtagggagccgagccaatggaggtggaggctgaaggcgggagcgaggacgagagctggcggatagccaatgagggagccagggtgaaggcgtagagacctcaaaggacagtactagtatgggatgagccaatgccgaggctagatagtgcagcgggacggagggaggacttggaggcaagatggggaaaaaagcagagccgacgggggcagtgtaggtggtgtgaagggaggcatgagtagccaataaggaggctggagaggaggacgctgtgtagacagagtctgaggtattgggtggccggacagcagaaccatagaacgcaggcagccattaggaaaaatgtgcttctcagggatggggttaccctctccctaaccctccgtgactccccattgccccaggaatacccagagcccctgaaggcctagaccacaccttggtgtgtgaactaggaaagtgaaaatgactgtcctgttgcagttagttacttactgggtcctccctgcccaactacaaccttttcttgagcagtgccacaagccaagaatgcccctgattgttagccgcaagcactctccaggacttgatactattgttgaatgaatggccgaataggaaatttaactttctgaaggattcacttttttaaatttcagctcagcaaacactgacctgactgtgtgctaccagaagttgattgggcatatgggtagcttctgactaatggaatcacaatcaaagccctgtccttcttgcccaacctgacactccacaccccacaggggcctcacctcccttctttctgtccccccatctctgcttctactgttccctctcccaagagtgctgttccttctgctgcttccatctagtaaactcctttcgctctccctttggggtctcaccttctgtgggaactcaactgcagcttttgtccgctgaacacatccattcatacattccttctccatcctgggaagatttactgaacacctact

SEQ ID NO: 42222 - DNA, 1517 bp, Artificial sequence
  DNA replication origin
gtgcacgtgcgggcctcacacgacggctgggcttccttttgcgaccacccagcgcgctacgtcccgcgcagcccgccgtgggcaggagcgggaggaacaggagcaggagatcccatcctggatccggggctcggcctgggtcccggccaggcatccgcctcctcgcccgacgacggcggccgcaccgaccgctttgccttccagctgccctttgctgagggcgcgggcgatggggcgcgcctcgacttcgtggtgcgctatgagacccctgagggcactttctgggccaacaaccacggccgcaactacacagtcctgctccggatcgcacccgctcccacacccactgatgccgaagggctgccccagcagcagcagctgccgcagctggagccacagcccgagtgccagggtcccgtggaggctgaggccaggcagctgaagagctgcatgaagccggtgaggcgcaggtaatgtcagccagcgccacctccgccaacgcagggctgtgtctgggatggaggacaagcattccggcccaggaacccctcaggcctgctctccaggacagggaggagggtgcattgagtcagtcagtcaaagagtgatggaggtcaaacacgtgctaggcactgttttaactggggttttattcctccatttattgagttccactgtaaagccctgaacaagacagacatctaccctaccctcaaggattcatacaggctcctatgggagacagtttgaaaaaacaagcaagcaagcagataggataaatagggacaaagttagctgctgaagggagtaaggggatagattgggagggaatgactgtgtcagacatgctgttaaagggagggcctttgaggaggtgagtcccgaatgatgataaagaagagttatgcagatacggtggggaggtgggggagagtttgtaggaaaaggaacagggaggacttttctgaggaggtttcatttaaactaagtcctggatgatgaataacagttatgtgcatatatggaacaagggtgttctaggtagaggaaacagcaagtgcaaaggtcctggggtggaaatgagcttggtgtgaatgatcagcagtgtgctggagtggagagaactgcaatgacatagtgtggaccaagggctttgccagtggggggtagagcagattctctttctgacagagcaggaaaccaggattccagaggtggagaaactggttgaggcagtgatggcacctggctcttccagttcacccatgcctgaccttgaagcctgtgcactctactgttaacgctgtaatctacttttgagtcctgtggaggcgaggggctgagcccatgctctcacaagaaagcagtggctctagcagagagacagaaccagatgggtactggacttgaagtttttgtcccttgtttttttgccacaccacctgtgatcatttagggacagggagaaataatcagttataccccagggggccccagaagatttccctaggtttcct

SEQ ID NO: 42223 - DNA, 735 bp, Artificial sequence
  DNA replication origin
ctgtcctgtttccctaatactgtcacttcaccctctgcgattctgatgctacaaatgatagatatcgttttagcattttcttacgggtcctagcgattctattcatttttctttcagtctctttctctgacttgttcacattgaacaatttccttttgggataggttgctatttctgttttcgcaggtggtttacctgtcttcccagccagtcacagtggtccttgtccccatggtgggtccggggcaagagagggccctgggttgggggtggggttcagttgaagatggggtgagttttgaggggagcactacttgagtcccagaggcataggaaacagcagagggaggtgggattcccttatcctcaatgaggatgggcatggagggtttggggcgtggcgctgggaacggcagccctccccagcccacagccgcgcatgctccctgggctcccgcctcagtgcgcatgttcactgggcgccttctgcccggccccttcgcccacgtgaagaacgccagggagctgtgaggcagtgctgtgtggttcctgccgtccggactctttttcctctactgagattcatctggtaggtgtgcaggccagtcatcccgggggctgaagtgtgagtgagggtggagagggcctcgggtgggtcaggcgggtcccgcttcctggtctgtggcctccgagggagaagggccacgaggtcgtcctccttcccttcacaggctg

SEQ ID NO: 42224 - DNA, 755 bp, Artificial sequence
  DNA replication origin
tccctaatactgtcacttcaccctctgcgattctgatgctacaaatgatagatatcgttttagcattttcttacgggtcctagcgattctattcatttttctttcagtctctttctctgacttgttcacattgaacaatttccttttgggataggttgctatttctgttttcgcaggtggtttacctgtcttcccagccagtcacagtggtccttgtccccatggtgggtccggggcaagagagggccctgggttgggggtggggttcagttgaagatggggtgagttttgaggggagcactacttgagtcccagaggcataggaaacagcagagggaggtgggattcccttatcctcaatgaggatgggcatggagggtttggggcgtggcgctgggaacggcagccctccccagcccacagccgcgcatgctccctgggctcccgcctcagtgcgcatgttcactgggcgccttctgcccggccccttcgcccacgtgaagaacgccagggagctgtgaggcagtgctgtgtggttcctgccgtccggactctttttcctctactgagattcatctggtaggtgtgcaggccagtcatcccgggggctgaagtgtgagtgagggtggagagggcctcgggtgggtcaggcgggtcccgcttcctggtctgtggcctccgagggagaagggccacgaggtcgtcctccttcccttcacaggctgcgaggccaccggcggcttcgtggtcgtgaa

SEQ ID NO: 42225 - DNA, 734 bp, Artificial sequence
  DNA replication origin
cttcgcccacgtgaagaacgccagggagctgtgaggcagtgctgtgtggttcctgccgtccggactctttttcctctactgagattcatctggtaggtgtgcaggccagtcatcccgggggctgaagtgtgagtgagggtggagagggcctcgggtgggtcaggcgggtcccgcttcctggtctgtggcctccgagggagaagggccacgaggtcgtcctccttcccttcacaggctgcgaggccaccggcggcttcgtggtcgtgaaggggcctggacggggaggaaggtgggccgtggaggggaggcggtcaggggctcaggtgaagacggggtgagtgctgttggggggatggaagtcccgaggtgccgggatccccgacgacacagggcagattccctgaatggggcccccggcgggggcgaggcgggcggtgaagaaggggcctggcacctgggaaggctgcggcctggcgagcgccccccccagcggtgtggagtgcggagcgcccgagtgagaagcactgcaaggtctcacctccgccatggaaggtccgaaaacagtgggaaggagtgggcgaggcagtgcggtccaaccaaacttgttgtgagggggggtgaatggctctaggaagtgggagtgtgcccaaagcagcaatcacgagaattgtgattcactagggttttcgtggggagtgcacttgtgaaactaaacctcatcagaaatgacctct

SEQ ID NO: 42226 - DNA, 1166 bp, Artificial sequence
  DNA replication origin
cactgaggtgggaggatcccttgagcgggaggtcgaggctgcagtgagctgtgatcacgccgctgcactccagcctgagcaacacagcgagaccgcgtgtccaaaagaaatttagaaaaaaatgtcctctgccttttgccacacgccttaagatgattgctctgccagcctggccagcagaagtggctttgtaggcactcagacagcgtacacacgtatgcttaactctgggacttattttgagagtattttcaaaagtaaaacggcaagttaacatttatccatggaagtgatcgaatatagcagccctctggagcgcacgttcccaatcacggttgtctgttttcagtgtgaaatatgagttggcgaggaagatcgacctattattggcctagaccaaggcgctatgtacagcctcctgaaatgattgggcctatgcgggtgagtgcttaaacgttaattcgatgttttctattagtagaaattaatttttgtgatagcgtcgttgcattagtgtggaaatgctgataaaggtctttcctgctcataaaaaatgaggatggcatctcatgaaggaaacattgattctggaggattttttttttcctctcgtgttcttcagcttttgcccatgacttctttctccggctttgtttgttaatgacagattgtacacatgtattccaacacagagtataatagcccccaaagtcctcgtgcgtcacttttctcacagtaacctccctgtgggtggagtaaccttattgggcatagagcatagagttggagaaatgtctttaggcttagttaggaccagaaatagctatgtattctgtgtatatatgtaaaattttgtatcaataacgaaacttattttctatttgcacacccacacgtattccccagcccgagcagttcagtgatgaagtggaaccagcaacacctgaagaaggggaaccagcaactcaatgtcaggatcctgcagctgctcaggagggagaggatgagggagcatctgcaggtcaaggtgagggaaagggaagaagaacgtctgctggtgtgtgcgtgtgtgtgtgttcgtgtgtgtgtgtgcacgtgtgtgtgtgttaggcattgtcacataggaggaagaggaggaaagaaaacaatggaaagaatgcctgaaa

SEQ ID NO: 42227 - DNA, 884 bp, Artificial sequence
  DNA replication origin
cctgtttccctaatactgtcacttcaccctctgcgattctgatgctacaaatgatagatatcgttttagcattttcttacgggtcctagcgattctattcatttttctttcagtctctttctctgacttgttcacattgaacaatttccttttgggataggttgctatttctgttttcgcaggtggtttacctgtcttcccagccagtcacagtggtccttgtccccatggtgggtccggggcaagagagggccctgggttgggggtggggttcagttgaagatggggtgagttttgaggggagcactacttgagtcccagaggcataggaaacagcagagggaggtgggattcccttatcctcaatgaggatgggcatggagggtttggggcgtggcgctgggaacggcagccctccccagcccacagccgcgcatgctccctgggctcccgcctcagtgcgcatgttcactgggcgtcttctgcccggccccttcgcccacgtgaagaacgccagggagctgtgaggcagtgctgtgtggttcctgccgtccggactctttttcctctactgagattcatctggtaggtgtgcaggccagtcatcccgggggctgaagtgtgagtgagggtggagagggcctcgggtgggtcaggcgggtcccgcttcctggtctgtggcctccgagggagaagggccacgaggtcgtcctccttcccttcacaggctgcgaggccaccggcggcttcgtggtcgtgaaggggcctggacggggaggaaggtgggccgtggaggggaggcggtcaggggctcaggtgaagacggggtgagtgctgttggggggatggaagtcccgaggtgccgggatccccgacgacacagg

SEQ ID NO: 42228 - DNA, 814 bp, Artificial sequence
  DNA replication origin
tcacttcaccctctgcgattctgatgctacaaatgatagatatcgttttagcattttcttacgggtcctagcgattctattcatttttctttcagtctctttctctgacttgttcacattgaacaatttccttttgggataggttgctatttctgttttcgcaggtggtttacctgtcttcccagccagtcacagtggtccttgtccccatggtgggtccggggcaagagagggccctgggttgggggtggggttcagttgaagatggggtgagttttgaggggagcactacttgagtcccagaggcataggaaacagcagagggaggtgggattcccttatcctcaatgaggatgggcatggagggtttggggcgtggcgctgggaacggcagccctccccagcccacagccgcgcatgctccctgggctcccgcctcagtgcgcatgttcactgggcgtcttctgcccggccccttcgcccacgtgaagaacgccagggagctgtgaggcagtgctgtgtggttcctgccgtccggactctttttcctctactgagattcatctggtaggtgtgcaggccagtcatcccgggggctgaagtgtgagtgagggtggagagggcctcgggtgggtcaagcgggtcccgcttcctggtctgtggcctccgagggagaagggccacgaggtcgtcctccttcccttcacaggctgcgaggccaccggcggcttcgtggtcgtgaaggggcctggacggggaggaaggtgggccgtggaggggaggcggtcaggggctcaggtgaagacggggtgag

SEQ ID NO: 42229 - DNA, 898 bp, Artificial sequence
  DNA replication origin
gctgtcctgtttccctaatactgtcacttcaccctctgcgattctgatgctacaaatgatagatatcgttttagcattttcttacgggtcctagcgattctattcatttttctttcagtctctttctctgacttgttcacattgaacaatttccttttgggataggttgctatttctgttttcgcaggtggtttacctgtcttcccagccagtcacagtggtccttgtccccatggtgggtccggggcaagagagggccctgggttgggggtggggttcagttgaagatggggtgagttttgaggggagcactacttgagtcccagaggcataggaaacagcagagggaggtgggattcccttatcctcaatgaggatgggcatggagggtttggggcgtggcgctgggaacggcagccctccccagcccacagccgcgcatgctccctgggctcccgcctcagtgcgcatgttcactgggcgtcttctgcccggccccttcgcccacgtgaagaacgccagggagctgtgaggcagtgctgtgtggttcctgccgtccggactctttttcctctactgagattcatctggtaggtgtgcaggccagtcatcccgggggctgaagtgtgagtgagggtggagagggcctcgggtgggtcaggcgggtcccgcttcctggtctgtggcctccgagggagaagggccacgaggtcgtcctccttcccttcacaggctgcgaggccaccggcggcttcgtggtcgtgaaggggcctggacggggaggaaggtgggccgtggaggggaggcggtcaggggctcaggtgaagacggggtgagtgctgttggggggatggaagtcccgaggtgccgggatccccgacgacacagggcagattcc

SEQ ID NO: 42230 - DNA, 914 bp, Artificial sequence
  DNA replication origin
tcactctggctgtcctgtttccctaatactgtcacttcaccctctgcgattctgatgctacaaatgatagatatcgttttagcattttcttacgggtcctagcgattctattcatttttctttcagtctctttctctgacttgttcacattgaacaatttccttttgggataggttgctatttctgttttcgcaggtggtttacctgtcttcccagccagtcacagtggtccttgtccccatggtgggtccggggcaagagagggccctgggttgggggtggggttcagttgaagatggggtgagttttgaggggagcactacttgagtcccagaggcataggaaacagcagagggaggtgggattcccttatcctcaatgaggatgggcatggagggtttggggcgtggcgctgggaacggcagccctccccagcccacagccgcgcatgctccctgggctcccgcctcagtgcgcatgttcactgggcgtcttctgcccggccccttcgcccacgtgaagaacgccagggagctgtgaggcagtgctgtgtggttcctgccgtccggactctttttcctctactgagattcatctggtaggtgtgcaggccagtcatcccgggggctgaagtgtgagtgagggtggagagggcctcgggtgggtcaggcgggtcccgcttcctggtctgtggcctccgagggagaagggccacgaggtcgtcctccttcccttcacaggctgcgaggccaccggcggcttcgtggtcgtgaaggggcctggacggggaggaaggtgggccgtggaggggaggcggtcaggggctcaggtgaagacggggtgagtgctgttggggggatggaagtcccgaggtgccgggatccccgacgacacagggcagattccctgaatgg

SEQ ID NO: 42231 - DNA, 711 bp, Artificial sequence
  DNA replication origin
tgtcacttcaccctctgcgattctgatgctacaaatgatagatatcgttttagcattttcttacgggtcctagcgattctattcatttttctttcagtctctttctctgacttgttcacattgaacaatttccttttgggataggttgctatttctgttttcgcaggtggtttacctgtcttcccagccagtcacagtggtccttgtccccatggtgggtccggggcaagagagggccctgggttgggggtggggttcagttgaagatggggtgagttttgaggggagcactacttgagtcccagaggcataggaaacagcagagggaggtgggattcccttatcctcaatgaggatgggcatggagggtttggggcgtggcgctgggaacggcagccctccccagcccacagccgcgcatgctccctgggctcccgcctcagtgcgcatgttcactgggcgtcttctgcccggccccttcgcccacgtgaagaacgccagggagctgtgaggcagtgctgtgtggttcctgccgtccggactctttttcctctactgagattcatctggtaggtgtgcaggccagtcatcccgggggctgaagtgtgagtgagggtggagagggcctcgggtgggtcaggcgggtcccgcttcctggtctgtggcctccgagggagaagggccacgaggtcgtcctccttcccttcacag

SEQ ID NO: 42232 - DNA, 1249 bp, Artificial sequence
  DNA replication origin
tcagaaatgacctctgtctgcggggcgcagtggcgctcgcctacgtattcccagttactggggacactgaggtgggaggatcccttgagcgggaggtcgaggctgcagtgagctgtgatcacgccgctgcactccagcctgagcaacacagcgagaccgcgtgtccaaaagaaatttagaaaaaaatgtcctctgccttttgccacacgccttaagatgattgctctgccagcctggccagcagaagtggctttgtaggcactcagacagcgtacacacgtatgcttaactctgggacttattttgagagtattttcaaaagtaaaacggcaagttaacatttatccatggaagtgatcgaatatagcagccctctggagcgcacgttcccaatcacggttgtctgttttcagtgtgaaatatgagttggcgaggaagatcgacctattattggcctagaccaaggcgctatgtacagcctcctgaaatgattgggcctatgcgggtgagtgcttaaacgttaattcgatgttttctattagtagaaattaatttttgtgatagcgtcgttgcattagtgtggaaatgctgataaaggtctttcctgctcataaaaaatgaggatggcatctcatgaaggaaacattgattctggaggattttttttttcctctcgtgttcttcagcttttgcccatgacttctttctccggctttgtttgttaatgacagattgtacacatgtattccaacacagagtataatagcccccaaagtcctcgtgcgtcacttttctcacagtaacctccctgtgggtggagtaaccttattgggcatagagcatagagttggagaaatgtctttaggcttagttaggaccagaaatagctatgtattctgtgtatatatgtaaaattttgtatcaataacgaaacttattttttatttgcacacccacacgtattccccagcccgagcagttcagtgatgaagtggaaccagcaacacctgaagaaggggaaccagcaactcaatgtcaggatcctgcagctgctcagaagggagaggatgagggagcatctgcaggtcaaggtgagggaaagggaagaagaacgtctgctggtgtgtgcgtgtgtgtgtgttcgtgtgtgtgtgtgcacgtgtgtgtgtgttaggcattgtcacataggaggaagaggaggaaagaaaacaatggaaagaatgcctgaaattgactggaaaagcgagga

SEQ ID NO: 42233 - DNA, 914 bp, Artificial sequence
  DNA replication origin
cctgtttccctaatactgtcacttcaccctctgcgattctgatgctacaaatgatagatatcgttttagcattttcttacgggtcctagcgattctattcatttttctttcagtctctttctctgacttgttcacattgaacaatttccttttgggataggttgctatttctgttttcgcaggtggtttacctgtcttcccagccagtcacagtggtccttgtccccatggtgggtccggggcaagagagggccctgggttgggggtggggttcagttgaagatggggtgagttttgaggggagcactacttgagtcccagaggcataggaaacagcagagggaggtgggattcccttatcctcaatgaggatgggcatggagggtttggggcgtggcgctgggaacggcagccctccccagcccacagccgcgcatgctccctgggctcccgcctcagtgcgcatgttcactgggcgtcttctgcccggccccttcgcccacgtgaagaacgccagggagctgtgaggcagtgctgtgtggttcctgccgtccggactctttttcctctactgagattcatctggtaggtgtgcaggccagtcatcccgggggctgaagtgtgagtgagggtggagagggcctcgggtgggtcaggcgggtcccgcttcctggtctgtggcctccgagggagaagggccacgaggtcgtcctccttcccttcacaggctgcgaggccaccggcggcttcgtggtcgtgaaggggcctggacggggaggaaggtgggccgtggaggggaggcggtcaggggctcaggtgaagacggggtgagtgctgttggggggatggaagtcccgaggtgccgggatccccgacgacacagggcagattccctgaatggggcccccggcggg

SEQ ID NO: 42234 - DNA, 858 bp, Artificial sequence
  DNA replication origin
cccacgtgaagaacgccagggagctgtgaggcagtgctgtgtggttcctgccgtccggactctttttcctctactgagattcatctggtaggtgtgcaggccagtcatcccgggggctgaagtgtgagtgagggtggagagggcctcgggtgggtcaggcgggtcccgcttcctggtctgtggcctccgagggagaagggccacgaggtcgtcctccttcccttcacaggctgcgaggccaccggcggcttcgtggtcgtgaaggggcctggacggggaggaaggtgggccgtggaggggaggcggtcaggggctcaggtgaagacggggtgagtgctgttggggggatggaagtcccgaggtgccgggatccccgacgacacagggcagattccctgaatggggcccccggcgggggcgaggcaggcggtgaagaaggggcctggcacctgggaaggctggggcctggcgagcccccccccagcggtgtggagtgcggagcgcccgagtgagaagcactgcaaggtctcacctccgccatggaaggtccgaaaacagtgggaaggagtgggcgaggcagtgcggtccaaccaaacttgttgtgagggggggtgaatggctctaggaagtgggagtgtgcccaaagcagcaatcacgagaattgtgattcactagggttttcgtggggagtgcacttgtgaaactaaacctcatcagaaatgacctctgtctgcggggcgcagtggcgctcgcctacgtagtcccagttactggggacactgaggtgggaggatcccttgagcgggaggtcgaggctgcagtgagctgtgatcacgccgctgcactccagcctgagca

SEQ ID NO: 42235 - DNA, 917 bp, Artificial sequence
  DNA replication origin
ctgtttccctaatactgtcacttcaccctctgcgattctgatgctacaaatgatagatatcgttttagcattttcttacgggtcctagcgattctattcatttttctttcagtctctttctctgacttgttcacattgaacaatttccttttgggataggttgctatttctgttttcgcaggtggtttacctgtcttcccagccagtcacagtggtccttgtccccatggtgggtccggggcaagagagggccctgggttgggggtggggttcagttgaagatggggtgagttttgaggggagcactacttgagtcccagaggcataggaaacagcagagggaggtgggattcccttatcctcaatgaggatgggcatggagggtttggggcgtggcgctgggaacggcagccctccccagcccacagccgcgcatgctccctgggctcccgcctcagtgcgcatgttcactgggcgtcttctgcccggccccttcgcccacgtgaagaacgccagggagctgtgaggcagtgctgtgtggttcctgccgtccggactctttttcctctactgagattcatctggtaggtgtgcaggccagtcatcccgggggctgaagtgtgagtgagggtggagagggcctcgggtgggtcaggcgggtcccgcttcctggtctgtggcctccgagggagaagggccacgaggtcgtcctccttcccttcacaggctgcgaggccaccggcggcttcgtggtcgtgaaggggcctggacggggaggaaggtgggccgtggaggggaggcggtcaggggctcaggtgaagacggggtgagtgctgttggggggatggaagtcccgaggtgccgggatccccgacgacacagggcagattccctgaatggggcccccggcgggggcg

SEQ ID NO: 42236 - DNA, 1457 bp, Artificial sequence
  DNA replication origin
ggcgggaaggggggcggggaccgcgcagtctctttaaggcgcttccagctctcggctccaatcgctgctctgacccccttcatcgtctcctcccctctcctcgtccttcccctcgtctatgcaggcttccctcggccactgcggggctgggggccgagcgggtgccaagtccagaaatgtttctgaggctgtgaaatgtcccctctgaggggggtcctagggagcgcaggcagaagccgtgacaggccatcatttcggcggccgagcctgcctctagcctcgtccctgtctcccttcccacgccaggtcctgcgcttcccgaaaaggatgaagctccagctgcagttctggggaggcctggaccccagctccgggggggccgggctaccaaggccgctgggcctggagaggcgcgtccctggcccatcttatcagcgctctgcagggtctgggcctgctgctcgcgtcctcctgggctcccaaggccacgggtgggttaatggcttgacagccggcctcctggcccagcagacgctgagcagcccgatggcacaatccacctcttctctccaaggccagctggagggacgaggcacgacaaggccatccctacagctggcacttcccctacagctgagagggggcctaaactacaggacacactcccaagacccttaagccctggcagcatcccgggggaggggggcagcaggtggaagtggaaagaagcctgtggagctgccagcagggagagggagtcggacatgaggctgagaggcctctgggaacccctgtgccaaggggctgctggcactgggcagcagcaccccagagcccacgaggagtgtgcccagagcaagtggctcagacctgggtcatggctcgagggtgtcgggctgtagctgctggtcccagagagtgcagcccagggcaggcatcaggacaggagtaggaggagaaagagtgttctaggaagagtctagtcccctaatcctggtggtggctggctgtagcctagtgcacgctgtctggcttgtgtggctgtgctgcctgagtatacataccctagcaacattctccttgctcagcactggacatcagctctccacctggccccttcctctagggaggggatggggaggcctcctagggttagcagcaggagttgggcctcaggaatcaggagcccttgaaaggaggatgcgtggttcccataaaactgagggttgccctgggccctacccttcctgagtcagctcttgcttcaattccttgaagcaccccagcatcctttcaataaatgcctgccctttgtggcctgcaaccagaggaactgcaactagcacactcactgaaggaatcctgctgctgctgctgctgctaaaaacaaccgaggtcatggatgagggggtggaggatactctcatcccacctccagactgacaacaaaaagacct

SEQ ID NO: 42237 - DNA, 1101 bp, Artificial sequence
  DNA replication origin
ccagcagccccttggcacaggggttcccagaggcctctcagcctcatgtccgactccctctccctgctggcagctccacaggcttctttccacttccacctgctgcccccctcccccgggatgctgccagggcttaagggtcttgggagtgtgtcctgtagtttaggccccctctcagctgtaggggaagtgccagctgtagggatggccttgtcgtgcctcgtccctccagctggccttggagagaagaggtggattgtgccatcgggctgctcagcgtctgctgggccaggaggccggctgtcaagccattaacccacccgtggccttgggagcccaggaggacgcgagcagcaggcccagaccctgcagagcgctgataagatgggccagggacgcgcctctccaggcccagcggccttggtagcccggcccccccggagctggggtccaggcctccccagaactgcagctggagcttcatccttttcgggaagcgcaggacctggcgtgggaagggagacagggacgaggctagaggcaggctcggccgccgaaatgatggcctgtcacggcttctgcctgcgctccctaggacccccctcagaggggacatttcacagcctcagaaacatttctggacttggcacccgctcggcccccagccccgcagtggccgagggaagcctgcatagacgaggggaaggacgaggagaggggaggagacgatgaagggggtcagagcagcgattggagccgagagctggaagcgccttaaagagactgcgcggtccccgccccccttcccgccagcctcaatgaattagagctgtgtttcccaaacttgcctgatcataagcagcctctggggccctagttagagatacaggttccggagtacctcccttcgagattctgattcagtaggcctgcgggtggagccaaggaatctgtaattttaacacgctccccacgtgattctcgtgaacaagcaagtttggaaaatactgaattaaaggaaacggggcctggctgcagaagcagcctccactagggggcttcggcgggaggattcccgggggcgtcgcctgcttccgccgc

SEQ ID NO: 42238 - DNA, 1729 bp, Artificial sequence
  DNA replication origin
ggcccatgggccatggtcaagtaggtcctttagatctcgatgccagttgtagtattggtgtcgtcatcttccattgcaggtaggtctgtgtgtcacttcagtaggcttgtgtgttcatttctttcactttttctgactcatgttctagcacctgtttgtgatagaacagtaaatacccttcactgtccagtacgtccttaatactggccttagtgatgacggcatcatcacacttgaaccactggtccttgtggtgccggatgaagctggtatagtggccactctccaaggttccttggtgattaaccacagcaaacaaggaatacttattttcgttgtttccactattggttggcagctgcaattgtccattcattctgctctctttacttgaggccataaacggcgtcatatccagctccagaggaaaggaaatgtatgtagtgatcttgcgcctctgtttcgctgaatgttcaaaccgtttgaaatgaaaacaggcaacgacaggtaatttattcattgtgagctgtttggtagattcctggtagctttggcaactaccacatttgattttggcactgcttcctaagtgctctggcctcgtaaacctccgcaagcagtccgtgagggtggtgattcctggtatgtggctttccccgttcacactgctctccctccctgggctcatgggccagaaggaggtgcaagagccaggcaagtccaaactaatgtcccagcatgggtctatcgtggtggagacgccatggcaggcttgacaggtgacatcagactgcaggccacctgtgaagatttggtctatgatgcagttacagtggttgggattgttggccgccttcccgacatcatcacctttgcagtgcctgtgcaggacatctaacgctgcaatgaggaactcgtgggcatcctgttgcctgtaccctgctaaatggcgggcatgtatccacaccaggtgcagtaacttatagggcacatgaggagacgggtttccagaatacaactcccgaaacagcgacgacatctcacagaccagacacaactcgggactcggcatctcacatcggtgcctgtcagagagaaagaaatctctcagtatcggcgtgtgggtgagggcctggacaatgcagttcataaagcacgtgttgccaagattgatgagtcctcttaaaccgatcgtaaagctggaggtgattcttcttctcctcgggttgtgccccagcagttctaattctggtttggttgtttcccaggttgggaatttctcaccaaggcctggcactgaacactgctggtgagaaacctctgttgaggtggaggcttgtaatttcaaagcttctccttgctcttctttggcaatttgctcaatgtctttgtcatatacatagtccttacacataaagcagtatatacctccgtaatacaggtctactgctaagttgtgttgtttcgtctctgcgtgctcgtgaatgtgtttctccgtgaagcagccaaagaagacacaggaaaggcaagagtggagtctgttcagatgggtgccacacacatggcagatgcaggactttgccttgcttttcctggtctctggggttccacaccacacgaagcactggtagataacccgcagttcctgcctccagttctctcccaccttaaagctgttcacgtgagaacagcctggtggccccacggcaaaatccacatccaggcatcc

SEQ ID NO: 42239 - DNA, 1006 bp, Artificial sequence
  DNA replication origin
ttttaattaatttttaactgatgcataatagatgtacatattttcagggaacatgtgataatttaatatatttatataatttaccaaaagatttattcttaatatagaatttttgtaatttgagaacaaatagaaaagataggtaggggagaaacacaaagccaagaaagtcctcttaaacaaaagtattctcagcctcaacaaagcccctttttttctcaaaacaagcaaatacatttagaattatggggggcgggaagggaagaacatgaacagtatattttaaagagaaatatttttcttaaggaatgaagatgcccccaaactcaccaaagtccttgaatatttttctgaaaacaaaaaagaaacaaagagaaggagagagggagaaagaaggaagagaagggagaaggagagagagaaacagagagaggaagggagggaggaggggagaaggagagagggagaaagaaggaagagaagggagaaggagggagagaaacagagagaggaagagagggaggaggggagaagggagggagggggaaagccggacaggtagagaggagaggaaggtaggagcaggtagggagagactgagatagggagaggaaaaaagagggagagagacagaggaagggagggagccagagagagagacaaagggagaggtggagagggaaaaagaaagagggggagagaagggaggagagggaaaaagaaaggggagacggaggaaaggagagggagagaggaaggaggatggggggagaaatgtgaagggaaggggaaaaggactaggtaggatagagtgaaggtggcagagaaggaggggtgggaaagaggaagaagaaaattaacaaagggattattttttaaaggatcaaagaaagaaattctctccaggaaaatgcaccaacaccttactgcagacattgcgtattattcctgatgactaccctctccatcccccacaataaggaaaaaaaaaccacacacacacaaa

SEQ ID NO: 42240 - DNA, 1445 bp, Artificial sequence
  DNA replication origin
cactggctggccaagatgctgagaaagatgcagggatggggaacccgggggaatgggaaggggttgggaggcgggaagcaacatgtgggaatcgagaatgggctgtttggggctagaaacgggggtgacagcagggggtgggaatcggagcagttttccccttgaagagaagcgacagtgcggtgagcgccaatatcttgaaagagaggaggaagataccctcggggagcgcaagagacctggagaagtgtttggggctggccccgaatacatagcggacggattgagtgggggcggtgggacacacctcttagccgcggtcactgccgcagaggcccaagctgcggagccttcgcctgcttggccccctccctgccactggggagggggcgcctcagctgggcgcaactggcggccctccagggaggtgcccggcgcctctgccggctgcttcgagctggtactcctggtgaggacgaggggatgggcggcgcccacgcgcactgcaggggaagggcagggttctccgggaggagggggagagcatgcgtgtgtcgaagccaccattccatctgtctgcaggatttcccagcaggtaggtgcaaacgcagtgatacaatgttgcgcagcgtcacaaacggggcaactggcatcccgcaccagggccaattggaatggtacaggagtcctggtttagagacacgaaaataggagttgggattgcagaacgtgtgaaggggaaccttcatctctaccagtctaccgcgacgccttctaaatcgttacacttagccgggaaaagatgagtggagaatcttctggcactcgcccaaggggagtagggaggaaaaaggttttcgtgtttaccttggaccctgaaaccccgtctgctcttaagcgggagtatgcctgtctttcctgctttctctgcactctccctactcttcctttaccctaaacttcgttccacaaaactgaaaaccaggataatgcacacacacacctcaatttagcttcccctgcaggaagacatacacacgcgcgcgcattcacacacacacacacacacacacaaacgaataacacaacacacgaacaataccggtccatcctgctgcctagcagaccataaggacacggctcaggaacccttctgctgtggaccgcacacttatagaatgtagaatgcgggaggggagggggcagattggcatcacgaaatggaagcattggttgcttcctgagttcttagtagggaggcttgagtttgcaaaatatctgcaatgacgaataactgaaaaagaaggctaaaatgaaaagtttcacagagaaaagaaagtgcagaggtttaaaaataaataaaacatgacggtgggagactctgataagtttttaaaaattcaacaccctagctctcaccaggggatgtatccctccccttcctg

SEQ ID NO: 42241 - DNA, 1371 bp, Artificial sequence
  DNA replication origin
gaggtcatcaagcgctctgcccagtccgcgttcgcaagcccctctgcttcccgcccatcggacccgtggctgcttacgaagaggtgtgcgcacactgaggggcgtgttccagcatagggagacgctgagcgcccacgggttagacctcagagccaagccagccatggagtgggatgggggaaagtttggcaccctgcgaggggctgccggactggagtgggcggggcgcccgagggtactttagccttccaggcttagggactcaggctgcccagacctgaagcggtgtgcggccatggaccgcggagctgccgcagcccagggcactgccccgcctcaggatggagagcagcccgctgagtctccagagcctccgccgccttggccgccgccgccaccaccaccggctccgccgccggctccgccgctgctctccgaggcttcgccagaacccataccagagccctgtccagagcttgctccaggtccctgtccagaggcgacctcagaatcagccacagaactgtacacagaaccgaccccagaaccagccacagagccggcctcagaaccggccccagaacctgccacagagccggccccagaacctgccacagagccggccccagaaccggccccagaacctgccacagagtctgccccagagccgactccagaacctgccctagagtcggtcccagagccggccccagagctgactccagaagttgccccagagctggccccagagccgaccccagaacctgtgacagagctggccccagagttctgccctgaggcggctccagagttccgtccaagtccagcaccatgtctattgcaatgtccggtggacactcgagagagaggtctaaagacctcgccatcgccatcgccatcgccatcgcccagaacgccaatgtcgtggtccagaataaaggtaagcaaaagaccccctgaagcggggaaaagaagcaaggcgaagtcagatggctatggagcccgcgggactccgggtaccccttgcatcccgcttgtctggcactggctggccaagatgctgagaaagatgcagggatggggaacccgggggaatgggaaggggttgggaggcgggaagcaacatgtgggaatcgagaatgggctgtttggggctagaaacgggggtgacagcagggggtgggaatcggagcagttttccccttgaagagaagcgacagtgcggtgagcgccaatatcttgaaagagaggaggaagataccctcggggagcgcaagagacctggagaagtgtttggggctggccccgaatacatagcggacggattgagtgggggcggtgggacacacctcttagccgcggtcactgccg

SEQ ID NO: 42242 - DNA, 1649 bp, Artificial sequence
  DNA replication origin
acgggtccgatgggcgggaagcagaggggcttgcgaacgcggactgggcagagcgcttgatgacctcctagcgacgcgcgggaggggaggggagagacaaaaaggggagggggagtggagcggcgtggaggttggggggcgggctggagccttgccgtgtttaaccctttagtgacacgaatgaaaaaaaaaagccagaggcgaagttgagggtctttgcaatcccccaaccacttagctgctggtcagaatagcttccatcctgtgtctgctctctcacctcagcagcaggtgagcttagcctcggaccaacctcttgccccccatctccaagcctcgatgggcaagtaatgctttttatctaagccgggaaaagaaattaagcggcatggtgtgtgtgtggtggggggggggggtgcggggggggcgggtgttcagcctcctttggattgaagtacaatttgaccctcttcggttttttgcatttctgagctttgccgttgggtacagagtttgaggtgattcgggaaaggagtgtgatgagggaggctggcgccccggctttccgcagcctgcagcctccccgagagcaagtcgagagtgccccggcagcagctgggcttcgcgctcgggagctgaggctatctgggcgtctgtctggctcgcctatgctataggagcctgccttgtgcttttagctggatttcccagccatcagcaggagtttgtttttccgccccccccaaacttgttaacgcgcgcgcgcgcgcgcgtgtgtgtgtgtgtctgtgtgtgtgtgtgtgtgtgtcttgggctggggaaattcactgcaacacccacacccttttcacctcctgaagcagtctgacattagagatgggagattctcttgggaagagaacgactgatgcctagcgcagcacctttcccaccacatcggaagactttagaagctctttctgttatagtcacgtacacatacacacaaaccatcatcttagtcagacctagactttagacgccaatatattaccaattgtaattaaaatttgagaagactacctgttaagccacagctgggtggggggagcggacgggggagaaatacctgtaaacctgatttgaaatatgacaagtgaatttatctcccatacacataatgctgcagttgtgggtagcagccttctttctgcagccccttctctagccatctactcccagaccatatcccccactattccctcttcttttgccaacggacactgacctagccagaattttctagaatctgcaacatctttctgttgcctatactatgtctcagcaataaataataccataagagcacagtttcacctaaatccctccaaagaccagaatctctggtgaggtctgcatttcccagatcctcgctgcagcctcacagcctaagcccacctttccagagatgtgttaacactgcttggcagctactaagctagtgcagggaccgtccttaaactctggggatgggaagaccaggagaagtgagccctatcaattccctcacgtggcagtcctccttccagtaaattcaccttaggagcccactctcttcaccctccttgggcttgttctcctttcccctatcccacactcaagtagccaag

SEQ ID NO: 42243 - DNA, 1814 bp, Artificial sequence
  DNA replication origin
tcagtttgggccgaaggaagtggaggctgttggggatttctccttggaggcctctgcgtccctgcgggacagtgaaggactgaagggacagtcatcgcggcttggcagctctcttggcagcgttgtcccctctatcgaccggcgggccgtccctcccaggcaggttgcagggctaggggctggtgtgggaacggagatgaggccattggtggcttttgccagccacacttcccacggccggacgcgcacacatccattcagctcttggggcgttgttgccgccggttcggctcggcctctccctccctccagagtcctgccccagcgccggcgagatttcctgcacgttgagaagtgtggaggaaacttgcgccatggagcgcagctgtgctggagctactgctgttgctgctgccgctgccgccgccgccgccgccgccgccgccactgccgccgccgccgccgccgccagggtttgtttgttttaggagtctgtgatctgctggaagccaagttgcagctgaggacaggagagaggagctctcctgagtgctccagaacccccaaagcgagcctcccccgtaggggtgagggcgaggggtaggggcagctggagctgttaccaggaagagtgacttgtgggacgactcaccttgaggtgccagattgccaagtgaacggactttacgaactttattccacttttttgttgtttctcttaaatcctcaaatccgaaaagccctcccgcttccaacccgcttaaatggcagttgaagttgtagatgtgggttcaggctggagatagaaagatgtgtcttttcagcagggagcaaatatcactttttttttgcgggggggtggggttcaacattggtcacatctcagcagagggttcagcaaacgtccaccgcaacacacacccacaataacctgtgcggcattcgccttgcattggagcctgtggttgacttccagtgtatgggatccttcaggccttggggcccacactcttagcaaccctggagtgttgccatgggtgtaccaatcagattgaggagtctgaggtatgctgaggcaacattttgaggggctggcagggacccctctgatcattagcctccccaaactagcccagatcttcatccagcaccctttcccccatacttgtcatgtactttaaccagcctgagatgcgtttgtcatccactgtcacaacccctcctgaggcagtctccctccagtgttctctggagaaagttatatgctttttttttttttttttttttttaacaaaaacactcaactcctttggtgaggggaatcctggccttcaggaatttcttctaatcaagctcctcctctccccactctttccaccaaggtcacaatgggatatgcagccctccatgatctggcagttcctccctttctttttctcctcacaccgcccacagaatttccacagtctgcctagacaacctgccttggagaggtcatttttcagctctgcccagagctgacccatcttgagaagcaccccagagagtgcttgctgctgtggtcccggattattttgtgagccagtgagagcatggcagggggtgttactaagtatggggcagccagcaatttgtggtctggctgggggattatttgagagggtagatgagggtttccttggccaagctgtagaggaagtgcttcgtgtgttgagaggcagggtgccttttaatgattccctttccactgaatgtacagttgacccctattatatgaaggctcattatgacatgcatttagatatgcaagggat

SEQ ID NO: 42244 - DNA, 1171 bp, Artificial sequence
  DNA replication origin
tcgcctgggctggctggaggggcggggaacccggcagtaaagaggaggaccaaagaggggccctgcttgaatgaaacaatgtaacaattgatgtgaggcctcgcctcgctcccactccccagcgatcctataggcgaggtcccagtgactgcccctccccattgctccgttttcttgtccattacgcgctatccctccgcctctccttctttcttttcttttctttttttcccttctccttttcccccctctctccccctttctccagctccgtgtcatttcctccttgcgctcgctcgctgcctgagcgtctccagccgggagagtaggcggagcagggcggtgcggggtggcgtagagctggagggcgatggtggcggagctgctgggggcggaggcaacgtagccccctcggaaaaggagcccggcggcgcctgagcccagccgaggatggagaaccggcctgggtccttccagtacgtccctgtgcagctgcaagggggggcaccctggggcttcacccttaaggggggtctggaacactgtgagccgctcacagtgtctaaggtaagaactggcggctgatgtcctaacggcgcctaactttgaatggacaagcgggtgcgaaggctgccgctggacggggccctcaggccaactttgaaacttagggctgggagcgaaagaccctctgagcggcacggaggggtcttgccaccagtccaggtgcagacatcccctaagggtggctggaacacgagctgggagcacaactggcccccggctagaaccttgcgcgcagacacactcgcgagggcgctggggcagcccttgctgccccacgtcggggcggctacttccctcagtttgggccgaaggaagtggaggctgttggggatttctccttggaggcctctgcgtccctgcgggacagtgaaggactgaagggacagtcatcgcggcttggcagctctcttggcagcgttgtcccctctatcgaccggcgggccgtccctcccaggcaggttgcagggctaggggctggtgtgggaacggagatgaggccattggtggcttttgccagccacacttcccacggccggacgcgcacacatccattcagctcttggggcgttgttgccgccggttcggctcggcctctccctccctc

SEQ ID NO: 42245 - DNA, 1132 bp, Artificial sequence
  DNA replication origin
ccgggggccagttgtgctcccagctcgtgttccagccacccttaggggatgtctgcacctggactggtggcaagacccctccgtgccgctcagagggtctttcgctcccagccctaagtttcaaagttggcctgagggccccgtccagcggcagccttcgcacccgcttgtccattcaaagttaggcgccgttaggacatcagccgccagttcttaccttagacactgtgagcggctcacagtgttccagaccccccttaagggtgaagccccagggtgcccccccttgcagctgcacagggacgtactggaaggacccaggccggttctccatcctcggctgggctcaggcgccgccgggctccttttccgagggggctacgttgcctccgcccccagcagctccgccaccatcgccctccagctctacgccaccccgcaccgccctgctccgcctactctcccggctggagacgctcaggcagcgagcgagcgcaaggaggaaatgacacggagctggagaaagggggagagaggggggaaaaggagaagggaaaaaaagaaaagaaaagaaagaaggagaggcggagggatagcgcgtaatggacaagaaaacggagcaatggggaggggcagtcactgggacctcgcctataggatcgctggggagtgggagcgaggcgaggcctcacatcaattgttacattgtttcattcaagcagggcccctctttggtcctcctctttactgccgggttccccgcccctccagccagcccaggcgaggggaggtgaaagtcgttagtgtggacggcccgcgtggctgagtgggctgaaacgctggtttcctgattagcgcgttcatgtttctctgactgcctttttcttctgaaggtcccgagaacggagacctgggagggttaaaaggctgctaatttgtggaccttgcctagaggggtggaaagcaaagccagcaggccagcggacatagtgaggctgtgtgtgtagactgctctgtgtgtacgcgctaggtgtgtggggtcattatgaaacattgccccagagcatagtttaaataaagaagcactttgaggatgccccctgctcgggctcccccgcaccctggctcagtg

SEQ ID NO: 42246 - DNA, 892 bp, Artificial sequence
  DNA replication origin
tgggttgcagcccccgcctggccagccgccctgtccaggagggaggtgggggcagcccccgcccagccagccaccccatccgggagggaggtggggggcagcccccacctggccagccgccccgtcggggaagtggggggcagcccccgcccagccagccgctccgtccgggagggaggtggggggcagcccccgcccagccagccaccccatctgggaggtggggggcagccagcccggccagccgccccatccgggagggaggtggggggcaacccccgcccagccagccgccccattcgggaggtggggggcagcccctgcccagcagcaaccccaccagggaggtggggggcgcctctgcccggccgccgccctgtccgggaggtgggggcgcatctgcccggccaccccgtctgggaagtgaggagcccctctgcccggctgccaccctgtctgggaggtgtacccaacagctcattgagaacgggccatgatgacgatggcggttttgtcgaatagaaaagggggaaatgtggggaaaagaaagagagatcagattgttactgtgtctgtgtagaaaaaagtagacataggagactcccattttgtcctgtactaagaaaaattcttctcccttgggatgctattaatctataaccttacccccaaccccgtgctctctgaaacatgtgctgtgtccactcagggttaaatggattaagggaggtgcaagatgtgctttgttaaacagatgcttgaaggcagcatgctcgttaagagtcatcaccaatccctaatctcaagtacccagggacacaaacactgtggaaggctgcagggccctctgcctaggaaaaccagagacccttgttcacatgtttatcagctg

SEQ ID NO: 42247 - DNA, 1336 bp, Artificial sequence
  DNA replication origin
ctcctcacttcccagacggggtggccgggcagatgcgcccccacctcccggacagggcggcggccgggcagaggcgccccccacctccctggtggggttgctgctgggcaggggctgccccccacctcccgaatggggcggctggctgggcgggggttgccccccacctccctcccggatggggcggctggccgggctggctgccccccacctcccagatggggtggctggctgggcgggggctgccccccacctccctcccggacggagcggctggctgggcgggggctgccccccacttccccgacggggcggctggccaggtgggggctgccccccacctccctcccggatggggtggctggctgggcgggggctgcccccacctccctcctggacagggcggctggccaggcgggggctgcaacccacctcccggatggggcagctggccgggcgggggctgcctccctcctcctggacagggtggctgccgggcggagacgctcctcacttcccagacggggcagctgccaggtggaggggctcctcacttctcagacggggcggacgggcagacatgctcctcacctcccagacagggtggtggtggggcagagacactcctcagttcccagacggggtcacggttgggcagaggcgctcctcacatcccagacggggtggcggttgggcagagacactcctcagatcccagacggggtcgcggccgggcagaggtgctcctcacatcccagatggggcggcggggcagaggcgctccccacatctcagacgatgggcggccgggcagagacgctcctcacttcctagacgggatggcggccgggaagaggcgttcctcacttcccagactgggcggccaggcaaaggggctcctcacatcccagatgatgggtggccaggcagagacgctcctcgcttcccaggcggggtggcagccgggaagaggctgcaatctcagcactttgggaggccaaggcaggcggctgggaggtggaggttgtagtgagccaagatcatgccactgcactccagcctgggcaagattgagcactgagtgagcgagactccatctgcaatcccggcacctcgggaggcccaggctggcagatcactcgtggtcaggagctggagaccagcccggccaacatggcaaaaccctgtctccaccaaaaaatacaaaaaccagtcaggtgtggtggcgtgcgcctgcaatccctcggcaggctgaggcaggagaatcaggcagggaggttgcagtgagccgagatggcggcagtacagtccagcctccgctcggcatcggagggag

SEQ ID NO: 42248 - DNA, 1349 bp, Artificial sequence
  DNA replication origin
tcccaaggcagaagaatttttcttagtatagaacaaaatgaaaagtctcccatgtctacttctttctacacagacacggcaaccatccgatttctcaatcttttccccacctttcccccgtttctattccacaaagccgcgattgtcatcctggcccgttctcaatgagctgttgggcacacctcccagacggggtggctggccgggcggggggctgacccccctacctccctcccggacggggcggctggccgggcagaggggctcctcacttcccagtaggggctgctgggcagaggcgcccctcacctcccggacggggtggctggccgggcggggggctgacccccccacctccctcccagacggggcggctggccgggcaggggggtgacccccccacctccctcccggatggggcggctggctgggcgggggctgacccccccacctccctcccggacggggtggctgccgggcggagacgctcctcacttcccagacggggtggctgtcgggcggagaggctcctcacttctcagacggggcggctgctgggcagaggggctcctcacttctcagacggggcggttgccaggcagagggtctcctcacttctcagacggggtggccaggcagagacgctcctcacctcccagacggggtcgcggccgggcagaggcgctcctcacatcccagacggggcggcagggcagaggcactccccacatctcagacgatgggcagcccgactcttcacttcctagatgggatggcggccgggaagaggcgctcctcacttcctagatgggatggcggccggacggagacgctcctcacttcccagactgggcagccagtcagaggggctcctcacatcccagacgatgggcggccaggcagagacgctcctcactttccagacagggtggcggccgggcagaggatgcaatctcggcactttgggaggccaaggaaggcggctgggaggtggaggttgtagcgagccgagatcatgccactgcactccagccagggcaccattgagcactgagtgaaggagactccgtctgcaatcccagcacctcgggaggccaaggctggcggatcactcgcggtcaggagctggagaccggccaggccaacacagcgaaaccccgtctccaccaaaaaaaatacgaaaaccagtcaggcgtgtcagcgcgtgcctgcaatcgcaggcactaggcaggctgaggcaggagaatcaggcagggaggttgcagtgagccgagatggcagcagtacagtccagcttcggctcggcatgagagggagaccgtggaaacagagggagagggagaccgtgg

SEQ ID NO: 42249 - DNA, 898 bp, Artificial sequence
  DNA replication origin
gcctggccaccccgtctgagaagtgaggagaccctctgcctggcaaccgccccgtctgagaagtgaggagcccctctgcccagcagccgccccgtctgagaagtgaggagcctctccgcccgacagccaccccgtctgggaagtgaggagcgtctccgcccggcagccaccccgtccgggagggaggtgggggggtcagcccccgcccagccagccgccccatccgggagggaggtgggggggtcacccccctgcccggccagccgccccgtctgggagggaggtgggggggtcagccccccgcccggccagccaccccgtccgggaggtgaggggcgcctctgcccagcagcccctactgggaagtgaggagcccctctgcccggccagccgccccgtccgggagggaggtaggggggtcagccccccgcccggccagccaccccgtctgggaggtgtgcccaacagctcattgagaacgggccaggatgacaatcgcggctttgtggaatagaaacgggggaaaggtggggaaaagattgagaaatcggatggttgccgtgtctgtgtagaaagaagtagacatgggagacttttcattttgttctatactaagaaaaattcttctgccttgggatcctgttgatctgtgaccttacccccaaccctgtgctctctgaaacatgtgctgtgtccactcagggttaaatggattaagggcggtgcaagatgtgctttgttaaacagatgcttgaaggcagcatgctcgttaagagtcgtcaccactccctaatctcaagtacccagggacacaaacactgcggaaggccgcagggtcctctgcctaggaaaaccagagacctttgttcacttgtttatctgctcaccttccctccac

SEQ ID NO: 42250 - DNA, 1237 bp, Artificial sequence
  DNA replication origin
cccggaagggacctattgcagaggcacggtgtgatgtagaactgatactgatggaatagactagaaaatggcacctctttcttgtgagacaaaggagacagtacctggcaattgtgaagcagccctgccctgtggccggagcctggattggcccctctcgaacccagacaccccactagtctgctagttttgctagagtgtctcgtgattcattcaaatcatgtttcaaagctctgagtagaagttcaaccattttgtactactaagtcctaaccacatttttaggaccccttagtattttatttgttttgtggtggttaatagtacactttgggaggccgaggtgggcggatcgcgaggttaggagttcaagagcagcctgaccaacatggtgaaacccgtctcttctaaagctacaaaaattagccaggcgtgatggcacccgcctgtaatcccagctactcaggaggctgaggcaggaggatcgcttgaacccaggaggcgaaggttgcagtgagctaagatcgtgccacggcactccagcctgggcgacagagcgacagagtgagactccatctcaaaaaataaaataaaataaaattgtgaaataggacgggatctccatgtgcatggtttcccaaacaccaagtggtgcttatcaaagagaaagatagagaagggtggagtgtgtggagaataggagaacgtctctgggctttaacgcaggactactagatgggtggtgctctggtctttaaggtgtactgcatcgaagtgcaaatggctgcaacacggaggcgaggagtgtacccatgaggaaactgaggtgcagggaggtcaggcaggttgtgaacaggggtttaagaaaagcgttaaattactggctgcgccaagatgctctgcaaggtgggaacctgttgaagaaataaaactgcatcatgtgactcagcaaagatgcccggctactgtgccaagaatcccgtgggttgtgcagacaacactagggcccaggtcccatgagtaagccagaatggttgatagtgggggaggatgatgacgacgctgcctttgcccctgtcttgtgtgaaacaactgcctgtgggtttcctgcagcgcagtggggagtgagaggagaaacgtcctgccgtgccacagtgagtttgggtcaaaggcacacatggaggcagtcttggccaaagtcacaatgcggtgaatttcgctgtgcgccaaggaggtt

SEQ ID NO: 42251 - DNA, 1107 bp, Artificial sequence
  DNA replication origin
gcggtgaatttcgctgtgcgccaaggaggttcctggccccaggagtgcgaagcgcctgcgcagtgggccccaggcgttgcgcgctgcgggagccaggagacccccgcccctggcccctcgccccggttcctcgcccctcagcccacgccctcccctgcgaacgcgcacgtgaacgggagcgcggacgcgcccgagaatgcgcttcacctcgcagaagcgggtgggctctgtggagagtcgcgggctcgcgggcagcagcgcctcctccactccggcgggcccgggttcggccggccgcccatcggactggcggactggctgactgacacgcctcgcttgcccccgcctccgcccgtgccccgcccagcttcatctctccctccgctccccgggctcgggggcagacggcagacggaggcgcctctctctccccgcccctctcctcggccctttctcttcccagcacctcggctgctgcccggcagcggcagcagctgcgtcggcggcccacacagcagcgagaggcgagaggaggctgcctcgaggatgaagtgcaaacccaaccagacacggacctacgaccccgaggggttcaagaagcgggcggcgtgcctgtgcttccggagcgagcgcgaggacgaggtcctgttagtgagtagcagccggtacccggaccgctggatcgtgccgggcgggggcatggagcccgaggaggagccgggcggtgcggcggtccgagaggtgtacgaagaggcgggagtcaaggggaagttaggccggctcctgggcgtcttcgaacagaaccaggaccccaagcacagaacgtacgtgtatgtactgactgtcacggagctgctggaggattgggaagattcggttagcattgggaggaagcgagagtggttcaaagtcgaagatgccatcaaggttctccagtgccacaagcccgtgcacgccgaatatctggagaaactaaagctgggcggttccccaaccaatggaaactccatggccccatcctcgccagatagcgatccctagtatgtaccgcttgcgcccgcacagacttctgtttgtctgccttgcttaaaatgcatcccgcctgga

SEQ ID NO: 42252 - DNA, 978 bp, Artificial sequence
  DNA replication origin
ttagacgagcagggtctagatgagtggcgcggtgtggaaaagcagggcctggctgggcggtgcagcctcggatgacagggcctggaccagatgcacgtctgcggagagcagaagctaccagggtgatgcggcttcgggtagcaggccttgcctcagatgcgtggcttaggagtgcagggcctggctgggttgcctgactcgacgtagaagccccggaacagggatagctgctgggccggaaccctggagaagatggcggcaaaggctcaggaaacagacgccgccctggaggcttctgagccggggcagcctggttgcggcagggctgcttcctacgacggctgttcccggggctcttggtctgggccaggtgctcgtcggcgtggccagtggccttctggggccccacagcggcctggctgcccccctcgggcaccacacacccaaaaacttcgtgaggactgcggcagtcctggcggtcagaatgcctctccgtcagcacagcagctatgattggcagccccgaggcctcatcggtgatgaaaatggcggcggaggtggcggctgcagcggaagaaccggctgtgctgctgcttagggcggcgccgcccgagggagatgcttggctggagactgtggtgacggaagcagcaggatcttgattcccggtcccgcaggcatccccggaggcaagggcggtttcgttgttcagccctccctgcccctcgtcctgctggtgcttctgctccttctccatgtctgactgagtggccataacgccaggttctcccccagagagcaagagcgcagctgctacttctgccggaggagagcgcgaactggtagagcaagaaggtgggtggagcccagccagtcctcgactctgattggcgagctggacgtcagatgactcctctctcttcccgggagccgtccaatccggagccgtgcaacccagagccaggcgcctatcgtcaa

SEQ ID NO: 42253 - DNA, 1217 bp, Artificial sequence
  DNA replication origin
gcgcgctgcgggagccaggagacccccgcccccgcccctcgccctccgccgcgaacgcgcacgtgaacgggagcgcggacgcgtccgttaatgcgcctcacctcgctcaaaccctacccggcggcggagggagggagacgcgcccccgacaagcgagtggggtctgtggacagtcgcgggctcgcgggcggcggcacctcctccactccggcgggcccgggttcggccggccgcccatcggactggccgactggctgacgcgcctcgctgcccccgcctccgcctgcgccccgcccagcttcatctctccctccgctccccgggctcgcgggcagacggaggcgcctctctttccccgcccctcgcctcggccctttctcttcccagcacctcggctgttccccggcggcggcagcggcagcggcggcccacacagcagcgagaggcgagaggaggctgcctcgaggaggctgcctcgaggatgaagtgcaaacccaaccagacgcggacctacgaccccgaggggttcaagaagcgggcggcgtgcctgtgcttccggagcgaacgcgaggacgaggtcctgttagtgagtagcagccggtacccggaccgctggatcgtgccgggcgggggcatggagcccgaggaggagccgggcggtgcggcggtccgagaggtgtacgaagaagcgggagtcaaggggaagttaggccggctcctgggcgtcttcgaacagaaccaggatcgcaagcacagaacgtacgtgtatgtactgactgtcacggagctgctggaggattgggaagattcggttagcattgggaggaagcgagagtggttcaaagtcgaagatgccatcaaggttctccagtgccacaagcccgtgcacgccgaatatctggagaaactaaagctgggcggttccccaaccaatggaaactccatggccccatcctcgccagatagcgatccctagtatgtaccgcttgcgctcgcgcagacttctatttgtctgcctcgcttaaaatgcgtcccgcctggagcacctctcgtgccatgtgcggtctcacggggaggagggaggcttcttttgtttccttggcagaccctctgaatcacgcttgcaaactgtctcagttgccaggccctgttttcaagacagtttgcacgtttttcagatgctttcaaaatcgcttcttggttacactgtaaaatgt

SEQ ID NO: 42254 - DNA, 1106 bp, Artificial sequence
  DNA replication origin
ggcagcctcctctcgcctctcgctgctgtgtgggccgccgctgccgctgccgccgccggggaacagccgaggtgctgggaagagaaagggccgaggcgaggggcggggaaagagaggcgcctccgtctgcccgcgagcccggggagcggagggagagatgaagctgggcggggcgcaggcggaggcgggggcagcgaggcgcgtcagccagtcggccagtccgatgggcggccggccgaacccgggcccgccggagtggaggaggtgccgccgcccgcgagcccgcgactgtccacagaccccactcgcttgtcgggggcgcgtctccctccctccgccgccgggtagggtttgagcgaggtgaggcgcattaacggacgcgtccgcgctcccgttcacgtgcgcgttcgcggcggagggcgaggggcgggggcgggggtctcctggctcccgcagcgcgcgacgcctcgggcccactgcgcaggcgccccgcacccctgggggccgagaacgtcgttcgcgcactgtgaaatacaccgcattgtgactttggccgactgcctccacgtgtgcctttgacccaaacgcgactgtagcgcggcaggacgtttctcctctccctccccaccgcgctgcacgaaacccacacgcagccgttttacacacgacagaggcaagggcatcgtcgtcatcatcctcccccacgatgaaccattctggcttactcatgggacctgggccccggtgttgtcaaaacgacccacgggattcttggcagaatagccgcgcatccttgctgagtcacatgatgcagttttatttcttcaacaggttcccaccttgccgagcatcctggcgcagctagtaatttaacgcttttcttaaacccctgttcacaacctgcctgacccctttgtgtctcagtttcctcatgggtacacttctcgcctccttgttgcagccatttgcacttcgatgcagtacaccttaaagaccagagcaccacccatctagtattcctgcgttaaagcccaagacattctctcattctccacacactccacccttgtctttctctttgataagcaccacttgggggttgggaa

SEQ ID NO: 42255 - DNA, 745 bp, Artificial sequence
  DNA replication origin
gtggccttgtctagttcatgcaatgtatctgtgcctcagcttcctgatctgcaaaataggggtgctgacatccacttcccagggctgctgtgacaggaagacaagccccagcacaaatcctgctgtgatgtacaagctgtgcccttccctcctttcctcccccaacacacacaaaatgagtccatcaccggagctgcagaaagaaagggaagaaactaacgttctttctgcgtctgggagcttgtgggggcgggcagggggtgagggagaaatcatggagtcacgtggcagccacagacttactactactactttgttagctccaatagtgtatcctctcaggccattccgtttcctcagcagaggtctaacacttgttgcaattagagaccccaaacagagacctaagcatgctggacaagggggtggagatgcaagccggcctgacaggaggggccttgaataggggagggacggaatagagacgcattgcggaaaaggtagggggccggtgtgtggggcaaggggtgggaccaagaggcacagcgcatctgtgggggagggggcgtagaggaaggggaggtgctgttgtatagtgtcgacctggttggtggtggggtggtgtgttggcaaagggggcgggaccgccttccagcgcacatgcgcatcatggtctccaggacgaagcttttgttgggaaagcaggcgggactgactttggctcttcagtgtttgcgcatgcgcg

SEQ ID NO: 42256 - DNA, 1671 bp, Artificial sequence
  DNA replication origin
ccttgaaggccatctcagacttgttagcagctaactcaccagtggttgctgcctgggaaaaatcataggcagcatttggaccctttggggtagcattttgggacttaaaggctgccttgggctgcgtgttgggcacatccttggcattatgagcctgagagaaatcatagacaccatttgggccttttgtggtggcattctggactttaaaggctgacttaggcctagcggcagctgctgaaacctgaatgtcagccatctcattggcagttgggggctgtgaactctggggactagcagctgcggtggcctggttagtaggtggagcctctgagatctggatggcctccatcaaggtctgcataagcaaggcgctgtcttctacggaggcctcagcctgcaaacacaggggggaaaaaattaaatctctgggcctctgaggcaggaggtggggtgggaatagggagcccgggtggcagcgcagcagcggagctgcaggcgggcggtgggtgcaaaaacaggggggctgaggcagagatctagggggcccgcgaggggcgatgggggaccaggcgggtactaaacatgtggcaggggtgaagtagggcaagggcaaaatgaggggtggggcggtatgcggaaagtgggcacgaacaggagccggggacgctccaagaggcgtgcagtagcagctcaggacggcaggcggatcgcggagttgagaataaggggggtcgcacagagtggggaatgcagaaagagggagggtggaggcaggaggctgggggagggggtgacagactgctctacaagcgtcaggattctggaaaaaaaaaaaaatggttccttacccaccccgcattctctgggcagattgccctgactactaacagggtctcccctctctctgagcagggactgatggctgaaaagagacgcccctcccccccttcgataaacgatgggaattcgaaaagcccacggagtctagtcactaaatagggtcaaaccggatcccggcgtttgggagaccaaagaggcccgcggggaggggtgactgtcggctggggaaatggtggggtggggagtggagatctcacctggaagccgaggaggcccgcaccacagtccattttctgagccatggctcctgtccctctggcaagagcggagcctgggggctgtgggagaggggcagggcgttatactacagagggcaaatacgaaggacctaattgggaggggggtgactgtggtctgactgtgcgggcggataaggtgaatgtgaggaggaacggatcggagcggtaaaagtgaatgggcgtccagatggaggttctgaaccccgagaagctactgacagggcgaagcttcaaatggggatcgggaagcagatgagttctgaattcggagcgggggtgcggttgggttgggattcgcatttgggaagttgcatggaggttttgagtcaggaggaatcatctaacagtacagatcgaggtcaaggaatctgaggatttcgaacgatgggagggatcggacaggggttttgaatcaggaaggatcgggaggggcattgaattggggtttggggggtggaaggggattcagaatccagggtgaagggatcgggataaaaaaaaatgggggcccgcaccagggggcagatgc

SEQ ID NO: 42257 - DNA, 1183 bp, Artificial sequence
  DNA replication origin
caggttgcaggaaatgggcatccggttggacttcatgagaactcacaccttggggtgtggagggcaggacaccatgagaggagtcccaccctgctgcaaaagatagaagaggagagttgcccccaacataaaagggaaggcagtgacagaaagaggcaagcagaggatggtggatggcagaacaaggactatcatcaatgacattttcttcactgagcccaccccagaaatgagctcccttcctgtgcgctctcacagctccttgtcgttgaatctcgtatcactgatggtaatttgcagaggaataattaagttggtgattcactttaggatgtactgccctccgaggctgaaagctaaacacatagagcccacgttacgcccagtaccacttaaggaactgcggattagtcactgggtgagtatcaggggaggggagggcggggagggtgaggggagggaacggcatagagagaaggaaaaagcaaaatgaggggaaaaccaggggaggacaacatgagaaaggaaagagggagagaaagggcagtgagggatatgggaactcggagggaggacaaagggaaagacaaggcatggaggagagagagcagagaggggagatgagaggtgatgacagaggctgaagtgaggtaggaagagagaggaaagaggaaaggagtgtagaggaaatggatgagggagtaaagagaaaggaacaaggggagaggtcctttaccaaagggtgattgatgagcagggggcaagaagaaggggcagcgagggagaaagggaaaggaggagaaaactgccagctttgagaactctaccctgcccctggaaagaggggatccccatcccaggtcaacctggggctccccatgggactatctcagagggaggagctggataagccaagaaagagcaaagggtgcacgggaccactcttgccttgctgcatgtgtcattcagggccttcccacccaaacagggggactggtcacatcaacagccacctctgctgaatccaagctctgcaccggatcctcctttcccctgccagatacgggtttcaacaagcaaatttaagggaatcactccccttcctgggatccctccctgactgtatcagttgcaacccctttcatggtcacagaggcctggcctctcccacaagaaccctatg

SEQ ID NO: 42258 - DNA, 1026 bp, Artificial sequence
  DNA replication origin
ctgccaggtcccgtctggggcacaccagaggcagcactggggccctctgtggcagcctcttgggctggggcaggtctcttggggcgcgggaaggccatgccactgacacctgccggctgagtgaaatcgaagacatcattctggcccaggaaggctgtgctgggccggttggcgtccacctccctggcacacggagcctgagagaaagcacaggcgctactagggccctcagtagcagcctcctgggccggggagcctgtctgggactgtgcggaggttgccggagcctcgggggcagccatcttactggtgactaacatctgggaggtctgcggagaagcaaggggtggctcaggggtgggcccctgagcctcggcggcgtaggtcgtgggctgggtatcctctcctgagacctgcggcgtggccacccggtggctagcgaccacctgactgaaggcggtacgggcagcggcggcagcggcccgagccgcacggttggaggcggcggcgcgggctacgttggcagcacgggcggccgtctcattggcaagtgtttccggatccagctgcaatgcctccaccagggtctgggccagcacagggttttccagttcccagggctcattctgcaaggccagagagaggggttggggaaggcaggccactcgacgacatacttgtgttagcttccctgtgctggccagcctcttcccagcagtcagccctgaacaccccaagaccttcccaaatcttcttcttccgagcaggggagggaaggcttgggaagctgggcagtcctttcccacacaaccctcctggctcccccctcctccctcccccattcacaggggaaaggcccaggccagcaggtgtccaggaaggggcctcaccgataagatgcgaaggcctggacccaagcttccgaaggctctgaggatatggatgtcaaagctggtgagggtgccatagccaccaaacgcaccgaattcttcatagtcgttgccttcaaccatctcttcctccccg

SEQ ID NO: 42259 - DNA, 1357 bp, Artificial sequence
  DNA replication origin
cccacacaaccctcctggctcccccctcctccctcccccattcacaggggaaaggcccaggccagcaggtgtccaggaaggggcctcaccgataagatgcgaaggcctggacccaagcttccgaaggctctgaggatatggatgtcaaagctggtgagggtgccatagccaccaaacgcaccgaattcttcatagtcgttgccttcaaccatctcttcctccccgacttcgtcgctaccctcatccatgtcttcaacactgtagctttccgattgcacgctgaagcttccctcagccatgctgcgggtcccagggagatgagagctcagcctgagagggagggtgaagcagctgcagggggagggggcgggatccaatgggaggcgggatctcccgggaggtgaggggcgacaatcatcaggttactaggcaatattaggcagtagggggcggggggggggaggaggagcgggggggagacggtttggctttctgatggggtagacctggtcagggacagagcccaaggaaagggacagaggaggtcgcaggaggcgccgcactgaaagcggagtttaggatgggcaggctcgccatcccagcggctagatttgacgagggggtgttctggagggctggggtccgaagagtcccaaagggaatgcattggggaagagagaaacaaagggtttggatttacgggccagagaaggggaccgggatgaagggggagcagatgggagagctcagacaacagggacagtggcaagccgcaagctctgcgaaacagaaccccagggacctttggctaggtccgggcggggggcctaggtggggctcagactcgagcactagaggcggatggagtgggggcctcagacctaggtgaggctccaatcggagcgctgcagatctcaaacgcgaggactgggcactccaggaagggggcaagcggtcagctcggttcgagtaatctaggagtggttggggtgggggtggggcctcaggtccaagggagctcagctcggagcacacgggtctgctaaaggggtgaggatcctgggctccggtttcagtagggctcagatcggggcgcctgggtctgatggtgatgggggctcctatctagaccttgggtctaatggggttccggttctgagtgcttgggctttgttcagatccggaggcggagggagggcgcagcgtgtcgggttccactcgccctctcccggtcctgtctggggctggatccttaccttctcgggaactccaatggcgtccgtcctcagcaccaggaaccccgcagccgcgccctcgcctactgctgccagcacagcagcccggaccaccccgcccc

SEQ ID NO: 42260 - DNA, 862 bp, Artificial sequence
  DNA replication origin
gagtggacccggtggagcaattctcatacctggatggacccacatagagccgcagaggctgggggcgaggcggggggaggctctgtctccctgtgtcctgaatgcggagcatgaacttaggccttctacagcacaaaccttgcttctttgggacagatgttggggtgggggaggcctgtcactcagacggaggaggcggtgcctctgtccccaggccagcaggagcaggaggtggactttggagtccggaagacccaggttcaaattttgcattttctgtttcctggctctgtggtctagttcatgcaatgtgtctgtgcctcagcttcctgacacgccaaatggggatgctgacatccacttcccagcgctgctgtgagaggaagaaaagccccagcacagatccctctgtgacatacaagctgcataaagggtagctgaggaagcagatgttcccagtatgtctgggggccagagagttggctagtggagaagcacacaaagcgaagtgccatcctctggccatgtccatttcgtagccccgcaggttgaggatttccacttgttgcagttagagacccagcttattaattgtgagacctcactaattgtgacctaaggggtcttgccggggaaacggggcatagtgtatcccagaccaggctggaggagtttgggtgaaagggcagggcaggacagagaagcattgtgcaaaagtggggggactgagaagagatgattgggtgggtcgagctgcactgcagggtatgagtgtgcgcgcccgcggtaggaggaggaggaggaggagaggtgaagtggatctggcgggaagagccccccgcaccctaccttcgaccccacc

SEQ ID NO: 42261 - DNA, 829 bp, Artificial sequence
  DNA replication origin
gagtagagagtggacccggtggagcaattctcatacctggatggacccacatagagccgcagaggctgggggcgaggcggggggaggctctgtctccctgtgtcctgaatgcggagcatgaacttaggccttctacagcacaaaccttgcttctttgggacagatgttggggtgggggaggcctgtcactcagacggaggaggcggtgcctctgtccccaggccagcaggagcaggaggtggactttggagtccggaagacccaggttcaaattttgcattttctgtttcctggctctgtggtctagttcatgcaatgtgtctgtgcctcagcttcctgacacgccaaatggggatgctgacatccacttcccagcgctgctgtgagaggaagaaaagccccagcacagatccctctgtgacatacaagctgcataaagggtagctgaggaagcagatgttcccagtatgtctgggggccagagagttggctagtggagaagcacacaaagcgaagtgccatcctctggccatgtccatttcgtagccccgcaggttgaggatttccacttgttgcagttagagacccagcttattaattgtgagacctcactaattgtgacctaaggggtcttgccggggaaacggggcatagtgtatcccagaccaggctggaggagtttgggtgaaagggcagggcaggacagagaagcattgtgcaaaagtggggggactgagaagagatgattgggtgggtcgagctgcactgcagggtatgagtgtgcgcgcccgcggtaggaggaggaggaggaggagaggtgaagtggatc

SEQ ID NO: 42262 - DNA, 1343 bp, Artificial sequence
  DNA replication origin
caaccctcctggctcccccctcctccctcccccattcacaggggaaaggcccaggccagcaggtgtccaggaaggggcctcaccgataagatgcgaaggcctggacccaagcttccgaaggctctgaggatatggatgtcaaagctggtgagggtgccatagccaccaaacgcaccgaattcttcatagtcgttgccttcaaccatctcttcctccccgacttcgtcgctaccctcatccatgtcttcaacactgtagctttccgattgcacgctgaagcttccctcagccatgctgcgggtcccagggagatgagagctcagcctgagagggagggtgaagcagctgcagggggagggggcgggatccaatgggaggcgggatctcccgggaggtgaggggcgacaatcatcaggttactaggcaatattaggcagtagggggcggggggggggaggaggagcgggggggagacggtttggctttctgatggggtagacctggtcagggacagagcccaaggaaagggacagaggaggtcgcaggaggcgccgcactgaaagcggagtttaggatgggcaggctcgccatcccagcggctagatttgacgagggggtgttctggagggctggggtccgaagagtcccaaagggaatgcattggggaagagagaaacaaagggtttggatttacgggccagagaaggggaccgggatgaagggggagcagatgggagagctcagacaacagggacagtggcaagccgcaagctctgcgaaacagaaccccagggacctttggctaggtccgggcggggggcctaggtggggctcagactcgagcactagaggcggatggagtgggggcctcagacctaggtgaggctccaatcggagcgctgcagatctcaaacgcgaggactgggcactccaggaagggggcaagcggtcagctcggttcgagtaatctaggagtggttggggtgggggtggggcctcaggtccaagggagctcagctcggagcacacgggtctgctaaaggggtgaggatcctgggctccggtttcagtagggctcagatcggggcgcctgggtctgatggtgatgggggctcctatctagaccttgggtctaatggggttccggttctgagtgcttgggctttgttcagatccggaggcggagggagggcgcagcgtgtcgggttccactcgccctctcccggtcctgtctggggctggatccttaccttctcgggaactccaatggcgtccgtcctcagcaccaggaaccccgcagccgcgccctcgcctactgctgccagcacagcagcccggaccac

SEQ ID NO: 42263 - DNA, 1039 bp, Artificial sequence
  DNA replication origin
ctggggcacaccagaggcagcactggggccctctgtggcagcctcttgggctggggcaggtctcttggggcgcgggaaggccatgccactgacacctgccggctgagtgaaatcgaagacatcattctggcccaggaaggctgtgctgggccggttggcgtccacctccctggcacacggagcctgagagaaagcacaggcgctactagggccctcagtagcagcctcctgggccggggagcctgtctgggactgtgcggaggttgccggagcctcgggggcagccatcttactggtgactaacatctgggaggtctgcggagaagcaaggggtggctcaggggtgggcccctgagcctcggcggcgtaggtcgtgggctgggtatcctctcctgagacctgcggcgtggccacccggtggctagcgaccacctgactgaaggcggtacgggcagcggcggcagcggcccgagccgcacggttggaggcggcggcgcgggctacgttggcagcacgggcggccgtctcattggcaagtgtttccggatccagctgcaatgcctccaccagggtctgggccagcacagggttttccagttcccagggctcattctgcaaggccagagagaggggttggggaaggcaggccactcgacgacatacttgtgttagcttccctgtgctggccagcctcttcccagcagtcagccctgaacaccccaagaccttcccaaatcttcttcttccgagcaggggagggaaggcttgggaagctgggcagtcctttcccacacaaccctcctggctcccccctcctccctcccccattcacaggggaaaggcccaggccagcaggtgtccaggaaggggcctcaccgataagatgcgaaggcctggacccaagcttccgaaggctctgaggatatggatgtcaaagctggtgagggtgccatagccaccaaacgcaccgaattcttcatagtcgttgccttcaaccatctcttcctccccgacttcgtcgctaccctcatccatgtct

SEQ ID NO: 42264 - DNA, 1501 bp, Artificial sequence
  DNA replication origin
tcagcaaggaatccaaactcgtgagcgagggcagaagaagacagcacacggaagaccttcgctgtgggagctgacgctggcagaggcgatgagacccacctggccagacggcgagacactcagagagcatgagagagagaagccgagggcaggaagcacgagtcaaactgccagtgcagtggaagctcagagtcggagaggtgagagatggctccagagactgggccttgaggggctgcagggtcaccgcacccccatgcccgctcttcccccacagagctgctcccatcctgcacccaccttttccagggtgtacgttgctcgttcaatgatctcagggaaatgttcatcatattctctgatgacatccttcagcatgtctgcaggagggggaagagttggagaaagcacctgggctgagcaggggtcatagagctgtagccccttggtcagctctgccgagggtgacgcagccaggaccccgtcctgtggctatggagggaccagccgtggcacgcaagcaaagggatgcccacagactaggggatggtgaagggggcacaggctgcctacctgcgcgcttgatggggatcttcttgtagtccttaatcatcaggtatttcaccaacttatttgcctggagaaggaggaacatgcggggaggtcaaggcatgggtgacagcagagacgtggcccacaagggaggagaggaaggagatgggggagggtgggcttcttaccctctcctgcagaagggtcacgttgcgggggggcaggcacagtacgtgccttgagggtatctgggacctcggggccatcgggggccgaggggccaactgagcccgcaccgtcaatgagggctgtgatgctctccaggtgggtgggaccgcgggagtctctctctcctcctcgctgctctcatactcatcatccaggtgcttggactgtatcatttgagagaggagagacccagggctaccaggctccccgtgccaaagcacccggcacgcacctcacccgtagcaggctcttggaaatgagagcagtaccagcagcggctggcatgtgctgcgtgcttactaagtgccaggcactgagccagcctcttctcccaccagtcctgagggtagggactacgtggagtgaaaacatgctcagcaaacttgtgttggagaaacatggactagctgagaggagaggaggggaggagaggggaggtgaggagagaaggaggggaaagaggagaagagaggaagaagggggagaggagagggaggagaggagcaggaaagggaggagaaggaaaggacaggagcaagggggtgtggaggtggcagggggcagggggatctcaccttcttggtcctcttgcctcccatcctggcccagggctcagcactgtgctgagcagtggcagcagctgcaccctccggctcagggatgctcgtggccatcttggccttggcagcagctgctgccacaacattctgaggctccaccc

SEQ ID NO: 42265 - DNA, 1212 bp, Artificial sequence
  DNA replication origin
gcaggaaatgggcatccggttggacttcatgagaactcacaccttggggtgtggagggcaggacaccatgagaggagtcccaccctgctgcaaaagatagaagaggagagttgcccccaacataaaagggaaggcagtgacagaaagaggcaagcagaggatggtggatggcagaacaaggactatcatcaatgacattttcttcactgagcccaccccagaaatgagctcccttcctgtgcgctctcacagctccttgtcgttgaatctcgtatcactgatggtaatttgcagaggaataattaagttggtgattcactttaggatgtactgccctccgaggctgaaagctaaacacatagagcccacgttacgcccagtaccacttaaggaactgcggattagtcactgggtgagtatcaggggaggggagggcggggagggtgaggggagggaacggcatagagagaaggaaaaagcaaaatgaggggaaaaccaggggaggacaacatgagaaaggaaagagggagagaaagggcagtgagggatatgggaactcggagggaggacaaagggaaagacaaggcatggaggagagagagcagagaggggagatgagaggtgatgacagaggctgaagtgaggtaggaagagagaggaaagaggaaaggagtgtagaggaaatggatgagggagtaaagagaaaggaacaaggggagaggtcctttaccaaagggtgattgatgagcagggggcaagaagaaggggcagcgagggagaaagggaaaggaggagaaaactgccagctttgagaactctaccctgcccctggaaagaggggatccccatcccaggtcaacctggggctccccatgggactatctcagagggaggagctggataagccaagaaagagcaaagggtgcacgggaccactcttgccttgctgcatgtgtcattcagggccttcccacccaaacagggggactggtcacatcaacagccacctctgctgaatccaagctctgcaccggatcctcctttcccctgccagatacgggtttcaacaagcaaatttaagggaatcactccccttcctgggatccctccctgactgtatcagttgcaacccctttcatggtcacagaggcctggcctctcccacaagaaccctatgggccagccagtgcgatgctctgtacatcgtatctg

SEQ ID NO: 42266 - DNA, 811 bp, Artificial sequence
  DNA replication origin
tagaacaagggaagacagatttgctgcttggagcatcagggaaatgtgtcattaccttggagaaatatgggataaggaactgatttctgttttattacattttgtataaaatgtcagaaacaagagcatgtttatagatgacagaagaatccagaataaagaaagaatgtgacaattcaggaataagggataatcactacaaaagtctctaccttgagaaggtagagggcatgggattcaggtgaaggcccggcctcaagtaggatcctgtcacttcctccagtggggcagctgagattacaagtgcaggcccactgctgttgggaagtggtgagagtttctctccaatcgctcctgttttttcaggggaatatcaaggaatatcatgagaagagttggtgctagtccttgtgggggctattgtagggagaggagagagaaggtacacttgtggagggtgcacattgtttgtctacttggttacaggggggcgggggaaggcagggggttgccaggcgagtagggaggaaggaaaatgaagagatgcgtttgaggagcgagagttaatagctttgagtaagctgggtaaggaaggtgaatggtgaggaacgcggttggggtcagtggacaggcctccttgaggctgaaggctgtggatgctgggacattggagagagggagctgttaggactggatggggtgctgcccatgatgagagtgcgggatgcaagaaatagacatcgtgaaggggcgcggtctttcctgaggcccagagcattaccgcgcgcggaggagacttaggtggggagga

SEQ ID NO: 42267 - DNA, 969 bp, Artificial sequence
  DNA replication origin
tctctgcccggccgcccatcgtctgagatgtggggagcgcctctgccccgccgccccatctgggaggtgaggagcgtctctgcctggccgccccatctgagaagtgaggagaccctctgcctggcagctgccccgtctgagaagtgaggagcctctccgcccggcagccaccccatctgggaagtgaggagcgtctccgcccggcagccaccccgtccgggagggaggtgggggggggtccaccccccgcccggccagccgccccgtccgggagggaggtgggggggtcagccccccgcccggccagccgccccgtccgggagggaggtgggggggtcagcccccccgcctggccagccgccccgtccgggagggaggtgggggggtcagccccccgcccggccagccgccccgtccgggaggtgaggggcgcctctgcccggcctcccctactgggaagtgaggagcccctctgcccggccaccaccccgtctgggaggtgtacccaacagctcattgagaacgggccatgatgacaatggtggttttgtggaatagaaaggcgggaaaggtggggaaaagattgagaaatcggatggttgccgtgtctgtgtagaaagaagtagacatgggagacttttcattttgttctgcactaagaaaaattcttctgccttgggatcctgttgatctgtgaccttacccccaaccctgtgctctctgaaacatgtgctgtgtccactcagggttaaatggattaagggcggtgcaagatgtgctttgttaaacagatgcttgaaggcagcatgctcgttaagagtcatcaccaatccctaatctcaagtaatcagggacacaaacactgcggaaggccgcagggtcctctgcctaggaaaaccagagacctttgttcacttgtttatctgctgaccttccctccactattgtcccatgaccctgccaaatccc

SEQ ID NO: 42268 - DNA, 1192 bp, Artificial sequence
  DNA replication origin
gtctcccatgtctacttctttctacacagacacggcaaccatccgatttctcaatcttttccccacctttcccgcctttctattccacaaaaccaccattgtcatcatggcccgttctcaatgagctgttgggtacacctcccagacggggtggtggccgggcagaggggctcctcacttcccagtaggggaggccgggcagaggcgcccctcacctcccggacggggcggctggccgggcggggggctgacccccccacctccctcccggacggggcggctggccaggcgggggggctgacccccccacctccctcccggacggggcggctggccgggcggggggctgacccccccacctccctcccggacggggcggctggccgggcggggggtggacccccccccacctccctcccggacggggtggctgccgggcggagacgctcctcacttcccagatggggtggctgccgggcggagaggctcctcacttctcagacggggcagctgccaggcagagggtctcctcacttctcagatggggcggccaggcagagacgctcctcacctcccagatggggcggcggggcagaggcgctccccacatctcagacgatgggcggccgggcagagacgctcctcacttcctagatgtgatggcggctgggaagaggcgctcctcacttcctagatgggatggcggccgggcagagacgctcctcactttccagactgggcagccaggcagaggggctcctcacatcccagacgatgggcggccaggcagagacgctcctcacttcccagacggggtggcggccgggcagaggctgcaatctcggcactttgggaggccaaggcaggcggctgggaggtgtaggttgtagcaagccgagatcacgccactgcactccagcctgggcaccattgagcactgagtgaacgagactccgtctgcaatcccagcacctcgggaggccgaggctggcggatcactcgcggttagaggctggagaccagcccggccaacacagcgaaacgccgtctccaccaaaaccagtcaggcgtggcggcgcgtgcctgcaatcgcaggcactcggcaggctgaggcaggagaatcaggcagggaggttgcagtgagccgagatggcagcagtacagtccagcttcggctccgcatgagagggag

SEQ ID NO: 42269 - DNA, 1407 bp, Artificial sequence
  DNA replication origin
agtgtcttcccatggcctccggaagcattcggcagtccacaagccacgcttcagagaagccgctccgggaacgccgcggcgcacctccggaagggatgacctccacgccttctcccctcgcagtccacccgagcggcgtgggtcgcgagaagccacccaaccgctccgtcttccggctccggcggtccgcggcagccaatcaaaggttcagtttctcagcggcgtcgcatccctgtgacgtgagcacatcctcgccggcgcccccttccgcgctgcggcgcctctagcccgccggagggcggctcctctcgatggtcttaacccttcaattacgagcgggcggcgctgcgtttccagggcagaggaaacgaggcgccgcgttggcgcttggacggcgggaaccggctccggagcgagaacgcgcgtgagagagcccgagagagacggagagcgagcgagcgcgcgggagagactgagagcgggggggtgggagagagacttccagagagacagagcgagaggccgagacggaggctgtccctagcacaggccagggtgtcttgggactcgaatccctgggttgggctggccgggagtggggctttcgaaggaagcgggtgattttccacgtcgtccatatctccccggtgtgggaatggcggtcgtgcactctgggggtggcgttgttctcgttccctacttgggggtggcctttttcagcggagaaagaggatgccgcgggcattggtagccggcgggactacacttgggctaggatcagtgttcagcgggttcagaaatcaccgtgtccttggcatcacctccctccccacctcctctcccatcgcacagcaggagacagtgactggagggttttcaaggaggactgcattgcccctattgaaacaaaccgtccgacaaaccctttctccgacgtgtgacagagggacggtcgtaatgtgaaatacgactagacatgcgtttaatgggcggtgtgattgctgcattcgtgcgcaatgaatggtccaggccatttgtgtccagtagccgcacaagctgcagggtctcatgtttagagagggagggcctctccgccgtccaccttgctggagtacaggcgaccctgggcggtagccctctccgccatcagaaatgtggtgctctgagtagccacagattcccatctgcatctccaataccatttccctctactcactgacccgttgggtgcgttggatttgtgcgtgggtgtgagggtagtttggtgtgtttgcttgcaaatggaaaagcgaatggccttggttggctgagcttatcagggcactagcagtggagagagaaaggactactgtattcttaggagcagaatctcaacaacttcctataaaacgggcagtgtgtcttacc

SEQ ID NO: 42270 - DNA, 1358 bp, Artificial sequence
  DNA replication origin
cccatggcctccggaagcattcggcagtccacaagccacgcttcagagaagccgctccgggaacgccgcggcgcacctccggaagggatgacctccacgccttctcccctcgcagtccacccgagcggcgtgggtcgcgagaagccacccaaccgctccgtcttccggctccggcggtccgcggcagccaatcaaaggttcagtttctcagcggcgtcgcatccctgtgacgtgagcacatcctcgccggcgcccccttccgcgctgcggcgcctctagcccgccggagggcggctcctctcgatggtcttaacccttcaattacgagcgggcggcgctgcgtttccagggcagaggaaacgaggcgccgcgttggcgcttggacggcgggaaccggctccggagcgagaacgcgcgtgagagagcccgagagagacggagagcgagcgagcgcgcgggagagactgagagcgggggggtgggagagagacttccagagagacagagcgagaggccgagacggaggctgtccctagcacaggccagggtgtcttgggactcgaatccctgggttgggctggccgggagtggggctttcgaaggaagcgggtgattttccacgtcgtccatatctccccggtgtgggaatggcggtcgtgcactctgggggtggcgttgttctcgttccctacttgggggtggcctttttcagcggagaaagaggatgccgcgggcattggtagccggcgggactacacttgggctaggatcagtgttcagcgggttcagaaatcaccgtgtccttggcatcacctccctccccacctcctctcccatcgcacagcaggagacagtgactggagggttttcaaggaggactgcattgcccctattgaaacaaaccgtccgacaaaccctttctccgacgtgtgacagagggacggtcgtaatgtgaaatacgactagacatgcgtttaatgggcggtgtgattgctgcattcgtgcgcaatgaatggtccaggccatttgtgtccagtagccgcacaagctgcagggtctcatgtttagagagggagggcctctccgccgtccaccttgctggagtacaggcgaccctgggcggtagccctctccgccatcagaaatgtggtgctctgagtagccacagattcccatctgcatctccaataccatttccctctactcactgacccgttgggtgcgttggatttgtgcgtgggtgtgagggtagtttggtgtgtttgcttgcaaatggaaaagcgaatggccttggttggctgagcttatcagggcactagcagtggagagagaaaggactactgtattcttaggagcag

SEQ ID NO: 42271 - DNA, 1305 bp, Artificial sequence
  DNA replication origin
tgttggggaggggatggacgccagaaagagggggtggggtggagagagaggctggcctgatagccgtgtcccgggttttagatccgggttgaggagggtggctcagagcatccgaggggggtcctcatgcaaaacgagggcaccaagggcctgccagagggaccctcctggcctgggaaccaccccggtgcacacaaatccaggtcccacgatgctggggacacccagcctggatagagcatcagtggggagtccggggccctaagctggaccccatcaggcctgtccgtcccccctctcctcgatttgcacggtccctgcctcaggggcgggcggaggaggagggaggcagggagggagagggagggaaggaggaaggctgagcaggcagggagactcccagctgccagcctggtcctccctggggcggggcggggagcgggggggggggcggggggtgctggcgaggccagggagcagccggctggctgactgggtggggacgctggcgtggcggctgtgctgccaggacaatagctggctggggaagtcaggctcgggcctttctgagatgctcgagagaggcatgagtggaggtggggagagatggccaagaggctgctgagagagcaactcacatgggctacaagtgcagaggaggcagggcatagaggacgctaggatctgggtcgggacaaaggtccggcgaaagtttctcaaaagctttgggctgggaggcatgcttagggcccggagaggtgggattcataaactgatttagaatggggttctatgggcattttccctgcaaggcctggaggttggctggggggttggggtgggaaaggagcgctgcccaactctgaacagcccctctcaggatatctcctgtgccatccccactttctcggggccagcagacaggcagaacccatacttaaagccatgtcccaggacaacagaataggagaggtgaggagaacgcttggtaggcagagatatgaagacaaggaaaaaaatatttgtttcaaatatgattaaattgggaccaaatgatgcttcagtggttcccctaagttacagcattcaagaattcaaattatcttgatataagaaattgtgttttatttcctttcttccttcatccattggttccttcatttatgacaaatggttttatgttaggcccagtgctgggcactaacagtaccgggtgactcagacctatgctctctgcccttaggaaatgcaggctctgctaccagactgtggacctggaacccacttgcatctgaatcccctgga

SEQ ID NO: 42272 - DNA, 856 bp, Artificial sequence
  DNA replication origin
gccagtgacactcctgcttctgttgccgtggatacagccgggctggtctaaatcgcaggcatcagggaaagcaggcaccggaggggtgcactgggtagggctgggggtgttggggaacaccaggtgggcagcacacagccttggggtgtccaactagctggcaggtgggggtcccggcaggtgcttcctccactatacactcccactcccatcttcatgccactgccaagctgggaggggggccagtgctggcccctgctacccgtctgcctgcctggctgccggtccccctaccccccccaccccccaccccccccctccgtctgcctgctggccgccgccttttgtcctcagaagacacggtccccgcggggcctctgccaagcctccagcagatgctcagggtccggggctcctccctgggagcacacgggccatggcctgggagagccccaggttgggggggctctcatccaggctcaccccgctccccgggcctggcggggatggggaagaggtgcaggtccacagccagaggcagcagcagaggtggtgttggggaggggatggacgccagaaagagggggtggggtggagagagaggctggcctgatagccgtgtcccgggttttagatccgggttgaggagggtggctcagagcatccgaggggggtcctcatgcaaaacgagggcaccaagggcctgccagagggaccctcctggcctgggaaccaccccggtgcacacaaatccaggtcccacgatgctggggacacccagcctggatagagcatcagtggggagtccggggccctaagctggaccccatcaggcctgtccgtcccccctctcctc

SEQ ID NO: 42273 - DNA, 1121 bp, Artificial sequence
  DNA replication origin
gttaatacttctcatttgtagagaatgataagtggttatgggcagagcctccctcccccaccccactccagtcttctttccctgcacttgtccctgtttgtgcgcacacacacacacagaaccttgagcccccatgagccagcagaggcctggcttgcagcctgcagcctttctggccctggtgatgtatgtgtctccctgttgaggggagacttggcaagagtttggcctgtggtcagtggttggcagggcctggagatgaggctgaagctcctgagatcacggggcttcgggtagagctggggtgtggcccatgcagcagccagacctgtgagggacgcgtcccagggagctgctcacctagagcctggggtgggggaagaacggggtctgctggctgatttcagggcatggagatgtgatgggacacagagtgtggggtcggtggccaagggaagaggaggaatggggaaagactgaggcccagaagaccatctctgtgggggcagggaggggggctttgaggcataaagtagacttttctgaagaagcatttggtgtgggagaggacctggtctgtggtctggaggcctctgggcccgagcgtggttgtatatatgctactgaaaatgtgtggctgagtgtgtagtctgtgtgtgcatgtctgttcatgggcagtgtggctgtgtatgaacctgtgtgtgtaagcaggccgtgtgatggcatgtgtgtgagtgtgtgggtatctgggtaggcttgtgtgtgtactgtggggtgggcatgactttgcatgtctgtctgggtgatcaaatggacatgtttgattttgagcctgagtgtgggtgtgttttctctgagccatcaggcctgttgaatgtctagttgtatatgtgtgtggcatcagtttttctttgagtgtacgtgtctggttgtatgtgtatgagtgtgtgggtttcagaatgcctgggtgtgcatgcccaattagatgaatgcctagttgtatctgcttgtgcatattggtgtgtgctcatgagtgtaggtgcatctaaagggtgtgcttgtgagtgttaagggcatatatgtgcatgtccatgcatgtatgagagggtgtatatgtgtgt

SEQ ID NO: 42274 - DNA, 2690 bp, Artificial sequence
  DNA replication origin
agttttcactgagaggacccaaattatgccatccaggcagaaatctagatgtgagtgtgtatatataaaagtgaaagtatcttaatagagtgtgtgtgtatgtgtgtgtgtgtgtgtgtagactggtatatctggtgagagagaaaggatgtggtctgcatgtgtgtaagagagagcatgggccgggtgcggtggctcatgcctgtaatcccagcactttgggaggccaaggcgggtggatctcctaaggtcaggagtttgagaccagcctgaccagtatggtgaaaccccatctctactaaaaatacaactgggcgtggtggtgcatgcctgtagtcccagctacttgggaggctgagacaggagaattgcttgaacccaggaggtggaggttgcagtgagcccagatcatgccactgcactccagcctgggcgacagagcgagactccatctaaaaaaaaaaaaaagagagagagagcacatgggtgtatgggtgtttctgggtagggtgtgcgtgtgaggcatttgggtgtgtttgggattgggggggtgagtgtggttgtatgtaaagtggcctgtgtgtgtggaggatggtatgagtgagagttgggttggggatatgggtgaggatgtgtgtatttgaggggtgtgtgagtatgggtttatctggatggtgagatagggtgggggatacctgggtggcgtatgtgtttgctggtgtggctgtgtctgtactgtgtgtgtaagagagtgtgggtgtttcctgggtggagtatgtatatgagggagtatgggtatattggggtcagggagatccaagtgtggttatatgtggatgatatgtcagtaggtgagagcacaagtgtatctaggcaatggaagtgtgtgatagggtgtattgtgatggtgtgcatgagaaagagaatttgggcacatctgggtgagggtgggggtgtatataattgggggtgtctatggagtgtgtgtatgggtggtgtgtgtgagacagtatggatgtatctgcattgtgtgtgtgcagtgtgagtagatctggctgatggtgattaagagagaattgggggtcgagattgtgtttgtgtgtgagagtgggggtgtttctgagtgtggtaggggtgtgagcacgcatgtctcctgtgggaagagcatgtatgtgtatctggatgaggtgtgagagtttgggtttaactgggttggaggagagtgtggatgtatccagatggtgtgtgaaagagaaagtgtgtaggtacgtttgggctgtgtgtgagacagtgtgtggatgtattgggggtggagtgggtttgaatgtgggtgtatctggatggtaggtgagtgagagcacggatatatttgggtgatggagtgtgtagtaaggtatgtctggatggcgtgtggtgagagctttggttgtatctgggtggagagtgcaggcgtatacgtacttgggtgtggatgtgaatgtgtataactggatgggttgtgtaaaagagagttgggggcacagctgagtgggaagtgtgtgtatggagtgtgggtgcttgtgggtggtgtggaggagatgagagcatgggtggatctggggagtggggcgtgtgcagaggtgcactggatggcatgtgtgagagttggatatgtccaggtgggttgtgtgtggatgtagttatacctgggtggtgcatgtggctttgagtggatctccatggtctatatgggatgaatctggatgatgatatatgagagggtggatgtgtctgcatggggctgtgagagtggggctgtatttggagtgtgcgtgtgctgtaagagtggggctgtatttggagtgtgtgtgtgtgtgtgtgtgtgtgtatgggtatgagaatgatgtgtgtgtctgtgtgtgtggatgtatttggcttgggaatttgtgagtgtgagtaattggatggggtgtgggtaagtgtagtgcctttggaaggtatgtgtgtcattgtgggtgtgtcttaatactgtgtgtgagagagagagagattgtaggtgtgcctggttcaggtatgagggctctgagttggggtggggtacaagtttgaatgtatctgtgtgatgtttgtgagagtgtgggtgtactgaattgggagtttgcataagtgtggagggcctgtgcgtgtaagtgcatttgagatgcgtgtatatgagaacgggagtatttagatgggatttgtgtgagagggtgtgggtgtatcagtgttgggtatatgtatgaaagtaggtgtatttgaggagaatgtgggcacatctgagttggagtatgtgagagcgtggggtatatctaagaccgcgaagacctataggatgtgagcagggctcagcctatgtctgaacgtctacatggctatgaatcaggatgtgtatatctaaataggatgtgtcatctctgggtggtgtgagagtgtgtgggtgtgtgtgtgagtgtgagtgaatctggggggtgtgcatgtggctgcatccggccacatgtgtgagtatgtggccagcatgtgagtatgaggatagcatgtgtgagtatttgggtgaggaatatatctgagaatgtgagtgtatctgtgtgtgagtgtgtaggtggtatatctggaggttttgtgtgttcaataatgtggttttttctgggtagggtgtgtgattgtgggcatgt

SEQ ID NO: 42275 - DNA, 1422 bp, Artificial sequence
  DNA replication origin
accggtgcgactagcggcagcgacgcggctaaaagcgaaggggcgagtgcgagtcccctgagctgtacgaacgcggtcgccatggaccgcccagatgaggggcctccggccaagacccgccgcctgagcagctccgagtctccacagcgcgacccgcccccgccgccgccgccgccgccgctcctccgactgccgctgcctccaccccagcagcgcccgaggctccaggaggaaacggaggcggcacaggtgctggccgatatgaggggggtgggactgggccccgcgctgcccccgccgcctccctatgtcattctcgaggagggggggatccgcgcatacttcacgctcggtgctgagtgtcccggctgggattctaccatcgagtcggggtatggggaggcgcccccgcccacggagagcctggaagcactccccactcctgaggcctcgggggggagcctggaaatcgattttcaggttgtacagtcgagcagttttggtggagagggggccctagaaacctgtagcgcagtggggtgggcgccccagaggttagttgacccgaagagcaaggaagaggcgatcatcatagtggaggatgaggatgaggatgagcgggagagtatgaggagcagcaggaggcggcggcggcggcggaggaggaagcagaggaaggtgaagagggaaagcagagagagaaatgccgagaggatggagagcatcctgcaggcactggaggatattcagctggatctggaggcagtgaacatcaaggcaggcaaagccttcctgcgtctcaagcgcaagttcatccagatgcgaagacccttcctggagcgcagagacctcatcatccagcatatcccaggcttctgggtcaaagcagtatccttctaatcgatactccgtaggtcagaagcccgtgacaggaaaggggaaggtgggggagggacagaaaaggtaaagcgggtggaggagagccagaggtgggcatgatccccctatcggaagacggactagactgggtggaagagggatggaaggaggagggcaaaacagcagagaagctggactggagatgatgaagggtggtggagggggggcggacataaaaactggaccacagatgggaaagggggaagaggaggaacatagcattaaaaaaaggatcacagatgataaaaagggggagggtagtaaaggggcacacagcaaaaaaattggaccagagatggtgaaaggaggaggggaggggcacgtagaagatgaactgactcagagaccttgaagagggaggggaatggcacacagcagagaaactgcccagaaagggtgcttgagccatacaaggctctgtaaacctagatttttgcttaagatactaggagaccccaatcctggctggagtgccttgcattg

SEQ ID NO: 42276 - DNA, 866 bp, Artificial sequence
  DNA replication origin
agcttcattttgtagcccatggagatatgtctgagatcctgtacctgctccaggtgggggtgatggtggaatctgtcccccccccaacacaccacggcccttcccacccacctcccgtcacctccaagaaccagattcgtgcccgatcctactaaaaaatgtctctctggcctgacctgcagattggtcaagtagcggaaaatgtcttcatcacgtcggttgatcaaaattgaaattctggggtggttgaggaactgatgagtggagcagtttaggtcaaggattgactattccgtgaaagggagggagggaaggccaggaagggcacagtaagagaggctggagcatgaggattccttctgtgcttatgtggtgtgtataaagcaagtgagtcatgggacataacccatacttattcccatgataaacctctatgttaggtggccctacagggtgtcgacaatccatgtgcatgtggtatatgtcactgggtgctgaaagcttgtgttcacaaaatgcacgtctgggggcttaagggccatgtccaagtgatgctgtaactgattgctgagggcctgtggtcacgttattgtatgtatgggtgttgaaggtccatgtccacatgatgtgtgaatggctctgatggcttgtggtcaagttatgccatgtgtctacatgctgaggacctgtggtcacataatactgtgtctaggagctgaggtcctatgtctaaatgatattgtatgcctgggtgctaagggcctcttaccatgtgctgtttcatatgagggctaagggtctgtatccacataattctattaggatgttcgactcatgttcctaacatgttacatgtatgtgtatgt

SEQ ID NO: 42277 - DNA, 1862 bp, Artificial sequence
  DNA replication origin
aggccctcaccactccccagcgctggagcaccctgagtccaggcttcaagtggcaaggatcctcgaatctggaaggaaaccccatggcaactgctgggggtgagaggacgggtcccaaggcagggaggacatggggaggaggacattgctatgtgtatatatatttttgaaaaaaccgaggaagcaaagagggtgcaaggtccctctcctgtggctccccagactttcctgttccccagctcactctctccattcatcagaccacggtgctgatccggcttggcttggccttggggtttgcactgggggggttggctgtgccagggggcccagaggcgtgcagcgggccatggggggaggtgggtggaaggggtgagtgcggggtgtgaggggagggtggggggaggggtggataggaggggtggggtgggatgggtgagtgtggtgacaatggtgactgggggtggtgggggtgggagtaggagccccctggtggccgggatccagggcccccagccgcgcctgctgctggcatcatctgtgggtggtggctgaagatgaagtgcttagggccctgtttgtgggctggagggtgctggggggcaggactgtacaggggcagtggggatgtgggctggtgcagggggtggcggccatgtggagcaaactgagggtgtcctccagccccccgtctgggtgccctgcctggccggcccaaggtatagtgttggggccctgggactgggccatgggcgtggaagtggcgatgtggccccacaggtggggctgaggcgggaggcggtggaatggagcccagctggggcaagggtgggggctgctggggaggtgggggaagagagggctgctggggtgggaggtagggtggcggggcagggcccggtccttggcaatactgggcatgcagggcctggagcttggactgcccatcaggcagcacccccaggccaccgtggctatggccatgatggtggtggtggtggtggtggtgcgtggaagaagcagatgaagaggaggcagaggcctggcctgttggcggtggtggcatctggaagggccccttgccccgcttgcttccaaatagggagcccaggaaggatgaggagttggagacgggcctctggctcttgtactcctctggcggcgggggtgggggcggaggtggcatcctctggtgagggcgtggactgctaataacagacccctggaagcggggaggggggaagtcaggccaggctagatgccctaaacccccagccctaaattccacccctgtccctgagggctggagctggggagacagcaaaccccaagttgtaataaaaaccaaatcacagtccggtacgcgtatgtggagctccccagcttgcaaagctcggctgtcacatccactatctcagctgagcctcagctgggagaggagaaattagcagtacctcctcctcatccccattttgcaggcagggaaaaggttaggcccagagaggcagagtgactcgcccagggtcaaagagcaggacttggaggtaagagcttctcgtggcccaactccaagggcatccctactcgccgtcggccctggggttgagagggggcacgggagagtggaagacagactgagagacaggcagaatgaggacagacagagttgaggacagatggagagagtggttggctgggagaggcagccgcatggttcccagcagggaagagggggagcaacaggtcccctcctcctctgggtctccatggccggggcagggctcatgcagaggacgagtggggcaggagctggcacttacttcgatggtgctgtccagcgatcccacgctgttacgccgccc

SEQ ID NO: 42278 - DNA, 1046 bp, Artificial sequence
  DNA replication origin
tggtctcattggaattgctggagctctcaaggctctcgttatctccaccatcagagttctcgcctgctgcctcgcacttccccaacctccgacccccagccacaccactgggcccagtgccactgttgggggctggtggcaggggccctggtggggctggggctgggccttcaggggctgggtagtggcggtgtgggatcggggccctgcctggtggccccttgtgcttcagggtcccatgggggctgcagccatcagcctcatacaccagctggcggtggacagagccgcgatctgagcggtcactcaggtccacggagctgtcactaggaggctcaatggtaagcaggggaaggtgggcagcccgcagccggaaatcccggcactccaagcacccgggacccctgcgagtgccttcctcacggctaccgtcttcccgggttcctgatggcactggtggaggaactggcgggagaggggctggcgcccagaactcgggccggccctggggtgggggttctgtgctgggcagtcgctcaggggattgttggggaactgtgtcatccaggtagaggggaagatcactgaaggatgtggctgagctgtcctcttgctgttcctttgactcccgcttctccagctgggctgaccctggctcctcagacatgggccctgacgggtggcagttcagggcttcgtcgatggattcagccagagactttacctgtgcaagggggggaggagaggagggaaagggagagaaaagaaagaaagataaagggaagaatggtggaaggtgggaatgagggagggaggtaaggaaaaagggggagtcttcctggtaggtcagcaaggagggtggattcccctcccccagccctgacaggctctctgtggtctgtaaaatgactcccagggaaccattgtgagctcacaggagctgagactaatgcccacaagttccccactcagctcacaccccaatacctcctttgtgtccatttagactcaagccaaacgttacctcctccctgattcaagccaca

SEQ ID NO: 42279 - DNA, 871 bp, Artificial sequence
  DNA replication origin
gaaggctgtgaggggtgaggaggactggggaccaggcagagccttgagggaaaggagtctaagaggatcttgccgtaaaggcaggggggctggaagggaggggacttgggtgggagtggggagacgtccaagagctaggactcaccgtggcctgtaagtgttgggtccctatatctgtgaggaagctggggtggatgggatggggggcagggatctggctcacccactctcagtatggcccagtaggcccctgtcctgtccccacatcctggctcatcttatctcatccccacagtgtggagggtgatgccccaggcagtgacctgagcacagcggttgatagtcctgggagccaacccccctaccggctgagccagctgcccccctccagcagccacatggggggcccccctgctggagtgggccttccctgggctcagcgggcacgcctccagccagccagtgtcgccctgaggaagcaggaggaggaggagataaagcgctccaaggccctatcggacagctatgaactctccacagacctgcaggacaagaaggtgcaacagaggcatctggttgggaatgggagtcgggatgcaagagagcgccaggggagggtttgggatgtggctcttgggggtggtatcagggagggataatgaggctggaattggagaagactggcccaggacccttcaccccactggggatgcactcattcaccacccatccactgaggcttgtattcactcaagaaacatttactgagctccctgcccgggtcctggcgatgtaaagatgaatgagtcctggatccagtccccaaaaaactcagtctaacaggaagaacacacatcagttgaccttttca

SEQ ID NO: 42280 - DNA, 988 bp, Artificial sequence
  DNA replication origin
gcccgactccttccctgtcttccccacctctgtggctcttcaccgtgcaggctcggctcaaggcgcctgggctctgtcgccacctgggttccctggcagcctggttgccatggcaccatgggagcagttctggtggaacaacagctctgggaaaccagggcaggcaagacccggggcccagctcctgccacgcgtggagactcccctgcccccttcccccagctgagcagaggaggccatgaggagaaaaaggaagctgccccgcagggctgctctttacctgtgaggatgctggatgggaggcgcctcccactgttgctgctcgccctgccctgctgctggccctgccctcgcaaccagggaaccctgggaactggcttggcctggcccggagtccaggcaccagggggcaggggccaggctgcaggggacagggctgggcggatgaggggagagctgtgtgcaggggtgggcctcacacagctgggacagggctgggagggggtggcgctttgaaggagctagtctggggtggtgctgggaatcggactgggagggaaatcacagcgagcactgcgttggggacaaggccaggaggggatggagctgtaaggggaagaggtctgtggggaggggtggagctgtgagggggcagaagaaagggcatgaggagacaagactgggaggagagtggtctaggggagaaggctgtgaggggtgaggaggactggggaccaggcagagccttgagggaaaggagtctaagaggatcttgccgtaaaggcaggggggctggaagggaggggacttgggtgggagtggggagacgtccaagagctaggactcaccgtggcctgtaagtgttgggtccctatatctgtgaggaagctggggtggatgggatggggggcagggatctggctcacccactctcagtatggcccagtaggcccctgtcctgtccccacatcctggctcatcttatctc

SEQ ID NO: 42281 - DNA, 1609 bp, Artificial sequence
  DNA replication origin
ttgagcccttactgggtataagacctgacgctaaatactgtgagagatccaaagtaagacagaggccaggtgtggtggctcacacctgtaatcctagccctttgggaggctgagacaggcagatggcttgaggccaggagtttcagatcagcctgggcaacatagtgagatctcatctctacaaaaagatttttttttttttttaagcatgacagtggctgtgtcctctgcgagctctccatctcccaggggagatgagagatgagaaatcctttgggaaagtaggaaggatgcaaagggttaacatgattggacaggaacggcttcagtaatgagcacattttgttcctggcccagagaggaaggagatgtcaaggtgggtggggaggtgtggtgtccaggagggcttgctggaggaagaggtgcaagagttgagccttgaaggctggtaagggtttgaaaaggtggcaaggggtgagaaggcattataggagacagggaccgcatagacaaaaacctgggggagcgctccagggtcatgcaggggaatggtgggtacattactctgtttattctgctctccagggtgtgtgaatgtaggtgacctggggctggggacgaggagaccattctacccttccgctgaatggagagagaagcaagtgtgggggtggggacgggggttcaactacatggggggagggggcaagtcagggtcagatgaccctcccgacccgtgggcaactgaattggctgaatcgggcagagggcttgtgctgtgggaagggggtggggttttgatcagccgtgagagaaatatgtgtgcacgcatggcctccatgtggccggccatcctcacacatgtctttgcacaaggctctgcaggtctcacagttgtgagactgtgcacactgctgcagagctgaggaaatgtgatgatgtgagactgggtgtgaggaattctgagtgtgaggttgattgtgtgaagtggtgactttatgtacctggcagccttgatgtctgtgtctggtggatgtaatcacaaggctgggtgtgggtggcttttaagcacgtgaggctgtggcctttagggtgacagttgtcaggcaggatggtcacacacacacagacacacgtgatttctacctgtggtcttcgaggacccagggtggctgctgagtaactgctgtgtgcttagtactggcatgagtgccataggtccgcaaaggtgaatcacaccgggccgctgcccttgggaaacaggacgggggtgtggggtgggagacggacactttaagagagaaccacaagttagccaggaagaaagactgactgtgataatatgggtatgcataagacacaggggagggagtcactgaccctgtcatgttccgtgagcggcaggagtgagtcagcattgacttcccagaaggaccaacctgcccagggtactgcaagatgaagatgagctcacccagatcaagcaagtcggggggtgaaggggagacagaagacattctgggcagaagaaacaaaggaagagtatgagcatgggcttggttatgtggatcagcttgctgtagtctaggaattgcaagtaacctgctat

SEQ ID NO: 42282 - DNA, 993 bp, Artificial sequence
  DNA replication origin
gcagagggcatggggtgaggccttcaagcagtggaggagatggcagcaatggccacagcaagggaacaaacgacagggaactaggcaggctgggtcctgcccccgtctggtcctctgagccctaggcaccctgcatctctgtttgtgctcacagaggacagaggtaggtccttgggatgtcatttggagacctctccagtagtggcaggctccagggtgcctgggaagtgggagtgcgggtacgggaggatccaggttccaagctccaagctccaagctctgcttctcccacattttagtcggacctagggctccagctctctttaattcaggggctggagtccagaggagacagcagtggggatgggaattccaagaagaaggtggggggaggaaggggcacgatgcttgcccatctggttcctgaagcaggggacagggtcccatgggggaatctgcgggggggtgggtggggggaaggaggggctggttaaggcttttgcttctgcatagaaaatggcccttgtcctctcagttaccgagaggagggactactgcactcggaggccggacagcagaactggtgagcgtcttcctcttcctcttcctcagtctcctcctcctcctcctcttccctggggccaggaagggcggggtagaggccacaggcggtgggtgacagagagaggcagaggcattagtttgcagagcaggggagatacgcgaagggccaggaccggaaccagaaggtgggacgagaatgggggtcagggtggggaggccagtgtgatggattatccagggtcacacccaactcagtgtgctgggacagccctcccccacacccagcctgggctcagtcttaaggtcaccctcagcgtatatcaactccctttctaaccctgccaggtgcctgaccctcattttaatataataacagcaacctgctctcattttgcacgcatcatctcacttagcccctacaacagctct

SEQ ID NO: 42283 - DNA, 1317 bp, Artificial sequence
  DNA replication origin
tctgtttggggagcagcagggagaccagtgtgatggggaaaaggctgaagaaggagtgagaggagtagaagatgagatggtaggggcaacatcacagtctatcttttagagctatttaggaggtagagtccacaataattggtgactgacttgctaagagggcaggaagaatctagggtgactccaaggtatgttttgggctcaggtgactggatgaatggtggtgccttaaggacaatggtgagatgctgagtcagaggtccctatgagagctgaaggcccaaagggccatcctggtagagctgtccagcaagcattgggctcgacgggtccgggacccaggagagggatctacacctgaagttatgaaatggaatgagatcactgaaaaagtgtggagtgaaagagaagagggccagagcagaattgggaaggggaaaccaacgcgtagggaaggagcccaggaagaaatgggggcggggtcagagcagtaggaggaaaagcagtgggggtgggctcacagaagcagaggaaggaaagggccatgcagaggagggccttgttaagagtgtcaaatgttgcagcctgggctagtaagccgagggcggaagagagtctattggctttaaccatcaggagggcctgggcgaccttcctcagaacagcttccatggagtggtgggcgcatgaggcagattggagtgggtcgaagagctcgtgggaggtaccgaagtgaagcagagatggccagtgtagacgggtttcttaagaagaagcttagctgtgaagaggagagagggacagagggggatgtgggggcagatagagggtttttattcccagatgggagagacttgagcttctataaatgttgataggaaggaggcaacagagggggagaggttgaaaacgcaggagggagaggggatgattgttgtggaggaggtaatggggatgggctccagagtccaggtggagagactggccctaaatgctagaggggccccctctttcttacagaggagcaaagcagtgatagtggtggggatacaagggtattgggggattggtgaaagaaatgcttcaggaaagttcaaagcaacaaatggagagccctggccaagggaacggatgctggagctggaaggaagcagagaatacttctggctaggacttccttaggaagtggcacttgagctgggtcaggaaattcagaaaggatggtaataggcaaagatctgtgcagagggaagagtattctaagtggaagaaacagaatcagcacacacatagagatgtgaaaaggccaggcatgct

SEQ ID NO: 42284 - DNA, 947 bp, Artificial sequence
  DNA replication origin
acgaggtcaggagttcgagaccagcctggccaacatggtgaaaccccgtctctactaaaagaaaaatacaaaaatcagccaggtgtagtggcgcatgcctgttatcccagctactcgggaggctgaagcaggagaattgcttgaacccaggaggcagaggctgcagtgagccgagatcgcaccacagcactctagtctgggcgacagagcaagactccatctcagaaaaaaaaaaaagaaataacattctgcaaagatatgggcagattgttccctctgcctaactgcccttcctcagtctatccaactggcaaactcctattcatcctttaaaaaagctggattatcacatagtctaggaccaaccactcaggccttttggggcaggtctctagggaaggatttttttaaggaaggacaaattagatagatcccaaatgtcctctttggtctgctgacctgatcttccaggcactctcctcatacactcggacacccattccacaggcacagcaggggctcagggaggtgggaggggctggcaatgacactgtatatttgtctggaaggaggaggaattgggggagggatgggtctagctcttacctgctctctgccagcctgcctgagggggtaagcttcatggagtcaaggacctgagtaggacagcaatactggtgtagagtatgagacgctgtggacctgagagacagcaagagacagagagagacagagagagagacagggagggagggaagtggcagggtgggcgatgggggcaagaaggtgagagtgagtgcgggaggggaaaagggaaggctgggaggaatggaggatgggaaatggaagaggaggcgtgggaggcagggagggaggaaaggaaggaagataagggagaaaggaaaagaggaagggagagagggaggaagatggagagagaggaagga

SEQ ID NO: 42285 - DNA, 996 bp, Artificial sequence
  DNA replication origin
tgagtgcgggaggggaaaagggaaggctgggaggaatggaggatgggaaatggaagaggaggcgtgggaggcagggagggaggaaaggaaggaagataagggagaaaggaaaagaggaagggagagagggaggaagatggagagagaggaaggaaggaaggagggagggagggagggagggaggaaggaaggaaggaaggaaggaaggaagaaaaaaagaaaaaaaccacaaagtcaagaaagagaggacggcactcgaaccacatacagaacacaacgacaacagggggcagtagagacgaaagagccgggctgggcctcctgtgttccaggtgactccgtggggacctcagccacagagacgctgggacaccacagtagggaagggggaagggagccctcctcacaccagacgccacaggggtagggaggacgggaggggaaggggggatgaaagagaagggggaaagatgcatgggggctccccttagagaagatccctcacaggaagggaggaagggatggaggaaggagaagctctgggcccaaagaagggggagaacccaggtgggtgggtaaggggaacactgaaggaagagagggagagagatagagagaaaccgaaagagacagaaaaggagaaagacagagaaagaggaagacagagaaagggcgagacagaagacacagagagaagccagagagaggcagagagcgccagagcagaggagggtgagggcggaggaggctgacaaggtctcagtggtcttggtgacaggatgggactcagggctgagtgggtgaggcagaggatggggtggttccaggtaggagtcttttgctttgaaggccagtgctttaccccccaccccaaggcggggcccacactccacccctgatgctgtgcccccaccacccctagtgcagggtccaaagacccctccacctcctgcctcctgcgattaaagtccggagaatggccaaggggaggaggag

SEQ ID NO: 42286 - DNA, 1332 bp, Artificial sequence
  DNA replication origin
cctaataggcatggattacaatccctgatttacagatgaggagaaggaggttctgagagagtcagtgccttgggctgtctgattccaaagccagcatttaatttattcagacacgcttcctgacatccatcctgggcccagagtcaaggaggctgtaggggcctagaggagtcagcatctgggaagcgagggtcaaactcaggctatgggaaggggctaaagcatggcgtgtatggggcaatatcttgacaacatggtgggaaggcaacttgaacttgcaaccagggctgggtagggacctacttgtaaatttttgaattcgctccagttagggtgaaggagagcttgctggagcaggcagcgtctgagcagggctgtcggggactgccgtgcagatttgcataaggagggtgtccccggaggtgggatcagcttgtggagggaagcgaggggggtgggtttagagacagggagccatccgtggggctaaaatagaagatctaggcaggaaaagagcagtaaggtcagaacgcgggtcaggactgggtcacagcgaccttctgtcatcagtggggagctggggaagttggaggagagaggcgaggctctgtggcctaggaagggcagaaacactggatccatgcacaggcctccatttggggggtgggttgctctctagttgtgtgactggacaatctgtttgtctcttggagccccagtttcctcatctaataaacttcatgtgtgtgtggagggggaagggctagggaggtggaagaaacaccgaggagaggcgctaggcctgggcttttatgggaactgaatagcaaggagagagcagagtcggtagattgcaagccacccttggcatgacccaggcctgagggcttctaaagtatggggtgccagaggaagtgtggcgtctaattagagctgaacagttggtgatgggggtggggggtaggcatgggcagagaaaggtgcctggacttcttgtgggtccctgagaagtgtcacagatctgacctaaagataccttaagccaaggtccagagagggattggccatcgctcgaggtcacaaagctagctagcagcagagcctgcttcctagctgtgcactctttgcagaatcacttaacttctctggttcttagtttctcatgggtaaaatggaaacaatagtcttgacttctctgggttgatgagagaacttaaagtaaagcaatgcttggtgtgaaatagtggtgcaacaaactgtagtgtcctctgctttcccctaacccaatccattgtcatatgctatatagtcaggctggaagaatgtgaacaa

SEQ ID NO: 42287 - DNA, 1765 bp, Artificial sequence
  DNA replication origin
cccagcggcggcgcatcgaggagctggagggccagctggaccagctcacccaggagaaccgcgacctgcgagaggagagccagctgcaccgcggggagctgcaccgggacccccacggcgcgcgggatagcccgggccgcgagagccagtaccagaacctgcgcgagacccagttccaccaccgcgagctgcgggagagccagttccaccaggcggcccgggacgtgggctacccgaaccgggaaggcgcctaccagaatcgggaggctgtgtatcgggacaaggagcgggacgcctcctacccgctccaggacactaccggttacacagcccgcgagcgtgacgtggcccagtgccacctgcaccacgagaacccagccctgggtcgcgagcgtggcgggcgggaggccgggccggcgcacccgggccgcgagaaggaagcgggctattcggcggcggtgggcgtggggccgcggccaccgcgggagcggggccagctgagccgtggcgcatccaggagctccagtcccggcgccggcggaggccacagcaccagtaccagcaccagcccggccacgaccctccagagaaagtaaggaatgtgtgtttgtacccccggctcttccctctagatccctctccaacttgtccagctgatagagtaagaagccagtgtctggttccgtgtcttcctctcctgtcccaacccgccaggagaagccaggtccccctcatccagccgacaccccttccctggccaccccaggctgggttggccagatgagtgcaggcgtctcttctttcccggtaccgcggccagcgagggactagagcagtcatcgccgcctcccccgcctccacttcttcaacccctagctgcatccttgccagaagataggttttcatttatttatttattttgggtatgctggttggaatttttatggtcggcgagggtgtctactcagagccccaggggagagaaagccccccacccccgcctttttttttttttcctttttctttttgcctgatcttttctcctctggccgcctcagctccatcccttaccaaagaggcaggtggggaccagaatggctgctggaggctgagacatccctctgaagggaactgcagcacattctggccggggggagcaaagatgggggagcaaagatggaggccaagcccttggctagttcctcaaagtccaccccctctccacccttcaagaaaaacaacacccatttaaagagccctaccgggaagggaagtctagattgcccctctgctggatcggttccagttcctgcactggggtctgtgtgtctatttgggacaccttggcactatctcttgggttggtgggacatgggctgggtccactttttctgtgtagataccatggtgagctgattgggttacatgtatcaggctgagagagtcaagggcgtgcagactcccaaggctgccctaaaggctcccttatttcttttctgccgtattcgaaggaacactgagctgggagttgggagacctgagttccccttccagctctgctgcagattggctttgtgaccttgactgagtctctttctctcttaggccatcagttcccccgtatctttttaaatggcaaggtctgccttggatgatcttgaagtacccctccagctcagatttgatggttctatgtttaatccagccacactacagagcaagtctgaagtcctgtagcgaatggacaggcttccccctcctctca

SEQ ID NO: 42288 - DNA, 1429 bp, Artificial sequence
  DNA replication origin
tggaagtttccctttaggttatgggagaatgcaggaaacgcctgatgggtagcactgagagctcattgtggttttgatttgcatttccctgatggttaatgatgttgagcatcttttcatgtgcttattgaccatttgtatatcttctttggagaaatgtttattcaaattccttgcccattaaaaaaaaatagttgtctttttgttgctgtaagagttctttatatattctacgtacaagtcccttatcagatacatgatttgcaaatactttctctcattctgtgggttgtcttttctgtgcaaggtgttttttgcatgcttttatccaagaccaccctgtcaggtagctgttattgatagggaaattgaaattaagagagaagatggaatttaaatccagttttgtctgactgtaaaactcatgttttctcctctaacccaacctgctcacaaagataaattaagacacgtttctgtctttaaggagctccgtctggcagaggacataaaacaagaacacagacgaatgtgctgtaaagcaagttccacttgttccacaaattccacaagatagggagtgcagcaggaggtcaagaggggagagagagagagagagagagcagcaacttgcacttctggctgaggaaatcagggttggcttcagtaaggtggcatttgagttaagtcttgaaggatgggtacagtttcagtggatggggatgatggagtgaatggggagagcatttctaaaagagagcaggaaatgagggttggttgaatgaatggagccttgatcccaagactggctgtgatgtggagtcccagggcttgttgagttgagagatcctggactgccttggttagaggacccggggactggctgagatgggggattctggggttggctggggtaggagatctgggcactggtttgaatggagagtgtaagggctggctggagtgggagatgcctgcgatgttgtacatgagtgtgtgtgtgcgcatcctttgggagtcccaagggatgcctgggatgagggcagctgcagacagtcaagggactggccaggatgggagactcagggacgactgcccatgatgggggctggagggaggtcgcctgaggtagaagacacaggggctggctaggaaggggaatctgacactgcttgggattggcagacctagggcatggggagtccacgggttgtcgggacctggggactgcctgggatgggggttcctcccgggatggctttggatgaagatccccaacctggcgaacccgagggacgggcggactctgggaaggagggcttctttaggctccgttaagtgaggacccagggacgggtggaatggagagatctcttgcgggctgtcatgggggctggccctggccgggcgccggtgccttggggccagt

SEQ ID NO: 42289 - DNA, 1078 bp, Artificial sequence
  DNA replication origin
gtcgacccttgtacgacttaaagttctcaatctcaatcagtttcaggaaccccatgacggccgcggcgccggcggcagtaggacaggccgcgccgtacgcccgagaactgaggtagcccgcgcgggaaacgccgcagtgcaagccgggcgaccggcaaatgtcgcgagaatacgtccaggcctaacgggattttcgccttccggcaggagtgggaccaggggcggggactgatgttgcgtatacgaggagcgagctgacgactggcgtggtgcctccgcccccctttcttgttgcatggcaacaacaaacacttgctcctgcggaccagatccccggaggagttgttgctgggcggagtcagagcagttcttgaggttcaaggaggcgggggagacctgagctcacgcttgctgagacagaagtcacagcaggattatgcccctcagggcaagaggaaggtgggagctcggctgtggctttagcctggccagctttcaaggctaggacaaggacagggtcgggaattggaaggacccggggggagcggagagctggacgggaaggaggggccaacgggaggattcagtgttaggtgagctcagactttgctaatggtggggtgggattggtggcgggacgggttgcgaaggcggacgggttgtgaatgggactggggctactcccaggcaacagggatacaggctggggaaggctacggcctgagatactacccctatcccctgcctccctcctgttgtaccaagcagagttcagaaactgccgccgtaacccaagaacaaagttgcatgcagagccaacctaagagcttcaaaatcgggattccttactgagaaaggtattttgtgtgaacccccaggagtcagggtccctaagccagcgctctccacctccacctacctctgcctccatgcctctcccccatcccattcccacagctctataccacaatgccaccttacctctcttccctctctgctctctatcattaataaggcaggggccttagcaatccaagaagcttaaaatgtcagctgaatcttccccttcagtgacctt

SEQ ID NO: 42290 - DNA, 1021 bp, Artificial sequence
  DNA replication origin
atctcggcactttgggaggccaaggcaggcggctgggaggtggaggttgtagcgagcggagatcacgccactgcactccagcctgggcaacgtcgagcactgagtgaacgagactccatctgcaatcctggcacctcgggaggccgaggttggcagatcactcccggttaggagctggagaccagcctggccaacacagcgaaaccccgtctccaccaaaaaaatacgaaaaccagtcaggcgtgacagcgcgcacctgcaatcgcaggcactcggcaggctgaggcaggagaatcaggcagggaggttgcagtgagccgagatggtggcagtacagtccagctttggctcagcatcagagggagaccgtggaaagagagggagagggagaccgtggggagaggggagaggggagaggggagaggggagaggggagaaaacagattcttattgaatgtacgcaaatagctacattgccttcagaggccttggaacaagagtgactccctcttgcataggggctgcataaaataaggctgagacttactgggctgtattcccaggaggttaggcattcttagtcacaggatgagataggaggtcggcaggattggtatcacaagatacagatcataaagaccctgctgataaaacaggatgcagtaaagaagctggccaaaccctgccaaatccaagatggcgacaaaagcgaactctggtcatcctcactgtttatatgttatttataatacattagcatgctaaaagacactcccaccgggacaccgggatagtttacaaatgccatagtaatgtctagaaattaccctatatggtctaaaaggggaaggaaccctcagttacaggggaaatccctgcccctttcccagaaaactcatgaataatccaccccttgtttagcatatataatcgagaaataaccgtaagtatactcagtcgagcagcccatgccactgctctgtctggagtagccattgttttgtttctctactttaataaa

SEQ ID NO: 42291 - DNA, 1261 bp, Artificial sequence
  DNA replication origin
agcaacaatctgatttctctgtcttttccccacatttcccccttttctattcgacacaaccgccatcgtcatcatggcccgttttcaatgagctgttgggtacacctcccagacggggtggcggccgggcagaggggctcctcacttcccagaaggggcggccgggcagaggcgccccccacctcccggacggggcggctggccgggcggggggctgacccccccacctccctcccggatgaggtggctggctgggcagaggggctcctcacttcccagaaggggcggctgggcagaggcgccccccacctcccggacggggcagtggccgggcggaggcgccccccacctccctcccggacggggcggctggccgggcaggggctgaccccccacctccctcccagacggggtggctgccggatggagacactcctcacttcccagacggggcggctgccgggcagaggggctcctcacttctcagacggggcggctgccgggcggaggggctcttcacttctcagatggggcggccgggcagagacgctcatcacctctcagacggggtcgcggccgggcagaggcactcctcacatcccagattgggtggcagggcagaggcgctccccacatctcagacgatgggcggccgggcagaggcgctcctcacttcctagacaggatggcggccgggcagaggcgctcctcacttcctagacgggatggcggccgggaagaggcgctcctcacttcccagactgggcagccgggcagaggggctcctcacatcccagacgatgggtggccaggcagagacgctcctcacttcccagacggggtggcggccgggcagaggctgcaatctcggcactttgggaggccaaggcaggcggctgggaggtggaggttgtagcgagcggagatcacgccactgcactccagcctgggcaacgtcgagcactgagtgaacgagactccatctgcaatcctggcacctcgggaggccgaggttggcagatcactcccggttaggagctggagaccagcctggccaacacagcgaaaccccgtctccaccaaaaaaatacgaaaaccagtcaggcgtgacagcgcgcacctgcaatcgcaggcactcggcaggctgaggcaggagaatcaggcagggaggttgcagtgagccgagatggtggcagtacagtccagctttggctcagcatcagagggagaccgtggaaagagagggagagggagaccgtgg

SEQ ID NO: 42292 - DNA, 898 bp, Artificial sequence
  DNA replication origin
gaggagtgcctctgcccggccgcgaccccgtctgagaggtgatgagcgtctctgcccggccgccccatctgagaagtgaagagcccctccgcccggcagccgccccgtctgagaagtgaggagcccctctgcccggcagccgccccgtctgggaagtgaggagtgtctccatccggcagccaccccgtctgggagggaggtggggggtcagcccctgcccggccagccgccccgtccgggagggaggtggggggcgcctccgcccggccactgccccgtccgggaggtggggggcgcctctgcccagccgccccttctgggaagtgaggagcccctctgcccagccagccacctcatccgggagggaggtgggggggtcagccccccgcccggccagccgccccgtccgggaggtggggggcgcctctgcccggccgccccttctgggaagtgaggagcccctctgcccggccgccaccccgtctgggaggtgtacccaacagctcattgaaaacgggccatgatgacgatggcggttgtgtcgaatagaaaagggggaaatgtggggaaaagacagagaaatcagattgttgctgtgtctgtgtagaaagaagtagacataggagactccattttgttctgtactaagaaaaattcttccgccttgggatgctgttgatctatgaccttacccccaaccccgtgctctctgaaacatgtgctgtgtccactcagggttaaatggattaagggcggtgcaagatgtgctttgttaaacagatgcttgaaggcagcatgctcgttaagagtcatcaccactccctaatctcaagtacccagggacacaaacactgcggaaggccccagggtcctctgcctaggaaaaccagagaccttt

SEQ ID NO: 42293 - DNA, 1336 bp, Artificial sequence
  DNA replication origin
cgggcggggggctgacccccccccacctccctcccagacggggcggctggccgggcagaggggtcctcacttcccagtaggggcggccgggcagaggcgcccctcacctcccggacggggcggctggccaggcggggggctgatccccccacctccctcccggatggggcggctggccgggcggggggctgactcccccacctccctcccggacggggcggctggccgggcagggggctgaccccccctcccccctcccggacggggcggctggccgggcggggggctgaccccccacctccctcccggactgggcggctggccgggccgggggctgacccccccacctccctcctggacggggcgactggccgggcagaggggctcctcacttcccagtaggggcggccgggcagaggagcccctcacctcccggacggggcggctggccgggcggggggctgacccccccccacctccctcccagacggggtggctgccgggcggagacgctcctcacttcccagacggggtggctgccggacggaggggctcctcacttctcagacggggcggcggccgggcagagacgctcctcacctcccagacagggttgcggcccagcagaggcgctcctcacatcccagacagggcggcggggcagaggtgctccccacatctcagacgatgggcggccgggcagagatgctcctcacttcctagatgggatggcggcggggaagaggcgctcctcccttcctagatgggatggcggccgggcagagacgctcctcactttccagactgggcagccaggcagaggggctcctcacatcccagacgatgggcggccaggcagagacgctcctcacttcccagacggggtggcggccgggcagaggctgcaatctcggcactttgggaggccaaggcaggcggctgggaggtggaggttgtagcgagccgagatcacgccactgcactccagcctgggcaccattgagcactgagtgaacgagactccgtctgcaatcccggcgcctcgggaggccgaggctggcggatcactcgcggttaggagctggagaccagcccggccaacacagcaaaaccccgtctccaccaaaaaaaaaaaacgaaaaccagtcaggcgtggcggcgcgcgcctgcaatcgcaggcactcggcaggctgaggcaggagaatcaggcagggaggttgcagtgagccgagatggcagcagtaccgtccagctttggctcggcatcagagggagaccatggaaggagaccgtggggagagggagggagagggagagggagagggagaggagggag

SEQ ID NO: 42294 - DNA, 923 bp, Artificial sequence
  DNA replication origin
cccgcctggccagccgccccgtccgggaggtgaggggcgcctctgcccggccgcccctactgggaagtgaggagcccctctgcccggccagccgccccgtccgggagggaggcgggggggggggtcggccagccgccccgtccgggagggaggtgggggggtcagccctccgcccggccagccgccccgtctgggaggtgaggggcgcctctgcccggccgcccctactgggaagtgaggacccctctgcccggccagccgccccgtccgggagggaggtggggggggtcagcccccgcccggccagccgccctatccaggaggtgaggggcgcctctgcccggccgcccctactgggaagtgaggagcccctctgcctggccagccgccccgtccgggagggtggtgggggggtcagccccccgcccggccagccgccccatccgggaggtgaggggcacttctgcccggccgcccctactgggaagtggggagcccctctgcccggccacgaccccgtctgggaggtgtgcccagtggctcattggggatgggccatgatgacaatggcggttttgtggaatagaaaggcgggaagggtggggaagaaattgagaaatcggatggttgccgggtctgtgtggatggaagtagacatgggagacttttcattttgttctgtactaagaaaaattcttctgccttgggatcctgttgatctgtgaccttatccccaaccctgtgctctctgaaacatgtgctgtgtccactcagggttaaatggattaagggcggtgcaagatgtgctttgttaaacagatgcttgaaggcagcatgctcgttaagagtcatcaccactccctaatctcaagtacccagggacacaaacactgcggaaggccgcagggtcctctgcctaggaa

SEQ ID NO: 42295 - DNA, 990 bp, Artificial sequence
  DNA replication origin
acgtctacttccctctacacagacacagcaacaatctgatttctctatcttttccccacatttcccccttttctattcaacaaaaccgccatcgtcatcatggcccgttctcaatgagctgttgggtacacctcccagacggggtggctgccgggcagaggggctcctcacttcccagacggggcggctggccaggcggggactgccccccacctccctcccggacagggcggctggccgggcgggggctgccccccacctcccggacggggcggctgccaggcggagacgctcctcacttcccagacggggcggctgccgggcggaggggctcttcacttctcagacggggcagccgggcagagacgctcctcacctcccagacggggtcgcggccgggcagaggcgctcctcacatcccagatggggcggtggggcagaggcgctccccacatctcagatggggtggcggggcagaagcgctccccacatctcagatgatgggcggcggggcagagacactcctcacttcccagacggggttgcggccgggcagaggctgcaatctcggcactttgggaggccaaggcaggcggctgggaggtggaggttgtagcgagcggagatcacgccactgcactccagcctgggcaacattgagcactgagtgagtgagactccgcctgcaatcccggcaccttgggaggccgaggctggcagatcactcgcggtcaggagctggagaccagcccggccaacacagcaaaaccccgtctccaccaaaaaaatacggaaaccagtcaggcgtggtggcgcgcgcctgcaatcccaggcactcggcaggctgaggcaggagaatcaggcagggaggttgcagtgagccgagatggtggcagtacagtccagctttggctcggcatcagagggagaccgtggagagagagggagagggagagggagaacgtggggagagggggatggggaggggga

SEQ ID NO: 42296 - DNA, 990 bp, Artificial sequence
  DNA replication origin
cctgccctggggctgctctctgctcctctctgggcctcagcttcctcatacttgaaccggtggcaggaatgcccaccccacggagctatggtgaaaatgaaatgagccccacgtgcagaagcagatggcaccataactgtgcataggtgtccaataaatgacaatcatgacaacaactgtccttcctgcacttcatttcccacctgtcccacccccaagcagtcctgccagcaggaacaatacctgtgctaacaagctgaggcacaaggccaaatgctgtagaaatggatccctttattcagccagcaataagaacgtgcaggtcaaaaaaaaaaagaacgtgcaggtcactgtgctaggctggggagaagagactcaggtcaagagagccacacatgggccagaactgggagagctggagcccagggcatggcaacctgcctgggagggaggagaagatggggagggcttcctggaccacaccatggagtgggtgctgggccttggaagggagttggggggtgggcaggaaggacagagtcatggatggggacaggggctgccactgtgacacctgtgttgcggtgaggtgggaagggcagtatccaccctgagttggggagaagagtgattcaagggtgggtgtctcagggcagctgtctgtgtgaccagtgatggtcacccaccgacagacggaagagaggagggcagtctaggtggggaaactgcaccagcaaaggcacagagttgtgagaaagatgaggggaccagtcagggagggccaagagggtcactgtcatggagcagctgactttgggcaggccttgtgtgctagggccaagctcttagacctacagagcaggtggcattgggagccattcggcagctgaggcgagactgagtggctgatgggtggaaaagcaggagtgacgaaatctgcttctgccccatccctgggtcacccacctcaggacccagaatgtggccacc

SEQ ID NO: 42297 - DNA, 948 bp, Artificial sequence
  DNA replication origin
tgcagtgagccaagatcgcaccattgcactccagcctgggcaacaaaagcaaaactctgtataaaaaaaaaaaagggcgactggccgggcagaggggctcctcacttcccaggccgccccgtccgggaggtgaggggcgcctctgcccggccgcccctactgggaagtgaggagcccctctgcccggccagccgccccgcccgggagggaggtgggggggggtcagccccccgaccggccagccgccccgtccgggagggaggtggggggatcagccccccacctggccagccgccccgtccgggaggtgaggggcacctctgcccggccgcccctactgggaagtgaggacccctctgcccggccagccgccccgtccgggagggaggtggggaggtcagccccccgcccggccagccgccctatccaggaggtgaggggcgcctctgcccggccgcccctactgggaagtgaggagcccctctgcccggccacgaccccatctgggaggtgtgcccagcggctcattggggatgggccatgatgacaatggcggttttgtggaatagaaaggcgggaagggtggggaaaaaattgagaaatcggatggttgccgggtctgtgtggatagaagtagacatgggagacttttcattttgttctgtactaagaaaaattcttctgccttgggatcctgttgatctgtgaccttatccccaaccctgtgctctctgaaacatgtgctgtgtccactcagggttaaatggattaagggcggtgcaagatgtgctttgttaaacagatgcttgaaggcagcatgctcgttaagtgtcatcaccactccctaatcttaagtacccagggacacaaacactgcggaaggccgcagggtcctctgcctaggaaaaccagagacctttgttcacttgtttatctgctcaccttccc

SEQ ID NO: 42298 - DNA, 1283 bp, Artificial sequence
  DNA replication origin
ggcagaggcgcccctcacctcccggacggggcggctggctgggcggagggctgacccccccacctccctcccggatgaggtggctggccgggcagaggggctcctcacttcccagtaggggcagccgggcagaggcgcccctcacctcccggacggggcggctggccgggcggggggctgaccccccacctccctcccggacggggcggctggccgggcggggggctgacccccccacctccctcccggacggggcggctggccgggcagggggctgacccccccacctccctcccggacggggcggctggccgggcagaggggctcctcacttcccagtaggggcggccgggcagaggcgcccctcacctcccggacggggcggctggccgggcggggggctgaccccccacctccctcccggatggggcagctgccaggcagagacgctcctcacttcccagacggggtggctgccgggcggaggggctcctcacttctcagacggggcagctgccgggcggagggtctcctcacttctcagatggggcggttgccaggcggagggtctcctcccttcccagatggggcggctgggcagagacgctcctcacctcccagacggggtcgcgaccgggcagaggcgctcctcacatcccagacggggcggcggggcaaaggcactccccacatctcagacgatgggcggccgggcagagacgctcctcacttcctagatgggatggcggccgggaagaggcgctcctcacttcctagatgggatggcagccgggcagagacgctcctcactttccagactgggcagccaggcagaggggctcctcacatcccagacgatgggtggccaggcagagacgctcctcacttcctagacggagtggcggccgggcagtggctgcactctgggcactttgggaggccaaggcaggcggctgggaggtggaggttgtagcgagccgagatcacgccactgcactccagcctgggcaccattgagcactgagtgaaccagacaccgtctgcaatcctggcacctccggaggccgaggctggcggatcactcgcggttaggagctggaggccagcccggccaacacagcgaaacccagtctccaccaaaaaaatacgaaaaccagtcaggcgtggcggcacgcgcctgcagtcgcaggcactcggcaggctgaggcaggagaatcaggcagggaggttgcagtgagccgagatggcagcagtacagtccagcttcagctcggcatcagagg

SEQ ID NO: 42299 - DNA, 944 bp, Artificial sequence
  DNA replication origin
tgcctggcagctgccccatccgggagggaggtggggggtcagccccccgcccggccagccgccccgtccgggaggtgaggggcgcctctgcccggccgcccctactgggaagtgaggagcccctctgcccggccagccgccccgtccgggagggaggtgggggggtcagccccctgcccggccagccgccccgtccgggagggaggtgggggggtcagccccccgcccggccagccgccccgtccgggagggaggtggggggtcagccccccgcccggccagccgccccgtccgggaggtgaggggcgcctctgcccggctgcccctactgggaagtgaggagcccctctgcccggccagccacctcatccgggagggaggtgggggggtcagccctccgcccagccagccgccccgtccgggaggtgaggggcgcctctgcccggccgcccctactgggaagtgaggagcccctctgcccggccaccaccccatctgggaggtgtgcccaacagctcattgagaacgggccatgatgacaatggtggttttgtggaatagaaagcggggaaaggtggggaaaagattgagaaatcggatggttgccatgtctgtgtggaaagaagtagacatgggagacttttcattttgttctgtactaagaaaaattcttctgccttgggatcctgttgatctgtgaccttaccccccaaccctgtgctctctgaaacatgtgctgtgtccactcagggttaaatggattaagggcagtgcaagatgtgctttgttaaacagatgcttgaaggcagcatgctcgttaagagtcatcaccactccctaatctcaagtacccagggacacaaacactgcggaaggccgcagggtcctctgcctaggaaaaccagagacctttgttcacttgtttatctgctgaccttccctcc

SEQ ID NO: 42300 - DNA, 1047 bp, Artificial sequence
  DNA replication origin
cttcctcattgttttgaataaactttattgactactccgaattgcctaccaccgccactgggcttctcccagcgacttttcgggccgtgtgcctcggacgtggcggccggttcatctctttccccgttggtttgctcgcgagtatctcctgccggcccagcgacgacgccacttgcccgttcgccgggcggccgccagactaggcccaagccgcggtctccagtaggcccgaacggccgggccgaggggaatgttgtggaggaggctgctctgaagcaccgttgagcggctggcgccgcgcgacccagcggggggctcgaggggaaggcgagcgaggttcccggcggtacggggactatcccagaattcgacgcgcgtcgccgtaggggccggaactaccggacgagcctccgctgaggcgcttcgcagtcccggagctagcccggctgccggcgtgtcgctggggctgagctccgcgggcgtggagtccttgcagcccaaagcatgaggaggtccctgtaggattctggactgaagacgttcttgtcaggtttggggcgtgaggaggttcctgtcagttggggaagcgttaagattcctgtaagttttgggggctgcgaggctattactgtcagttttaggatatactgtgaggtacctgaacatttggggagactagggagctctcatcagtttgagggggggctgcaaggaaacgctgccagtttccgagcgatgcaaaagaatccttgcttagtttcgggagtgtgaggaaattctagtcagtttgaggggttttgaatagatccttttgagtttcagggatgcagccagaaccctgtcatctttaaagtacagaacgagctggtcagtttagagatttatatttatttcagttttgggggtgatgagactcctgactggtcggggaaggaatgatattgagagtgatggaaaggattatttaaactctccgaacacgaccccagaactgtgatttgagttgggcgcctagtcttgtctgtcttgttcgtgaaggctttgagt

SEQ ID NO: 42301 - DNA, 858 bp, Artificial sequence
  DNA replication origin
ggagcttctctgcccggccgcccatcatctgagatgtggggagggcctctgccccgccgccccgtctgggatgtgaggagcgcctctgcccggctgcgaccccgtctgggaggtgaggagcgtctctgcccggccgcccgtctgagaagtgaggagaccctccgcccggcagccgccccgtctgagaagtgaggagcccctccgcccggcagccaccccgtctgggaagtgaggagcgtctccacccggcagccaccccgtccgggagggaggtgggggtcagcccccgccaggccagccgccccggccggccgccccgtccgggagggaggtggggggtcagccccctgcccggccggccgccccgtccgggaggttgggggcgcctctgcccggccgcccctactgggaagtgaggagcccctctgcccggccaccaccccgtctgggaggtgtacccaacagctcattgagaacgggccatgatgacaatggcggttttgtggaatagaaaagggggaaaggtggggaaaagattgagaaatcggatggttgctgtgtctgtgtagaaagaagtagacatgggagacttttcattttgttctgtactaagaaaaatccttctgccttgggatcctgttgatctgtgaccttacccccaaccctgtgctctctgaaacatgtgctgtgtccactcagggttaaatggattaagggcggtgcaagatgtttttgttaaacagatgcttgaaggcagcatgctcgttaagagtcatcaccactccctaatctcaagtacccagggacacaaacactgcggaaggccgcagggtcctttgcctaggaaaaccagagacc

SEQ ID NO: 42302 - DNA, 1132 bp, Artificial sequence
  DNA replication origin
cgatttctcaatcttttccccacctttcccccttttctattccacaaaaccgccattgtcatcatggcccgttctcaatgagctgttgggtacacctcccagacggggtggtggccgggcagaggggctcctcacttcccagtaggggcggccgggcagaggcgcccccaacctcccggacggggcggccggccgggcagggggctgaccccccacctccctcccggacggggcggccggccggggcggctggcctggcgggggctgacccccacctccctcccggacggggtggctgccgggtggagacgctcctcacttcccagacggggtggctgccgggcggaggggctcctcacttctcagacggggcggctgccgggcggagggtctcctcacttctcagacgggcggccgggcagagacgctcctcacctcccagacggggtcgcagccgggcagaggcgctcctcacatcccagacggggcggcggggcagaggccctccccacatctcagatgatgggcggccgggcagagaagctcctcacttcctagatgggatggtggccgggaagaggcgctcctcacttcctagatcggatggaggccgggcagagacgctcctcactttccagactgggcagccaggcagaggggctcctcacatcccagacgatgggcggccaggcagagacgctcctcacttcccagacggggtggtggccaggcagaggctgcaatctcggcactttgggaggccaaggcaggcggctgggaggtggaggttgtagcgagccaagatcacgccactgcactccagcctgggcaccattgagcactgagtgaacgagactccgtctgcaatcccggctcctcgggaggccgaggctggcggatcacttgcggttaggagctggagaccagcccggccaacacagcgaaacccggtctccaccaaaaaaatatgaaaaccagtcaggcgtggcggcgcgcgcctgcaatcgcaggcactcggcaggctgaggcaggagaatcaggcagggaggttgcagtgagccgagatggcaacagtacagtccagcttcggctcggcatcagagggagaccgtggaaagagagggagagggag

SEQ ID NO: 42303 - DNA, 1162 bp, Artificial sequence
  DNA replication origin
ccaactacatgcagattggacttaactgcctatggggccttgcacacttaatattcctttttgcttctgctcattttcttcctcccacttaaagcagcctcctcccaagcttgtgactcattcaaatccaatccacctttgaagacccaggtgaggtccgacttcttcagggaagcctcccctgaccactttagtccaaagatatcccaccactcccacatacagaaaacaggaactgtacttactgtctggaccataaggcataatcacatacacattgctataattaaatgtttcatgtgtatacatttaactttccaagggcatgagcagtgtctcacatgtctttaaaacccttacactcagtgagttaatacttgctgaacagtgactgaatcagtgggtttttatgtgtttaggctaaggcaggaggaagaagatgcatgttgaaatgaaaaaggctgaatggacacagatgggtaaaaaagcagcagtgggtgaagacggaaaaacaatgtagaagaaaggtgttcagttcacacctgcttaagtgatttactgcgaggttggaaagagatacaggagagagatgtcaactggcaaaagcagggtaaaggcatttcagtttgaggcagaagacaccaggagaaagatgaggctacaaaagaaattctgactagattctgctgaaacctagtggtaggccaattggataagggaagctaaagggagctactgggatgacatgagtagagatatggccatgtaggtgagtgaatccgtagggggtggtatgaagggggaggtaaatggataaaatggtagagggtagttaggcaggtaggttagctgttgggcgggtaggtgggtgggtagatgggaggtagggtagtgggtaagtgggtaggtggttaggtatttagttgggagggaataggtgtggggcttattatttaagatccggcccctccctcaccttgacccggaagcggatgagtgctagcctcacgcagtggctcaggcaggccggtggcaggaaccaggcccgcggtggaggggtgcccttgttgcccacgtgtcccacgatcagttgcgctgtctgccgctcggcctggcaccgacggccccactcggccagccggtccttgcccaggccccccgg

SEQ ID NO: 42304 - DNA, 1479 bp, Artificial sequence
  DNA replication origin
tgttgcccacgtgtcccacgatcagttgcgctgtctgccgctcggcctggcaccgacggccccactcggccagccggtccttgcccaggccccccgggaacatgaccacgagctccaggccgtcgccgccaggataggcacaagcctggcacagcgctgacaagtagcccagcatggcgttccattggccgccacacacccaatccgtctggtagccgccatagagccgcggcagcgccgagccggcgtccaccagcacccgggccccgggcagctgagggggcggcggcggcggcagcggagggtgcagcccgggctgcgcttggccatgatggtggaagtggtgagcggggtgatggtgccgagtcggccccgcgcccccggagtaggcacccaaggcagcgggcggaagcggcggttgcagaggcacggagcccctggcggcgcgtggagccccgggcgctagggctgcagtcggcggcagctggcggtgcaagtgctgctgctgctgctggcgcgagaccgtgcgcgcgagttttaggaggtccacgggcaccacggccccgggacagcgcttctccaggaactcttggaagccctggacacccatgcttcgtcggtgggcagacgcgatagcggctgcgcaagcaggataggcgacgatctgggcgcgaagctgggggcgggcgcgtgcgcactccgcggggggcgagggggggcgggaaaaggattcccgaggggaggggtgaggaagcgagggaatgagggcggggaggggaggagaccacaaattggatttgggtagagagaaggggaggggcagaccggacccgggagaggctgggaggataaaagcgaggatgggctctagtcacttctcttttttctcctttccggccgctcttcttcccgctttagaaggggtgaagcctctttcttccacctccgggagccatgttgcctcgtcttctcggtggtacacgctttctagctggaggaaggggagcgaggaggggcggggcggggcggggagaggggcatcttggtagttgtagtcttctctatggccttaggatatagtcgaggaaccagactaccacccttctcagcccttgtgctcacagggtcacaggaagcggggcgtgatgatgagtgtttaggagttgcactccaactccttgcatctcactgagttgcttaggttatttactgctttttcctggaaaaagagttttgggggatggattgatgcatcatgggaatggaagttagagtggattgactgaattcagctaaagtgagctaaaactccccaggagggaggattttccccttagtggaaagataatatttaaagagctgttggtcccaattaagaaagacgtaactggtcgggcgcggtggctcacgcctgtaatccctccgaggcgggcagatcacgaggttaggagatcgagaccatcctggccaacatggtga

SEQ ID NO: 42305 - DNA, 1067 bp, Artificial sequence
  DNA replication origin
cccgctcccctctctccgcccgctctttacctaccggccgtagctggcccggtgggctcgcggggagacgctcgcgcgcgcaagcgcacacgacgcggagcggagctcgagacatcgaggagaggagtaagaagcatcggaggaggcgatcgaggaggaggcggtgtgtgtgtatgtgtctattctacggtgtggctcgtcgtggggcgagaggaggctcgagagagggcgagggagaagcgaaaagagtaagagagtcttcctttgcgagagcctctaatctggtgagggtcccgggccggccggggcgctaggagagagggaggaggccggggggcgtgtctgggatcgggctgagagatgaatgggccagggatgaatggagggaggcagcggcggccaagagtctgttaggagtaagcgccctagcggggggcggcttgaccgaagcagggtgagtgccttcaccagtcggtaccggacgaggccgggctccgggctaaggggctgtcgaaactgctgaataggcggagaggaaaatgaacagggggaaagtggggaagggcaggtttgaggctgaggtgcgttttttgttttgttttcttttttgtttttgattttttttttggttgttgttgaggggtgacaactttgggagctgatggaagaccaggggacggggaaggtgaggaggatacaggagggggacaggagacggttgacaaaggactgagtgatcacttaagtgagattgaagctactgaaagggaagatcgcttcgggtgtgggaagttcagttgtattgatgggaataggatgaaggaaagagtagatttatttcagaggttcagctgatgtgtgagggacaggatggggtgagaaatattgctggcttgtgtaaatgtgttaggctcaaggagattctgaggtgttatttgggaaggggtggtgtgtgttgtgtgactgacaggttggggatggggaggagatggtatgataggtgaggatgaaagtggtgaggtggcttcactgtactgaaagaggttttgtttgactagttaaaagtg

SEQ ID NO: 42306 - DNA, 701 bp, Artificial sequence
  DNA replication origin
gaaaagacttgcccagtgtcacagagcttggaaacaaggtcctatttcgagaaatactgagctaggggaagaatcaagcacaaaaggcgcttccaggttctccacatggacctgcctctcggtgaacacaggtcagtacctccacagactcctgtctctccatcaggggcactgggatttctctgtccttctcttcctcctcctcctcgtcgtcctcctcctccaggtcactgtcaacctcttgggagccaggccggtgggggtcggccaaggcaacaggcacactagccagggcagggggcccagggcagaggctgtggctggggggcccgtcatcactgacgaagcaggtctcctcgctgttggatggcgagctgatgctatcaatgccgctgtcccggttgggcaccttctcaccgtcccggggcccaggagccagcagaaacaggcagcgggaggcctcaccctcggggagctggggcactggtggctgcgaggttggctgtggcaacatgactggctctgggggacctgggctggggccagggactggtctatccgaggcgacaatcacaggctctctgaggtgggtggtggacacacatggaagcagggtatgagcttgactgagaggcctctcctgactatcccttcctgtcccaggctccccctttcccctagagggtgccctagggaccaga

SEQ ID NO: 42307 - DNA, 1178 bp, Artificial sequence
  DNA replication origin
ctggagagagcaaacatctttggagcaatgagtccagcctctctgggctctggtgcccagttccttggacctagaaggtgtgacacctccaaacggtgtctgaaaacacacacagctcctgagacaaggctgcagggcatagccgggggagcctcagcactcctagctctgctattggttcactgttcctccaggcctcccttcccctctcagggtcttagtttccctatttgtaataccacaaacctggtcattgtggcatcaataaataatacttggtgagcaaatagggtacaggggaagggagagtgaaagaggggagcaaggggggcatttctttatttaacatgtacctgttgagtgcctactatgtgctaggccctgtgcttaggtgccaggtaggcaacaagacagtcactatccctgtcctcgtggagctgatatctagcaggaaagacacactacaagcaattccaagtgcagatgctgcaagaacacatgagggtggggggagtgggcggacagggcaaaggagatatttgagttgagacctgaaggataaataggagtccagaggtagggagaggcagactagcagttcgggtcacgggaacaacatgtgccaaagccctaggcggaagagagcactttcgaggaacagacaaacggccattgtggctggatcgtggggcggggaaatgttcctgagctaggccttccttgtccctgtgctcaggagtttcacccctgaaggcaaagggagcccttcacaaggctgaagggattgcaggggactgtgttttccaaaagctggcagtggtgtagagaatgcctcgtagaggcccggaagatgggagtgaaatcagttagggggctggagggggaatgaagcatagggattctagagcaactgaccatggtgcatctaaaggacttggggcctggctggacatgtgggttgagggagaggaataaacctaggacttgggcttgggcagctgggcggatggagttgtccttcctgcgatggggaaggcaggaggagaagcagaccggggctggggtaggagtgtcgttcacgatgtgctgaggctgaggagcctgaagacaggacatctaggtgacagcacccagttggcatcagatatgcctatctgggtcccagagtaagggcaggt

SEQ ID NO: 42308 - DNA, 1798 bp, Artificial sequence
  DNA replication origin
agtccccgccgagcgtagccctccaaccctcgcccaaccgcagccgcatagacagcgctccccagcgggcccccggccccgccgagcccactccccgcgcggggccggggccggggccggcgatgcctggcacggcagcggcggtggccgcggctgctgctgctgctactgccaccgctgccacggctgctggcccgggcccgggctgggggcttgagtctctgcagtggggctgagcccgcagtcccgccccccgatcctgaggccgctgctccgccgggcgccgggcctcctccgcccgcgcctccgccccaggagctggagccaagcggggagctcgggccccgcgcccaggcccggaccatgcatggccaccgagccccggggggcgccgggccttcggagcccgaacacccggccacgaacccgccgggcgccgctccgccggcctgtgccgactcggaccctggagcctcggaacccggactgctggcgcgcaggggctcaggttcggctcttggcggcccactggatccccagtttgtcggaccctcggacaccagcctgggcgctgctccaggccaccgggtcttgccctgcggtcccagtccacagcaccaccgggccctgcgcttctcttaccacctggagggctcgcagcctcggcctggtgagtgagcgactgagagagcatgggagcccgggccacgggcctggtactgggagcgggttcttgttctcgagccctctaagccccacctcggaacaggctcgcttacctcggccctttgggttccctcaaacccctcctcctccccacgtcccttggccttatgtccagtcctttcaacctctgtccccatctcctctctctgtcccttgtgcccctcaacctctccaacccccttctcctctgtctgctgaggctaatgggagagggagcactcgcgagaaaaagagggaggattgcaaggcagcaatccttggatatttggttggggaaaccagggtttcgtttggagaacagaagaaaaaaaggagccttacatttgccaagcgcctacattgtaccaggcactggactgggtgctttacatggattttcatttcagcttcaggaaccctcatgaagtagataccattagtcccattttgtagggaaggaaactgaagctcagagaagttaagcaacttgcccaaggtcacacagctagtatggagccacgattcaaaccagatctgtttgtgtccaaagtctgtggtctttctgcttccccaaactgaggctggagaccatgaaagtaatgccaagccttctgcttatgtgattttctcctgtactattcagcagccctggagtatgagcggaaaaaaaaaaaaaaaaaaaaaaaaagaaagacggtggattgatccaaggttgagattttgccaggtgtgtgtggcgggagaacaagggaaggaaggagtagaaggtgctgagagagaaaggtggaagaggtgggccttgggagtcaggctagaggagaaggctggaggggctgataggtagggagacagcagaaaagccaacagaggcagaagccagttgtagcaggagctggagagctgcaggtccacgaggttggttgtgatgtgaaatcaggatggtttcttggatttgaaaaggtggagcagctttaagtcaggctgaggccacagaccactgcctttgtgctacacagacctgagtgtctgaggagcacagcaggaccttccccatctggggacattctcatacgggcctgagcccaggagccac

SEQ ID NO: 42309 - DNA, 1924 bp, Artificial sequence
  DNA replication origin
ttcactaaggtaagacacaaagaaggacaaacaggttggaaggaggatgccttgagttgggaagaagctgaggttttaggtgtctctgggatattcaggtagagctgcctaataaccagttgaatgcatgggtcaggagaaatatctggttttgaggtatcaatttgggagtcatcagcaaagatatgatcattgaagccaggggagcaaatgagataaagaaaagagcggcctgtaatccgaggcttctctttcctcaagtggatcacttgaggtcagtagttggagacctgcctggccaatatggcaaaaccccgtctctactaaaaatacaaaaattattcgggcttggtggtgcatgcctgtaatgccagctacttgggaggctgaggcagaagaatagcttgaacccggtaggcggaagttgcagtgagcctagatcgcgccactgcactccagcctaggcgacagagcaagactctgtctcagaaagaaagaaagaaaaaaaaatcacatgtagagagaggacaagagcgctcaggccaaagccctgaagagcaccagcataaagcgttggacaaagaggagcctggaaagtaaaaaaagaattactaaggaagtagaagaaaaacaaggaaagtgcagtgtcatggaagtggtttaaggaggagggagtggtcaacagtgccaaatgctatcaagaaaccaagtaggataacctctgaaaagattctatgggggctgggcgcggtggctgacgcctgtaatcccagcactttgggagacagaggccggcgaattacaaggttagaagttcgagacaagcctggccagtatggtgaaaccccgtctctactaaaaatacaaaaaaatagctgggcgtagctactcgggaggctgaggcagaagaatcgcttgaacccaggaggcggagattgtagtgagccgagatcgtgccgctgcattccagcctgggcgacagagtgagactcttgtctcaaaaaaaaaaaaaaagaaaagattctatgggatttagtgagatgtttcatggcagaccctgatgagagagagcagtttcaagcaagtagtggaggcagattggagtgggttgaaagataagtgggaggtgggaaaatgaagacagttgggtgtaggcaactcttttgagaagtttgtagaagagaagagaaggaggtggttggagaggcagaattcttggtaattgtttatttgtttttagatggaagaggtctatgtttagatgctgttgggaaggagcaaggacaaattcctaggcttcgtagcaaaaagtcaagagcttcctctacggtggctctgtttactctctgcagcaggtcaggttatttgctgagggttacagggcagatggagcacttggggtttgaggggaaaggagaaggtttgaaatggtcactgtggagaacagagggagagctgactagtagggttgtgggtcaaaactgagggcctggtagaagctgggaaccatgggtttatagtggcacaaatctgtgaagttgaatagttttccccagcaatgtttagctgcctgggcgcaggcatggaaaaggcggacagttggaccgattcaagactgggatgttgccaggcggatgcgacaaatcagggaactgagggtatttaagaaagtgactaagtaagggaccaagatatctggtctgagcaaagtgaaggagaatcagagacaggtcctctatgagccaagccctaggaacactcaggaacatgaagaaagggttttggaaaagagagtgaacggcaagcagaggggggaagacctgagatgggatggaagggcagatatggggggagggggttgagcccggagacttgcctgtggggaaagcaggctgagggggaattttttaaggggcaggagggc

SEQ ID NO: 42310 - DNA, 910 bp, Artificial sequence
  DNA replication origin
aagtgaggagcgtctctgcctggccgcccatcgtctgggatgtggggagcgcctctgccccgccgccctgtctgggatgtgaggagcgcctctgcccggctgcgaccccgtctgggaggtgaggagcgtctctgcccggccgccccgcctgagaagtgaggagaccctccgcccggcagctgccccgtctgagaagtgaggagcctctccgcccggcagccaccccgtctgggaagtgaggagcatctccgcccggcagctaccctgtccgggagggaggtggggggggtcagccccccgccaggccagccgcccatccgggagggaggtgggggggtcagccccccgcccggccagccgccccatccgggaggtgaggggcgcctctgcccagccgcccctactgggaagtgaggagcccctctgcccggccaccaccccgtctgggaggtgtgcccaacagctcattgagaacgggccaggatgacaatggcggctttgtggaatagaaaggggggaaaggtggggaaaagattgagaaatcggatggttgctgtgtctgtgtagaaagaagtagacatgggagacttttcattttgttctgtactaagaaaaattcttctgccttgggatcctgttgatctgtgaccttacccccaaccctgtgctctctgaaacatgtgctgtgtccactcagagttaaatggattaagggcggtgcaagatgtgctttgttaaacagatgcttgaaggcagcatgctcgttaagagtcatcaccactccctaatctcaagtacccagggacacaaacactgcagaaggccgcagggtcctctgcctaggaaaaccagagacctttgttcacttgtttatctgctgaccttccctccactattgtcctatgaccct

SEQ ID NO: 42311 - DNA, 1487 bp, Artificial sequence
  DNA replication origin
catcttgcaccgcccttaatccatttaactctgagtggacacagcacatgtttcagagagcacagggttgggggtaaggtcacagatcaacaggatcccaaggcagaagaatttttcttagtacagaacaaaatgaaaagtctcccatgtctacttctttctacacagacacagcaaccatccgatttctcaatcttttccccacctttcccccctttctattccacaaagccgccattgtcatcctggcccgttctcaatgagctgttgggcacacctcccagacggggtggtggccgggcagaggggctcctcacttcccagtaggggcggctgggcagaggcgcccctcacctcccggatggggcggctggccgggcggggggctgacccccccacctccctcccggatgggcggctggcctggcggggggctgaccccccccacctccctcccggacagggtagctgccgggcggagatgctcctcacttcccagacggggtggctgccgggcggagaggctcctcacttctcagacggggcagctgccgggcggagggtctcctcacttctcaggcggggcggccgggcagagacgctcctcacctcccagacggggtcgcagccgggcagaggcgctcctcacatcccagacagggcggcggggcagaggcgctccccacatcccagacgatgggcggccaggcagagacgctcctcacttcctagatgtgatggcggccgggaagaggcgctcctcactttacagatgggatggcggccgggcagagacgctcctcactttccagactgggcagccaggcagaggggctcctcacatcccagacgatgggtggccaggcagagacgctcctcacttcccagacggggtggcggccgggcagaggctgcaatctcggcactttgggaggccaaggcaggcggctgggaggtggaggttgtagcgagccgagatcacgccactgcactccagcctgggcgccattgagcactgagtgaaccagactccgtctgcaatcccggcacctcgggaggccgaggctggcggatcactcgcggttaggagctggagaccagcccggccaacacagcgaaaccccatctccaccaaaaaaatacgaaaaccagtcaggctgaggcaggagaatcaggcagggaggttgcagtgagccgagatggcagcagtatagtccagcttcggctgggcatgagagggagaccatggggagagggagaccatggggagagggagagggagagggagagctctttttttcttttctttgagacagagtctcggtagtttctattttatgccttcaagttcacaaatattttcttctgcattgtctagtgtgctgtttgtccctccagtgtatttcttcaactcagacattgtagttttcatctctagaaattaaatttgggtgtttgaaaatattttttattcctctatttacctg

SEQ ID NO: 42312 - DNA, 1107 bp, Artificial sequence
  DNA replication origin
cctcccagacggggtggtggtcaggcagaggggctcctcacttcccagacggggcggctgggcagaggcaccacccacatcccagatggggcagcggccgggcaggggctgccccccactttggccaggcgggggctgcccccacctcccagacggggtagctggccaggtgggggctgccccccacctcccggatggggaggctggccgggcgggggctgccccccacctcccggatagggcggctgctgggcagagacgctcctcacttcccagacggggcggctgccgggcagaggggctcctcacttcccagacggtgtggctgccgggcggaagggctcctcacttctcagacaggggggccggtcagagatgctcctcacctcccagacggggtggcggtggggcagagacactcctcagttcccagaccgggtcgcagccgggcagaggcgctcttcacatttcagacggggtggtggggcagaggcgctccccatatcccagacgatgggcagccgggcagagacgctcctcacttcctagatgggatgacggccgggaagaggcgctcatcacttcccagactgggcagccaggcagaggggctcctcacatcccagatgacgggcggccaggcagagacactcctcacttcctagatggggtggcggccgggtagaggctgcaatctcagcactttgggaggccaaggcaggtggctgggaggttgaggttgtagcgagccgagatcacgccactgcactccagcctgggcaacgttgagcaatgagtgagcaagactccgtctgtaatcctggcacctcgagaggccgaggctggcagatccctcgcggtcaggagctggagaccagcccggccaaaacggcgaaaccccgtctccaccaaaaaatacgaaaaccagtcaggcgtggcggcatgcgcctgcaatcccaggcactcggcaggctgaggcaggagaatcaggcagggaggttgcagtgagtcgagatggtggcagtacagtacagccttggctcagcatcagagggagaccgtgcaaagagggaggagagggagagggagagggagagctcaacattc

SEQ ID NO: 42313 - DNA, 1752 bp, Artificial sequence
  DNA replication origin
gcagctgtttagaaaaatgtgcactaacggaaagatgttttatatataactggaaaaaaacaggtcgcagaacagaaggtatgtatagtgtaccatttgtcggagagagaacctgaataattagtatacgaatagaaaaaaaatctggatagcaaaatgttaatagtggttatttctgggagatgagtggcctttcattggtgtgttatatattactgcattgtttgaatttttacaacaacaacaaaagaacaacatattacctttgtaataagaaaaaatgaagatataaaaataaattcaatgaatgacttgctttcagggggcggtttgagttggaagagcttcagactgagcctggtacagtggcataaacatgggctttggcgtcagacagccctgagcggggccccattgccccacccccgaggaaggcgagggggggtggcagggggctgcggaaaggggctgggctgggttgggctgtctgcagctctagtccaggaggctgagacttcgagagggacttagagaaggcagacgcatcccgaactcgctggaggacaaggtgaggggcgttgatattggggttttatggaggtcagacagtggttccagacccctcgaacccatagccaggcagatgagcaattcttactgcaccactgcagctgaagcagaggtgacctggagtggggtgtaggcaatgaggacgactgagaaagtagtaggctgtacagactgggagcagagactagcggagggaggaggggagaaaaacggggaaccaggaatgttgggagggggacgaggaatacaaggagggaggggaacactgagggggagtgaagatccagagaagagaatcggggatgcagagagggattaaggaatactgaggggcagggtgtgcaaacgtaacacggaggaggatgtaagaaatgggaagaaggaattctggagtaaataggaaatgtgaggtaggaatagggagtagggagccaggctaagggaatacggaggggggcataaggaatgaggagcagggagcgggggaggggcagacaggctgggacggaggccccctagggaggcggaaaggggcgggaccacttccggcctagagaggggagggcagtctccgagtttcggaggggcttggagtgagtggacgcactcgggaattgtaggaggacgaggtgagcagccgggtcggcttttggatgagagccccgctaggggtcggccccaccctctgggatctggagaaaacctgccttaaggaccggatcgtaccggatccatccggctgggaagggaggggactggacccggtttggccgggcccaagatggaatcactagctcagtatttatttgaggagggggtgtaatagggaaggggcggaaccaagatgcgcctgtttggaggggggcgtgttaggaagaagggcggggccaagagacactggactctgtagggcgtgagtaggggaggggccgggtccaccagacactgcgacaattttggaggaaggcttgttgggcagggggcgggaccgaatggtactgcggacctggagaggggcgtgtgttggggcagagtgccagactgagaccacgaccattgcgcatgcgcactatgtttcgctagaaaggggcgtgttgagaagggccagcactgagaagagccagctgctgaatgcgcatgtgcacggtggacatcaaagaaagggctcgtgctgggaaagcg

SEQ ID NO: 42314 - DNA, 911 bp, Artificial sequence
  DNA replication origin
gtatttatttgaggagggggtgtaatagggaaggggcggaaccaagatgcgcctgtttggaggggggcgtgttaggaagaagggcggggccaagagacactggactctgtagggcgtgagtaggggaggggccgggtccaccagacactgcgacaattttggaggaaggcttgttgggcagggggcgggaccgaatggtactgcggacctggagaggggcgtgtgttggggcagagtgccagactgagaccacgaccattgcgcatgcgcactatgtttcgctagaaaggggcgtgttgagaagggccagcactgagaagagccagctgctgaatgcgcatgtgcacggtggacatcaaagaaagggctcgtgctgggaaagcgggcggggctgagagcggccctgcagccgacgcgcatgcgctctatcgacctgcggctgggtggggggtgcactgggaaaaggggcggggtcctcagagctgccgcgctggcacatcttcctggagaaggggagggtgcggctgcagagaattgagacttagaagctttgaattcctgtatctgagaacggagtcgttgggggtggtggagggggttggaattggggacctacggaaggtgaggatcagcctccaggcacaacaggggagaggacgttcagtgggcttcaacttgacccaggccttctccccttcaggctcagctcttgccaggccaaattgagacatgtctgacacaagcgagagtggtgcaggtctaactcgcttccaggtaaggcctctttctgtcctttccccagctgcttttcctctccagcccttgttgctgcccccaagtcccttggctcttcccctcccatccttgtccttctccacctactttcctgcctgggtgtccccctgcccagt

SEQ ID NO: 42315 - DNA, 925 bp, Artificial sequence
  DNA replication origin
agggccgttttaaatcctctctccatgtgcaggcatcagctgagtttggttcagtttttttcttactgctctaagaggacagcactgaggtcaatgcctcacaatttttgcactctccctcccccaacacacagaaatgctcttccacaccatgccaccactgctgggggcagaggtggagggtggggtaggggtggcatcagcaattcaagacttctttctaccgcttcagtgcctctttcattgatatgaagttaaaatctgctactgaatgctcacctgatttttggttcatttgaaggtgctttttttgtgtagatggttgttaaattggtgtccttccttggtgggggggcaatcagtggggacttctagtctaccatcttgcttcacctctctcccagccattgagtttggaggcaactagtcacagttgcctttagtgagggaagtgttcatgtggggtgggcacaggagccagactgtggtggtccccaggagtgatctgcacttgagcccattgagggtgcctactttctcagtctgtgatgctccagggaaaacagaagctagagagaagtttgggagtggactggggacaagagctagtcttagtgcatggaaaagacaataaaattctatactccaaggaagacccagtggggtacatgttaaagggggttggagagaggggacctgaggagtactggagaggctgggcacttggagtgcatgaggtccaaggcaggacctctttgtccttaggctgagggaggaggtatatggtgatgtggagcctctatatgggtggagtgggcaaagagtccctggctccgtgctcttaattcttttcctgagtcaggtgggtaggatggaatgactgctaaagtgactgggagaggttggtgagcaaggtcctgctctt

SEQ ID NO: 42316 - DNA, 1571 bp, Artificial sequence
  DNA replication origin
cccctctggaggcggaaagaggcaggaccacttccggccagggagggggataggctcagacacaaggagaggcttggagagagcagacgccttctggattcaagaagacgaggtgagctgaggtacctggctttagtgaagaccctgtgggggcttcctggctgcggcttcgacgtgcctgactccacacgcccctaaggtttgaagaaaacctgctggaggtttgggacctaaccgcatcaaagtcgcctttagcggtgcctggacccagttcgcacgggaggaagtaggaggcagaatcccctttgggccacagaaagtaacgatctggactcggttcgggccgtgaaagggagggatgcagacctagttgggaccgcagaaaggaaggatcgagaaatccttcagacggtagcaagaggggaggaggatacacacagttcgggagggagataggagacggcaggactccgtttaggctggagaaagggggcagtaccccgtttgggccacagaatggagggatcgggacccagagataagagtgggcagcatcccttttgagcaacggaaaggaccagactcagacaggagaaaggaggggatatgacccggttggttccggtttgaaagggaagagacaggacctggtagggtttgagaacaggaatacacagaaggttcatacagttggatttgggggtgaggtattcatgttgcagaaagggcggagctgcacacttgcagacgtggaaagaggggggagtggtgttggttggggaaggggtggtgcagagacgtaccgcagagcggagggagggggcttattaaaggaagggaagatgaagagaaatgctgcagagcggagggaggggggtgtattgggaaggggcggtgcgtggcagtaccgcagaggagagatgggcggtgttggggtaggggcggtgcggagtggtactgcagagcggagggagggggctagtgttgggggaagggttggatcgagatgtgatgcagttagaaagagtgggtcggggtggcgccaagatgttctgttgctctgagagcagggggcagatgtgggattgagctggttagaaactgtccggtttaccaaggcgcatgcgcgcggagggcattgaagaatggttcttttgggatagaggtgggcctaagatggggggtgggggcgcctctagtcggtgcgcatgcgcactatcgagttgcggagggggcgtgtaaaggggtggggtcgtagaactgactctctcggaggcaaaaggagctgggccttggaaaccagatggcctgggttttttaggtatgaaaacccaggagttgaagggattagggcccaaggttacatgagactcccctaagtcaggataggtgagatgtctgatgaatctccccctccctctcattctctaactcaggcccattcccctcaggctcacctgttactcggcctcccagaaagatggataggagaaatgactacggatatagggtgcctctatttcaggtgaggcctctctgcattctctctaggccatctgccccatcctgag

SEQ ID NO: 42317 - DNA, 1405 bp, Artificial sequence
  DNA replication origin
gccagagggtgcacagctaggaaatgagccatgattcaaacccaggctgtctggctccacagttcacacaattaagcaccacactactactgtacttctgaggtccagtaggataattctatccataaaaattatatttcatgtaatttactattatgcagctttagctctgtaaactaaatgtctaagatttcttattaccctctcatcaaatattggaaacccttttcccctatctgcctccctcactaatttaaagtccacagaaagccccatttaccagaatagccgctacggttgcggctgaagctgaaataggagttataaccctcaacgatagccaggggctctgtcagtgcatcccctggaaaaaaaaaatgtaagattaagtcagaggtaaaactagcatccgagaaacacaaaggcctggaattacagttgtaggctaattccttgcacacatcagagccagagttgggggtgacgggaatgaaatatccatgattagaggaggacctagaaagatgggaaatgtcagagaggaaattgatatcagaattagaaggcttggtggggggcggttagagactatgaagtggaggtggagaattaggtgggaaggggaaagaatcagagctaagcctgggggtctgaacgataggaggaagctggggatggggatggacatacgagaggatggtgggaatctgagctaagggtgagaggtaagagagagggaattaggggatctgaactgggggtggagggaaaaggaattaggggattctgaggggagataagagggtgaagaaataagaggacatctaagcttggggtgggaaatgaggtgggaattagggactttccgctgggaggagagatgggaatagataaggggtactggggttctgaggtggaaatgtgaaaaagaggaaattagactgagctggggtcaaagatggggtgggaattagaggatctgagcttggggcagggatgaagaattcgggggtttgacttggcggcggggagatggacagcgtatggaaggaggaaattcaggggactgagtttggggccggagaatgagtgggaatctgactagatatggggtttcgagaaggagctaaagtttgctgaagacaggagatggagtgcaattaggggatctagctagggtgggaaatggaagtttaagagggaagggacctgggtctaaggacaggactctaagaataggaaactgggaaagtaaaattacatgggacaggggacaaaagttagcgggaaagaaaaagtatgtagggatcctggaatccagagcgctcactggtcactttggtttcctggagacagacgatatccgcatccagctcgtccaaaatgcgccccacggccacggcgg

SEQ ID NO: 42318 - DNA, 1350 bp, Artificial sequence
  DNA replication origin
tctgcatgtttgtgaatatgtttctcagtgaagcagccaaaaaagacacaggagagacaagagtggagtctgttcatatgggtactacatacgtgacagatgcatgactttgctttacgtttcctagtctctggggtcccactccaaacgaaacgctggtagatcaacctcaggttcttctgccagttcttacctactttaaagctctccacatgagagcagcctgtgggaccctgaccaaactcgacctccagcaaccagtcccctaagccgccaggatcccccgacccgtctaggtcaccagagcagcttctccgtgtctgaggcctggacccaggccgggatctgcgccgggatccacgccaggccctgggccgcggtgcgggtgggggcgggggtggcggcgggggcgggggccgggctggaggcgggggtggggccgagagcccaggctggctgcgggagcgggcccggggctggggccgagggcggggcttgcggcgcgggcaaacgggcgaggagctgctgtgacagcgaagggggattgaagggagcaccttctcgtcgccgccgctgctgctccacgtcaagttctcctccggcgcgggctcacgctcttgtaatggctccagcttcatctcctcggcttcacgtctcgaagacgccttcgtagcccccgccgccgcctcctccattttccccgccttctcaaccgcctcctcaggagaggctcctcccccacctccggagatccagcggaccccagagccggagggcaaagaagtttctcgaacctgggccatcagatcactccccgacctgaggagcaaggcgtctggaaaacagctgcgactgtagatgaaaggagacagagacttctgtgaatgatctgcccagcgtcatggccgcggtgcgcagttagcgcccccaggacccctcccatcggcccttgagctcagcccgcggcttctgtcggctccacccactcaactgagaggcccctggagctgatggggagaccgaggcggttacctgcttcaaaggcgatcagatcatgccaggggactgggaacagaaggctagcgagcggtgggggtggggaacggcctgagctttaggacagaaaggatggaaacttctttaaaaaaggcgccaccctctgactgcttttttgcgccctgcgcagcctcgctttggtgcagcttcctctgacgttctttccctgtatcctaaaaaacacttgggtcaacattttctctccaaaatggctgaaaggacgcacttttggaaaatgaactcacaggaagaaagtgtccctctgtttctacctaacctatacttctgtgaccc

SEQ ID NO: 42319 - DNA, 1447 bp, Artificial sequence
  DNA replication origin
cggggcggctggccgggcagagggactcctcacttcccagtaggggtggccgggcagaggcaccactcacctcccggacgaggcggctggccgggcggggggctgacacccccacctccctcccagacggggcggctggccgggcgggaggctgacccccccacctccctcccggatggggcggccggccgggcgggggggctgactcccccacctccctcccggacggggcagctggccgggcggggggctgacccccccacctccctcccggatggggcggctggccgggcagaggggctcctcacttcccagtgggggcggctgggcagaggcacccctcacctcccggacggggcagctggccaggcggggggctgacccccccacctccctcccagatggggcggctggcctggtgggggctgacccccacctccctcccggatggggtggctgccgggcggagacgctcctcacttcccagacggggtggctggctgggcggaggggctcctcacttctcaggcggggcggttgccaggcggagggtctcctcacttctcagactgggcggctgggcagagacgctcctcacctccccgacggggtcacggcccagcagaggcgctcctcacatcccagacggggtggcggggcagaggcgctccccacatctcagatgatgggcggccaggcagagactctcctcgcttcctagatgggatggcggccgggaagaggcactcctcacttcctagatgggatggcggccgggcagagacgctcctcactttccagactgggcagccaggcagaggggctcctcacatcccagaggataggtggccaggcagagacgctcctcacttcccagacggggtggcgggcaggcagaggctgcaatctcggctctttgggaggccaaggcaggcagctaggaggtggaggttgtagcaagccgagatcacgccactgcactccagcctgggcaccattgagcattgagtgaacgagactccctctgcaatcccggcacctccggaggccgaggctggcggatcactcggggttaggagctggagaccagccccgccaacacagcgaaaccctgtctccaccaaaaaaatacgaaaaccagtcaggtgtggcggcgcccgcctgcaatggcaggcactcggcaggctgaggcaggagaatcaggcagggaggttgcagtgagccgagatggcagcagtacagtccagcttcggctcggcatcagggggagaccgtggaaagagagggagagggagaccgtggaaagagggagagggagaccgtggggagagggagagggagagggagagggagagggagcgagaataatcttaaggatgagttttctaaattggttctggggttggttctctaatctgattagatttaaaggccctaatgactcact

SEQ ID NO: 42320 - DNA, 980 bp, Artificial sequence
  DNA replication origin
gggaggtgggggggtcagcctcccgcccggccagccgccccgtctgggagggaggtgggggtgtcagccccccgcccggccagccgcctcgtccgggaggtgagtggtgcctctgcccggccacccctactgggaagtgaggagtccctctgcccggccagccgccccgtccgggagggaagtggggggggtcagccccccgcctggccagccgccccgtccgggaggtgaggggcgcctctgcccggccgcccctactgggaagtgaggagcccctctgcccggccagccgccccgtccgggagggaggtgggggggtcagtccccagcccggccagccgccccatccgggagggaggtgggggggtcagcccccgcccggtcagccgccccgtccgggagggaggtgggggggtcagccccccgcccggccagctgccccgtccgggaggtgaggggcgcctctgtccggccgcccctactgggaagtgaggagcccctctgcccggccaccaccccatctgggaggtgtacccaacagctcattgagaacgggccatgatgacaatggcggttttgtggaatagaaaggggtgaaaggtggggaaaagattgagaaatcggatggttgctgtgtctgtgtggaaagaagtagacatgggagacttttcattttgttctgtactaagaaaaattcttctgccttgggatcctgttgatctgtgaccttacccccaaacctgtgctctctgaaacatgtgctgtgtccactcagggttaaatggattaagggcggtgcaagatgtgctttgttaaacagatgcttgaaggcagcatgctcgttaagagtcatcaccactccctaatctcaagtacccagggacacaaacactgcggaaggctgcagggtcctctgcctaggaaaaccagagacctttgttcacttgtttctttgttcacttgtttatctgctgaccttc

SEQ ID NO: 42321 - DNA, 883 bp, Artificial sequence
  DNA replication origin
cgccccatctgagaagtgaggagcccctcctcccggcagctgccccatctgagaagtgaggagcccctctgcccggcagctgccccatctgagaagtgaggagtgtctccgcctggcaaccaccccgtctggcagccaccccgtctgggagggaggtggggggcagcccccgcccggccagccgccccgtctgggagggaggtggggggccagcccccacctggccagccaccccatccaggagggaggtggggggccagcccccacccggccagccaccccacccaggagggaggtggggggtcagcccctgcccggccagcctccccgtccgggagggaggtggggggtcagcctccgcccggccagccgacccgtctgggaggtgggttgcgcctctgcccgcccgccccttctgggaagtgaggagcccctctgcccggccaccaccccatctgggaggtgtaaccaacagctcattgagaatgggccatgatgatgacggcagttttgtggaatagaaaagggggaaaggtggggaaaagatagagaaatcagattgttgctgtgtctgtgtagaaagaggtagacatgggagacttcattttgttctgtactaagaaaaattcttttgccttgggatgctgtcgatctatgaccttgcccccaaccctgtgctctctgaaacatgtgctgtgcccactcagggttaaatggattaagggcggtgcaagatgtgctttggtaaacagatgcttggaggcagcatgctcgttaagagtcatcaccactccctaatctcaagtacccagggacacaaacactgcggaaggccgcagggtcctctgcctaggaaaaccagagacctttgttcacttgttta

SEQ ID NO: 42322 - DNA, 1293 bp, Artificial sequence
  DNA replication origin
tacacagacacagcaacaatctgatttctctatcttttccccacctttcccccttttctattccacaaaactgccgtcatcatcatggcccattctcaatgagctgttggttacacctcccagatggggtggtggccgggcagaggggctcctcacttcccagaaggggcgggcgggcagaggcgcaacccacctcccagacgggtcggctggccgggcggaggctgaccccccacctccctcccggacggggaggctggccgggcaggggctgaccccccacctccctcctgggtggggtggctggccgggtgggggctggccccccacctccctcctggatggggtggctggccaggtgggggctggccccccacctccctcccagacggggcggctggccgggcgggggctgccccccacctccctcccagacggggtggctgccagacggggtggttgccaggcggagacactcctcacttctcagatggggcagctgccgggcagaggggctcctcacttctcagatggggcagctgccgggaggaggggctcctcacttctcagatggggcggctgggcagagacgctcctcatctcccagacggggtggcggtcgggcagagacactcctcagttcccacacagggtcgccgcctgtcagaggcactcctcacatcccagacggggcagcggtgcagaggcactccccacatctcagacgatcggcagctgggcagagacgctcctcacttcctagattggaaggcggccgggaagaggcgctcctcacttcccagactgggcagccgggcagaggggctcctcacatcccagacgatgggcggccgggcagagatgcttctcacttcccagacagggtggcggccaggcagagactgaaatctcggcactttgggaggccaaggcaggtggctgggaggtggagattgtagcgagccgagttcacgccactgcactccagcctggacaacattgagcactgagtgaacgagactccgtctgcaatcccggcacctcgggaggccgaggctggaggatcactcacggttaggagctggagaccagcccggccaacacagcaaaaccccatctccaccaaaaaaacacgaaaaccagtcaggcgtggcggcgcgcgcctgcaatcacaggcacttggcaggctgaggcaggagaatcaggcagggaggttgcagtgagcagagatggcggcagtactgtccagcttcggctcagcatcagagggatactgtggaaagagagggagag

SEQ ID NO: 42323 - DNA, 866 bp, Artificial sequence
  DNA replication origin
agccccccccccaaaaagaggaaggtaataaacggggaggaatcagacaccagggaaaagaggtaatcggccacccacggcaatatggagacagggcagaaaggggagggaaatgccaatttctcctcacaggggtcagctagagtcctcctaatttccttaggaaaagtaagcctgttttccctaacggtatccccgcgcccagtcgaccctgccttccaggctgcttctcacctccccaaacagaagtggacgaaaagtaaagaaagtgaagaagaaaaaagtgaggggaggaaaactccgaaagtacacaaagaatcagagtgagcaatgaggttgagagcgaagtggaatgcagagtgccccagctggacagctggcagccctgtgagtggcctgacagaaaaagagccaccagctaggagaaagcatcagccccttaggcccgggtctgcaccgcgtccgcccagaggcctgttgggccagtaggcggctctgcaccctgctgcccacacctcaaccccatcccgcacactccgtcagcacatattgggaagccaggcagaaagcgacaaggaaggtgaagtgaacaagagggaacccgaaagctgaaaacctgcccccctgagagttgcctagatgaccggccccggctgtgaatgaaggtgtctgggcagacgcttgtgagtatgggtggggatacgtgtacgggcctgcctcaggacctgtggaagcacagatgaagacaggaaacagttgagatgtgatgggagttaaaagttaaaaccgaggacctctgacactcacagtcccagtgccaaccctaaagacgcagtccagatcttcctgcattcttttcttctcgc

SEQ ID NO: 42324 - DNA, 969 bp, Artificial sequence
  DNA replication origin
aggaggaggcagaaaaagattaagaagaagaagaaaaatgagaagaaaaagaagaaggaaaaggagaacgagaacgagaagaaggaggaggaggaggaggacaaaaaggaggagcatgaggaggaggagaggaagttggaggaggaggagcaagaggtaaaatagaggagaaagggaagaataaaagtagagaagaagaagaagaaggaggaagaggaagaagaatcagaagaacaagaaagagggaggtccatgccactgtagctgtcctggaggatctagttcaggaagacctcaatgcatggtgacatgcacaacgagggacaaggagccaccagtcacgtcccgcttaaaggacgaacaaccaggaagcttcttgtcgatgggatctttcctgagtgggaccgaaactttgatccacaaatcggcctacagaagctacagaggacacaggtgcaggctgaaccttgccctgaggatgccatcagccgactgcaagggtcaccgaaccccaagtctacaaggccaaggcagggaagagccccccccccaaaaagaggaaggtaataaacggggaggaatcagacaccagggaaaagaggtaatcggccacccacggcaatatggagacagggcagaaaggggagggaaatgccaatttctcctcacaggggtcagctagagtcctcctaatttccttaggaaaagtaagcctgttttccctaacggtatccccgcgcccagtcgaccctgccttccaggctgcttctcacctccccaaacagaagtggacgaaaagtaaagaaagtgaagaagaaaaaagtgaggggaggaaaactccgaaagtacacaaagaatcagagtgagcaatgaggttgagagcgaagtggaatgcagagtgccccagctggacagctggcagccctgtgagtggcctgacagaaaaagagccaccagctaggagaaagc

SEQ ID NO: 42325 - DNA, 844 bp, Artificial sequence
  DNA replication origin
ccccaaaaagaggaaggtaataaacggggaggaatcagacaccagggaaaagaggtaatcggccacccacggcaatatggagacagggcagaaaggggagggaaatgccaatttctcctcacaggggtcagctagagtcctcctaatttccttaggaaaagtaagcctgttttccctaacggtatccccgcgcccagtcgaccctgccttccaggctgcttctcacctccccaaacagaagtggacgaaaagtaaagaaagtgaagaagaaaaaagtgaggggaggaaaactccgaaagtacacaaagaatcagagtgagcaatgaggttgagagcgaagtggaatgcagagtgccccagctggacagctggcagccctgtgagtggcctgacagaaaaagagccaccagctaggagaaagcatcagccccttaggcccgggtctgcaccgcgtccgcccagaggcctgttgggccagtaggcggctctgcaccctgctgcccacacctcaaccccatcccgcacactccgtcagcacatattgggaagccaggcagaaagcgacaaggaaggtgaagtgaacaagagggaacccgaaagctgaaaacctgcccccctgagagttgcctagatgaccggccccggctgtgaatgaaggtgtctgggcagacgcttgtgagtatgggtggggatacgtgtacgggcctgcctcaggacctgtggaagcacagatgaagacaggaaacagttgagatgtgatgggagttaaaagttaaaaccgaggacctctgacactcacagtcccagtgccaaccctaaagacgcagtccagatcttcctgcat

SEQ ID NO: 42326 - DNA, 973 bp, Artificial sequence
  DNA replication origin
aggaggaggaggaggaggaggaggaggaggcagaaaaagattaagaagaagaagaaaaatgagaagaaaaagaagaaggaaaaggagaacgagaacgagaagaaggaggaggaggaggaggacaaaaaggaggagcatgaggaggaggagaggaagttggaggaggaggagcaagaggtaaaatagaggagaaagggaagaataaaagtagagaagaagaagaagaaggaggaagaggaagaagaatcagaagaacaagaaagagggaggtccatgccactgtagctgtcctggaggatctagttcaggaagacctcaatgcatggtgacatgcacaacgagggacaaggagccaccagtcacgtcccgcttaaaggacgaacaaccaggaagcttcttgtcgatgggatctttcctgagtgggaccgaaactttgatccacaaatcggcctacagaagctacagaggacacaggtgcaggctgaaccttgccctgaggatgccatcagccgactgcaagggtcaccgaaccccaagtctacaaggccaaggcagggaagagccccccccccaaaaagaggaaggtaataaacggggaggaatcagacaccagggaaaagaggtaatcggccacccacggcaatatggagacagggcagaaaggggagggaaatgccaatttctcctcacaggggtcagctagagtcctcctaatttccttaggaaaagtaagcctgttttccctaacggtatccccgcgcccagtcgaccctgccttccaggctgcttctcacctccccaaacagaagtggacgaaaagtaaagaaagtgaagaagaaaaaagtgaggggaggaaaactccgaaagtacacaaagaatcagagtgagcaatgaggttgagagcgaagtggaatgcagagtgccccagctggacagctggcagccctgtgagtggcctgacagaaaaagagcc

SEQ ID NO: 42327 - DNA, 1080 bp, Artificial sequence
  DNA replication origin
gatttgggagaaggtgcggttgggcgtggggggcaggagcccaggagcatctctagggcccagggcggtggtccaggattcactggggtgggggtgctgcgcggcgtttggcaggaagcagaggcctccctcctaccaggaagctaagctaggaaaagagcgaggagattgcaacagcagcaacggctcctggaagtccagtgtagcagaagggccgccaccgacaggaaggcagagggctaacaagcctagtgctggggatgctgctgccttccctttcgcctgcctcacaacccttctagacgttttccacgcctacagatcctaccctcctagcttttgcaagcgctcactctgttagtggcctgctgatcctccttcgccacaggctcctagcagaggcaacagtgaggggtctgatttgggcgcgggaggtggcactgccacctctccggcagtgcgggaggtgggcggcgcgggaggtgggccctgggctgcggaaccggaggatgggggttggtgggggccaggcgtgaaaattcgggtgggtgctggcgtaagaaatgcaggagactgggaagggtgatttgagggctgggggcatgaggacctgaagagcaccaggatggtatacaaaggtggccagaaagggaaataggtttgtggttggagcccagaaggaaaatggagtttaccaggaagagacaggaaagagaggtgagcaccaggcgggaggcgagggatgggaatgtacgggggatgaataccacagagccatggggaggggacatggagactgcatgtacagaaatggaaaaatgaggtgggagctaaaaaatggagaatgttgggagatgtgataggatggcgacagagggtcagggaataggcaaagtagcccacttccttttgctgtgctctcaactaccacggccaccacacctacctgttctctatctctcttgtgcagctaaacaagcctggaaggaagacattgtaggcaggcatccaagagtgtcttgatatctaacattgctactggacacacatgaacaacatgggtggcaatgtacctggtgc

SEQ ID NO: 42328 - DNA, 985 bp, Artificial sequence
  DNA replication origin
gttaattccaaatgaagagtatttggtacttctaatattgctacctactacactctgtaattttcaaaatatcatctaaaaatggttttacaaagaatttttaacaactaaatttgcaaaaataatgcaagctttttaagagcttagaaaaaaggcaaaggagaggtaataagtgctattattttgcttggagcccaggggaatggaaacagggcttgcagttgattattttctgcttcaagtctattttctgaattttacacagtgtccacattgtgcatgcaattcttctgcaatcagggaaacgaaaaaaataagaaaaagaaacaaaaaatctcctcaagaagtaaagttcaggaatgacctgtcaggaaaaattacaaagattaggtcaaatggcagactgagcactaagcactagcgcatttctcttgtcctaccaaaaatcctctccaatgacaagaaaggcaggtttttgtatataaagaataactccgtaagggcactgggaaaaggaaatcttgaaagatggaaagcagatgaggcagggccgctgaggggttgaaggtggaggtaggggtgaggagtctgggacggcgggtcgggggacataaaatgaaaacgttgaacctagcaggagagggagagggggctttggacctggtacctgtggatttgggagaaggtgcggttgggcgtggggggcaggagcccaggagcatctctagggcccagggcggtggtccaggattcactggggtgggggtgctgcgcggcgtttggcaggaagcagaggcctccctcctaccaggaagctaagctaggaaaagagcgaggagattgcaacagcagcaacggctcctggaagtccagtgtagcagaagggccgccaccgacaggaaggcagagggctaacaagcctagtgctggggatgctgctgccttccctttcgcctgcctcacaacccttctagacgttttccac

SEQ ID NO: 42329 - DNA, 781 bp, Artificial sequence
  DNA replication origin
gagaggagagccgggtgtttgacaggaagaggaggcctctctctgggcaggaagctgcgctacggaaagagggaggagactgccgcggcgacagcagggactggtggaatcccgatgtggctgaggggccgccaccgccagcagggaggcggagggctagcgagccaagcggtggggacgccgctgccttcctctttgcctgtctcgccgccctcctagacacgctcctcatctacggatcctaccctccccgctcttgcaagcattcactcggccggtcgcctgctgaccctccttcgccacaggctcgtagcggaggcagcagcgaggtgtccgatttgggcacgtgaggcccgcgatccccggcggtggacgccaggcagggcaaggccattagtgggcgccagaatggagagggggatgggaaggaatccagcaggagacatggggtggagttgggcgccaggcaagggtggggtgggggagtgcggtgagcaacatgaaaagggggtaggaacgggagccagacaaggatttgaaggtgagcgccgggaagcaagggcggtgggtaccagagaagtggttagggtaggcagggggtgttgtggacagcagctgggacgctcagggaaggagggcagtgggtgccggtcaaggcctctttgcaaggggattggaagtggacgccagtggtagcaaggggttccgggagggcagtgggctctgagctaggaggaggtggcccagccacttctgcagagttcctaaccccagacagctc

SEQ ID NO: 42330 - DNA, 971 bp, Artificial sequence
  DNA replication origin
ccgggccctcctcggcctcctccctcaacacaggccctgcggcctgaccggagcccgcggtctccacgtcgccacccaccgggtcaagcagcaccaggaagaagtcgtcgccgccgccgccgccgccgccgctaggttgatcggtcctcggcgccaacaggcttgggccagggccccgtgatgccgtgctggcctcctcgcgccgccgcccgggcccgccatcttgggggccccggagcagcaggaggcggcgcgtggggacctggccagccggcgagtcagggcctcggtggactcggccgccacccgcggggataccgccgccgccgccgccctgtagtgtcccgcgagccgggagcagcttcgggatttccatctctgcgtccgagaggctcggctggaaccagagccgaggaggaggcgcgatcccgccccctgccgcgggcctgaacacgttcctgaaaggggaaaaaaaaatgtgcaatgcgcagaaactggccctatcagatattaaaacgtatttaacgccacagtgatttaaatattctggtactgggtctctggaacagaatagaaagcccagaggtagagcctggtatgcataaatacgttctacagttaatataagtaagtaattaagggggtcttctgaggtaatggggaaatgacgacagcttgttcagtaatgctgtggaacacctaggtatctatccgctggaagcaattttaatccatgactcattgtatatacccaaataaacacaccccagcccctcccagtgttagatatgttgcttcgtactttctgtgtgttaaaatttgctggctggctggctggctggactgatggatgaaagacaattcctgagagaaaaaactgtctctgtgtcagcattaaaccaccatagcgctggcagttctgctgaaaatgtccttccccttcccacctccccgcgggacaacttccatat

SEQ ID NO: 42331 - DNA, 1430 bp, Artificial sequence
  DNA replication origin
cacatgatgaggaatgaatagagttggttcataccaaaaatgagctgccagtcacagtgataagatctgtttctttctgagaaccatggtttcctgctgcattggggaatccaaactgggtttctccctcctgtccaaagaagtcagagtcaggatgtacgttccactccgctttggttggtgtcagtagttctgagacactgttttcacaaagggtgctcgaaggagtcagagcatctgtgtccactgttagcttactgctgggtgtcaaagcctgaggctctggactggagtttttcatggccaaagagtccagagatcccaatggccccacacttacacttgagacctcatccatatttaaggagctctgctgaaaaccagtggccgccgttccaaaaaagagagaggtatccagactttgaggagggtcgctggtggccatcaaggacggagggtccacagcctgccctacggaattattattattagcagggaggtgccctgccagagtcgagctcacagaagccacatcaatagtcaagattccagagttcaccaatgctgtgtccagcaatgcagcagaagtactgtcaggtacatcagagaagagagacactatctctgcatcactgagatcattctgtctctggctggtaagttcactgctgggtgtgagagaatttgctgcttctagctgagctaagagatcctggcccaccttatgccttttaaccatgtgcgtcttcatgctgtgcttggatgtgaagagtttattacaagaggagatcgggcaacggcttttccaagtgtccacatcctgcaggtgtttcttggagtgaatgtagaggctactgcgagcagagaacctggcacagcagcctgccacaggacacacgaaaggctttgtgcccaggtgggttatgctgtggcctttcagatgttccgccctcgtgaaagatttcccacagccttccacagggcacatgaacctccggtcatcgtcgtgctttcttttgtgccttaagagtttggacatgctagtgaagttccagccacagccatcaaagtcacaaaggaaaggtctctcgccggtgtgactccgcaggtgaattttcagcctacaagccttgtcatattgtttgctgcagccaggaaaagagcaggaaaacagttcctgttccctgaaatgggcgcggttatgggaaaacagagcactcactgtgataaatgtcttcttgcagccagaaaacgcgcactggtaaggcctctccggttcgaagtggctgcgctggtgggcgctgagtttggcctgcgtggggaagctctcctcgcacacctcgcatttgaatgagttctcctgctcatggcccttcatgtgcgccttgaggttgtacactgtggtgaagctcttgccacagccctctgcc

SEQ ID NO: 42332 - DNA, 1665 bp, Artificial sequence
  DNA replication origin
ttttgcaaaccaaaaagaaatgactgcacttaaatatttagtccagaatatcctcaaaattgactgtaataaaagttagccacatggcaaggaatgaatagagttgcttcataccaaaaatgagctgccagtcacagtgataagatttctttctttctgagaaccatggtttcctgctgcattggggaatccaaactgggtttctccctcctgtccaaagaagtcagagttaggatgtacgctccactccgctttggctggtgtcagtagttctgagacactgttttcacaaagggtgctcgaaggagtcagagtatctgtgtccactgttagcttactgctgggtgtcaaagcctgaggctctggactggagtttttcatggccaaagagtccagagatcccaatggccccacacttacacttgagacctcatccatatttaaggagctctgctgaaaaccagtggccgccgttccaaaaaagagagaggtatccagactttgaggagggtcgctggtggccatcaaggacggagggtccacagcctgccctacggaattattattattagcagggaggtgccctgccagagtcgagctcacagaagccacatcaatagtcaagattccagagttcaccaatgctgtgtccagcaatgcagcagaagtactgtcaggtacatcagagaagagagacactatctctgcatcactgagatcattctgtctctggctggtaagttcactgctgggtgtaagagaatttgctgcttctagctgagctaagagatcctggcccaccttatgccttttaaccatgtgcgtcttcatgctgtgcttggatgtgaagagtttattacaagaggagatcgggcaacggcttttccaagtgtccacatcctgcaggtgtttcttggagtgaatgtagaggctactgcgagcagagaacctggcacagcagcctgccacaggacacacgaaaggctttgtgcccaggtgggtaatgctgtggcctttcagatgttcggccctcgtgaaagatttcccacagccttccacagggcacatgaacctccggtcatcgtcgtgcttccttttgtgccttaagagtttggacatgctggtgaagttccagccacagccatcaaagtcacaaaggaaaggtctctcgccggtgtgactccgcaggtgaattttcagcctacaagccttgtcatattgcttgctgcagccagggaaagagcaggaaaacagttcctgttccctgaaatgggcgcggttatgggaaaacagagcactcactgtgataaatgtcttcttgcagccagaaaacgcgcactggtaaggcctctcgggttcgaagtggctgcgctggtgggcgccgagtttggcctgcgtggggaagctctcctcgcacacctcacatttgaacgagttctcctgctcatggcccttcatgtgcgccttgaggttgtacacggtggtgaagctcttgccacagccctccgcagggcagccgaagggccgcagtttatcgtgcgactgcaggtgcctcttgagcttgtaagaggtggtgaaggtccagccgcagccacccagggggcatttgaagggcctctggccctggctgctgctgtgcgtcagcaggtgcatcttcagctggtg

SEQ ID NO: 42333 - DNA, 1004 bp, Artificial sequence
  DNA replication origin
cgcagagcagcccgcggggttcgcgccgctctcgtccccctggagccccgggcccgccttggcctcctccctcaacacaggccctgcggcctgaccggagcccgcggtctccacgtcgccacccaccgggtcaagcagcaccaggaagaagtcgtcgccgccgccgctaggttgatggggcctcggcgcgaacaggcttgggccagggccccgtgatgccgtgctggcctcctcgcgccgccgcccgggcccgccatcttgggggccccggggcagcaggaggcggcgcgtggggacctggccagccggcgagtcagggcctcggtggactcggccgccacccgcggggataccgccgccgccgccgccctgtagtgtcccgcgagccgggagcagcttcgggatttccatctctgcgtccgagaggctcggctggaaccagagccgaggaggaggcgcgatcccgccccctgccgcgggcctgaacacgttcctgaaaggggaaaaaaaaatgtgcaatgcgcagaaactggccctatcagatattaaaatgtattcaacgccacagtgatttaaatattctggtactgggtctctggaacggaatagaaagcccagaggtagagcctggtatgcataaatatattctacaattaatataagtaattaaggaggtcttctgaagtaatggggaaatgacgacatcttgttcaataatgctgtggaacacctaggtatctatctggtaaaagcaattttaatccgtgactcattgtatatacccaaataaacacacgccagcccctcccagtgttagacatgttgcttcatactttttgtgtgttaaaatttgtttattggctggctacctggctggattgatggatgaaagacaattcctgagagaaaaaactgtctctgtgtcagcattaaaccaccatagtgctggcatttctgcggaaattgcccttccccttcccacctctgcgcgggacaacttccat

SEQ ID NO: 42334 - DNA, 964 bp, Artificial sequence
  DNA replication origin
gccccgtccgggaggtgaggggcgcctctgcccggccgcccctactgggaagtgaggagcccctctgcccggccagccgccccgtccgggagggaggtgggggtgtcagccccccgcccggccagcccccccgtccgggagggaggtgggggggtcagcccccctgcccggccagccgccccgtccgggagggaggtggggggggtcagcccccccgcccggccagccgccccgtccgggaggtgaggggcgcctctgcccggccgcccctactgggaagtgaggagcccctctgcccggccagccgccccatccgggagggaggtgggggtgtcagtcccccgcccggccagccgccccgtccgggagggaggtggggggggtcagcccccctgcccggccagccgccccgtccgggaggtgaggggcacctctgcccggccgcccctactgggaagtgaggagcccctctgcccggccaccaccccgtctgggaggtgagcccaacagctcattgagaacgggccaggatgacaatggcggctttgtggaatagaaaggcgggaaaggtggggaaaagattgagaaatcggatggttgccgtgtctgtgtagaaagaagtagacatgggagacttttcattttgttctgcactaagaaaaattcctctgccttgggatcctgttgatctgtgaccttacccccaaccctgtgctctctgaaacatgtgctgtgtccactcagggttaaatggattaagggcggtgcaagatgtgctttgttaaacagatgcttgaaggcagcatgctcgttaagagtcatcaccaatccctaatctcaagtaatcagggacacaaacactgcggaaggccgcagggtcctctgcctaggaaaaccagagacctttgttcacttgtttatctgctgaccttccctccactattgtcccatgaccctgccaaat

SEQ ID NO: 42335 - DNA, 1031 bp, Artificial sequence
  DNA replication origin
ccacctccctcccggatggggcggctggccgggcagaggggctcctcacttcccagtaggggcggccgggcagaggcgcccctcacctcccggacggggcggctggccgggcgggggggctgaccccccccacctccctcccggacggggcggctggccgggcaggggggctgacccccccacctccctcccggacgggggggctggccgggcggggggctgacacccccacctccctcccggacggggcggctggccgggcagaggggctcctcacttcccagtaggggcggccgggcagaggcgcccctcacctcccggacggggcggctggccgggcggggggctgtcccccccacctccctcccggacggcacggctggccaggcggggggctgacccccccacctccctcccggacggcacggctggccaggcggggggctgacccccccacctccctcccggatggggcggctggccgggcgggggctgaccacccccacctccctcccggacggggtggctgccgggcggagacgctcctcacttcccagatggggtggctgccgggcagaggggctcctcacttctcagacggggtggttgccaggcagagggtctcctcacttctcagacggggcggccgggcagagacgctcctcacctcccagacggggtctcggccgggcagagacgctcctcacatcccagatggggcggcggggcagaggcgctccccacatctcagacgatgggcggccgggcagagacgctcctcacttcctagatgtgatggcggctgggaagaggcgctcctcacttcctagatgggatggcggccgggcggagacgctcctcactttccagactgggcagccaggcagaggggctcctcacattccagacgatgggcggccaggcagagacactcctcacttcccagacggggtggcggccgggcagaggctgcaatctcggcactttgggaggccaaggcaggcggctgctccttgccctcgggccccgcg

SEQ ID NO: 42336 - DNA, 1272 bp, Artificial sequence
  DNA replication origin
tccacaaaaccgccattgtcatcatggccccttctcaatgagctgttgagtacacctcccagacggggtggtggccgggcagaggggctcctcacttcccagtaggggtggccaggcagaggcgcccctcacctcccggacggggcggctggccgggcggggggctgacccccccacctccctcccggacggggcggctggccgggcagaggggctcttcacttcccagtaggggcggccgggcagaggcgcccctcacctcccggacaaggcggctggccgggccgggggctgaccccccaacctccctcctggagggggcggctggccaggcggggggctgaccccctcacctccctcccggacggggtggctggcctggtgggggctgacccccacctccctcccggacggggtggctgccgggcggagatgctcctcacttcccagacagggcagctgccgggcggaggggctcctcacttctcagatggggcagttgccaggcagagggtctcctcacttcccagacggggcggctgggcagagacgctcctcacctcccagatgcggtcgcggctgggcagaggtgctcctcacatcccagacggggtggcggggcagaggcactccccacatctcagacgatgggcggctgggcagagaccccgctcctcacttcctagatgggatggcggccgggaagaggcgctcctcacttcctagatgggatggcggccgggtagagacgctcctcactttccagactgggcagccaggcagaggggctcctcatgtcccagacgatgggcggccaggcagagacgctcctcacttcccagacggggtggcggccgggcagaggctgcactcttggcactttgggaggccaaggcaggcggctgggaggtggaggttgtagggagctgagatcacgccgctgcactccaggctgggcaccattgaacactgagtgaaccagactccgtctgcaatcccggcacctcgggaggccgaggctggcggatcactcgcggttaggagctggagaccagcccagccaacacagcgaaaccccatctccaccaaaaaattacgaaaaccagtcaggcgtggcggcgcgcacaagcaatcgcaggcactcggcaggctgaggcaggagaatcaggcagggaggttgcagtgagcagagatggcagcagtacagtccagcttcggctcggcatcagagggagaccgtggaaagagagggagagggagaccgtggggaga

SEQ ID NO: 42337 - DNA, 886 bp, Artificial sequence
  DNA replication origin
tctgggaagtgaggagaccctctgcctggcaactgccccatctgagaagtgaggagcccctccgcccggcagctgccctgtctgggaagtgaggagcatctccgcccggcagccaccccgtccgggagggaggtgggggtcagcccccaccaggccagccaccccgtccgggagggaggtgagggggtcagccccccgcctggccagccgccccctccaggagggaggttggggggtcagcccccggcccggccagccgccttgtccgggaggtgaggggcgcctctgcccggccgcccctactgggaagtgaagagcccctctgcccggccagccgccccgtccgggagggaggtgggggggtcagccccccgcccggccagccgccccgtccgggaggtgaggggcgcctctgcctggccacccctactgggaagtgaggagcccctctgcccggccaccaccccgtctgggaggtgtactcaacagctcattgagaaggggccatgatgacaatggcggttttgtggaatagaaagcggggaaaggtggggaaaagattgagaaatcggatggttgccgtgtctgtgtagaaagaagtagacatgggagacttttcattttgttctgtactaagaaaaattcttctgccttgggatcctgttgatctgtgaccttacccccaaccctgtgctctctgaaacatgtgctgtgtccactcagggttaaatggattaagggcggtgcaagatgtgctttgttaaacagatgcttgaaggcagcatgctcgttaagagtcatcaccactccctaatctcaagtacccagggacacaaacactgcggaaggccgcagggtcctctgcctagaaaaaccagagaccttt

SEQ ID NO: 42338 - DNA, 1765 bp, Artificial sequence
  DNA replication origin
gataatcccaactggggacagtactgggaatagcgagggttgtgactgggttatgggcagcatcttgtccgtggagggtgtctgcttgggcctgatccagatatgttccctgttctccagggtgagggaggaggagaggatgacagaaatgtcatgccaggtaaggtcataagattgagtgatatacagaaattccttgtggaaggatgtggggtctgtggaaaaggagtcaagtctcttttcaatctgagagccatcagctacagagaaaggaacatgaactcagactatgccttcagtctccataacatcccccaatggggggactttagagggcctctgggcctgtgcctggttttcagcagcagaagggggctgagtatgagatcagttatggtggggagagggtagaggagatgggggataggaacaagggggtgggggagccgaaggggaaggaggaggagacggtggtgggagtggggctggggggcgggtggggattcgtcgtctggataaaaatcagaggaggaggaggaggagggcttgtctggaaggggaggcattttggcagatttcttgtttaagaggagcagctggtaaggtgaacaggactgatagagggaattggcaaaagcctggatatagagcatcttggaccacttgccattgtgctggaggacattttctaaatcatgttgaatttggaagtcaaaagtcccatctgggccagcagccatcattgtccagcttatactggggccaggccacattacaaaggaaaataaggcatttagttttaatggagtcggccaagcccagtgctcggaggttccagatgagacatctgagaggggtgtctggaggggatttcgaggagccctgccccatatgagtggctgggagggtgaaaaatgtggagtaggggagtgagtatcccaattctaaccatgagaagggatggagaagagccggggtgcccccgtagctcttcgtggtcccccagaaaccagagtggtcagagcgtgagcattctgagggcatcccctgagaaggcaggccagggtcacccagtggtgaccggggaatcctcttacctggcgctggggttttctggctaacaggcagaaatatgagaggaatccagagggtggaaagggaaactcacccacaattggaggccggtgttggatgcaatgggagtggtccttgccagagccacagagaggaaagagggggaaggagaaagcggtgggaggatggggccgagagaaagaattcctccgtagaaagacgaaagtgggcagggctgggaaccaggggccaatcaggatttgggaattagcccggggcgagctgccgctgcctcttccttcccaggttgcaaggaagtacctctcccttgtgggatctagaccccatcccaggttttggcaccaaatgttagaacgaaagggagaaaggaatggagcagaggcagctcaagggcaacacaggtttattgggagaaaggcctgcagatagggggtactagctagcgtcggagccccagtccttcttacaggctggggcagttctaggcctgggcaggagaggtcggggatggttgagaaaatggggcgggggtggtgtgtttggctgctgataaaggaaggaatttactgcagtcaggggttaggcctggaacctgtctgacaggatgaatttattgccctcagggtttaggcctgggacctttccaacaggatgtttctcacagctcagg

SEQ ID NO: 42339 - DNA, 1214 bp, Artificial sequence
  DNA replication origin
ggggtaaggttatagattaacagcatcccaagacagaagaatttttcttagtacagaacaaaatggagtctcctatgtctacttctttctacacagtcacagtaacaatctgatctctctttcttttccacacatttcccccttttctatttgacaaaaccgccatcatcatcatggcctgttctcaatgagctattgggtacacctcccagatggggtggtggccgggcagaggggctcctcacttccaagacggggtggccgggcagaggtgccccccacctcccagacggggtggcggctgagcgggggctgccccccacctcccggacggggtggctggccgggcgggggctgccccccacctcccggacggggtggctgccgggcggagacactcctcacttcccagatggggtggctgccgggcggaggggctcctcacttcccagaaaaggtggctgccaggcggaggggctcctcacttctcagaccgggcggccggtcagagacgctcctcacctcccagatggggtggcggtggggcagagacactcctcagttcccagacggggtcattgccgggcagaggcactcttcacatctcaggtggggcagcggggcagaggcactccccacatcccagacgatgggtggccgggcagagacgctcctcacttcctagacgggatgacggctgggaagaggcactcctcacttcccagactgggtggccgggcagaggggctcctcacatcccagatgatgggcagccaggcagagatgctcttcacttcctagatagggtggcggctgggcagaggctgcaatctcagcactttgggaggccaaggcaggtggctgggaggtggaggttgtagcgagccgagatcacactactgcactccagcctgggcaacattgagcactgagtgagcgagactccgtctgcaatcccggcacctcaggaggccgaggctggcagatcactcacggtcaggagctggagaccagcccggccagcacggcgaaaccccgtctccaccaaaaaatacgaaaaccagtcaggcgtggtggcacgtgcctgcaatcccgggcactcggcaggctgaggcaggagaatcaggcagggaggttgcagtgagccgagatggcagcagtacagtccagcctcggctcggcatcagagggagaccatgcaaaggggagaggga

SEQ ID NO: 42340 - DNA, 1281 bp, Artificial sequence
  DNA replication origin
agggttgggagacattgggtaaggacagggcaggttcagtgacaagagcagtttggaatttttggagactgggaagtatgttatgtgtggggcttagaggttcattgagagagccaggagggcaaagttcctaaagaaacctgccagtcctaagaaagagataatttcattttttgaggaaggcggaggcaagctgtttattaaggctgcctgtgctggggtcatggcttgggccctgggggagagttggactcctaagtatattactgttgggtggacagttgggctttggagggggagaccctatatccttttctagcaagaaactttagaagggtaattgtgtgagtttgagagtcttttagggaggggctgcagagaagaagatcatctacgcattgaaggagacagctgggggaaaggtctaaggaggtgaggtcttgggctagagcttgtccaaataagtgagggctgtccctgaagccttgagggaggacagtccatgtgagttgtgattaaaaggtgtcaggattagtccaggcaaaggcaaagagattttgggaatcagggtgtaggggaatggtaaagaaggcatcctttaagtcaattgcaatgtagtgggtggtattagaggggatgagagagagaagtgtatagggattagggactatgggatgaatagggaggacagcctggttgatggcttggagatcctggacaagtcagtacaagccatctgattccttaacagggaggatgggggttttatatggagactgagtgggtctaaggagaccgcatgagcagagtttgtttataatgggctgcaggcctttttggtgggtgagagagatggggtattggggtaggttgtgaaatttggagaggtcttttaagtggattttgatgggatcatggtgagcagctagggatgggtggtgctgtcccacactactgggttaacaagagaggcagggagtgggtactggggagagaggtcaggtgtcggactagcagaaaggagcaggagagactctggttgagggaggcaggaaaaggtgataaaagccttaaatttggctaagaggcttcagcctagaatgggggtagggcagtgaggcatgataaggaaagaatgtgagaaaatggtattaaacagggagcagtacaggggtctggtggcatggggattggagacaagtccatcaactcccacaactgagacttgagagggatgagttggtcctacaaattcaggtaaatctgaataggtggccccag

SEQ ID NO: 42341 - DNA, 1076 bp, Artificial sequence
  DNA replication origin
cttttccccacatttcccccttttctattcgacaaaactgccatcgtcatcatggcccattctcaatgagctgttgggtacacctcccagacggggtggtggccaggcagaggggctcctcacttcccagacgtggcagccaggcagaggggccccccaccccccagatggggaggccgggcagaggcgccccccacctcccagacggggcggctgctgggcgggggcaccacccacctcccagatggggtggctgccaagcgggggtgacccccacctcccagacggggtggctaccgggcgggggcgcccctcacctcccagatggggcagcccggttggagacactcctcacttcccagacgggacggctgccgggcggaggggctcctcacttctcagactgggcagctggacagaggcgctcctcagttcccagatggggttgcggccgggcagaggtgctccccacatcccagaagatgggcggccaggcagagatgctcctcacttcacagaagggatgacggccgggaagaggcactcctcatttcccagactgggcagccaggcagaggggctcctcacatcccagatgattggtggacaggcagagacgctcctcacttcctagacggggtggcggccaggcagaggctgaaatctcaggactttgggaggccaaggcaggcggctgggaggtgggggttgtagcgagccgagatcatgccactgcactccagtctgggcaacattgagcactgagtgagcgagactccatctgcaatcccggcacctcgggaggctgaggcaggcagatcactcgaggtcaggagctggagaccagcctggccaacatggcaaaaccccgtctccaccaaaaaatacaaaaaccagtcaggcgtggtggtgcgcacctgcaatcccaggcacttggcaggctgaggcaggagaatcaggcagggaggttgcagtgagccaagatcgcggcattacagtccagccttggcaacagagggagaccatggaaagtggaagacggagatgagggagagggggagaccatggaaagcggg

SEQ ID NO: 42342 - DNA, 1070 bp, Artificial sequence
  DNA replication origin
cgagggcgcagccgagtcttgcgggagtcgccccgaaagcgtcgggtttgtgtggggttagcgggggccgccgcgccacctgcgcctcgcccgccgccgcctcggggaaaacccgaagaggaggcggaccaggagaagagcaaagaaaagcagcccgtctggatttgtttgcccaggactggcgccgcgcacgcggatccccgaggggagtgcggtcggagtcaccgcgcccccgcctccccgcccgggcgactgaggccggggggttggagcactgcccccgcgcacagtccccgaacgcccgacgtctccgcgcaggttattgaagcagctgggcctggggcgcccactaatgtggccctgagggccggagcccgcaccgacgggagcgggagccggagcagctgcgggcgccgagtggccggtacgcccggcctagcgcgcctgcgtgcgtggccacctcgctccccgcttctgcctggctttccggcttaattttcctcggcgggattaaagttggaaattgaccggagaattgagttgccggggaacagagccccggccgccgccagcgcgatgttcccgcagagccggcacccgacgccgcaccaggctgcaggccagcccttcaagttcagtatcgcggagtccctggaccggattaaagaggaattccagttcctgcaggcgcagtatcacagccttaaattggaatgtgagtaaccggcaagtgaaaagacagaaatgcagaggcactatgtgatgtattacgaaatgccatatggattaaacattgaaatgcacaaacagactgaaatcgccaagagattgaatacgatttgtgcacaagtcatcccatttctgtctcaggaacatcaacaacaggtggcccaggctgtcgaacgtgccaaacaggtgaccatggcagagttgaatgccatcatcgggcagcagcagttgcaagctcagcatctttcttatggccacggacccccagttccccttacgcctcacccttcgggacttcagcctcctggaatcccgcccctcgggggcagtgccggtcttct

SEQ ID NO: 42343 - DNA, 1321 bp, Artificial sequence
  DNA replication origin
atgtttcagagagcacagggttggggataaggtcacagatcaacaggatcccaaggcagaagaatttttcttagtacagaacaaaatgaaaagtctcccatgtctacttctatccacacagacccggcaaccatccgatttctcaatttcttccccacccttcccgcctttctattccacaaaaccgccattgtcatcatggcccatccccagtgagccgctgggcacacctcccagacggggtcgtggccgggcagaggggctccccacttcccagtaggggcggccgggaagaagcgcccctcacctcccggatggggcggctggccgggcggggggctgacccccccaccaccctcccggacggggcggccggccaggcagaggggctcctcacttcccagtaggggcggccgggcagaggcgcccctcacctcctggatagggcggctggccgggtggggggctgacccccccacctccctccatcccggacggggtggctgccgggcggagacgctcctcacttcccagacggggtggctgccggacggaggggctcctcacttctcagacggggcggttgccaggcagagggtttcctcacttctcagacggggcagccgggcagagacgctcctcacctcccagacagggttgcagcccagcagaggcgctcctcacatcccagacagggcggcggggcagaggtgctccccacatctcagacgatgggcggccgggcagagacgctcctcacttcctagatgggatggcagcggggaagaggcgctcctcgcttcctagatgggatggcggccaggcagagacgctcctcactttccagactgggcagccaggcagaggggctcctcatatcccagacgatgggcggccaggcagagacgctcctcacttcccagacggggtggcggctgggcagaggctgcaatctcggcactttgggaggccaaggcaggcggctgggaggtggaggttgtagcgagccgagatcacgccactgcactccagcctgggcaccattgagcactgagtgaacgagactctgtctgcaatcccggtgcctcgggaggccgaggctggctgatcactcgcggttaggagctggagaccagcccggccaacacagcaaaaccccgtctccaccaaaaaaaaaaaacgaaaaccagtcaggcgtggcggcgcgcgcctgcaatcgcaggcactcggcaggctgaggcaggagaatcaggcagggaggttgcagtgagccgagatggcagcagtaccgtccagctttggctcggcatcagagggagac

SEQ ID NO: 42344 - DNA, 918 bp, Artificial sequence
  DNA replication origin
ctgcccggccgcccatcgtctgagatgtggggagcacctctgccccgccgccctgtctgggatgtgaggagcgcctctgctgggctgcaaccctgtctgggaggtgaggagcgtctctgcccggctgccccgtctgagaagtgaggaaaccctctgcctggcaaccgccccgtctgagaagtgaggagcccctccgtccggcagccaccccgtctgggaagtgaggagcgtctccgcccggcagccaccccgtccgggatggagggaggtgggggggtcagccccccacccggccagccgccctatccaggaggtgaggggcgcctctgcccggccgcccctactgggaagtgaggagcccctctgcctggccggccgccccgtccgggagggtggtgggggggtcagccccccgcccggccagccgccccatccgggaggtgaggggcgcttcttcccggccgcccctactgggaagtggggagcccctctgcccggccacgaccccgtctgggaggtgtgcccagcggctcactggggatgggccatgatgacaatggcggttttgtggaatagaaaggcgggaagggtggggaagaaattgagaaatcggatggttgccgggtctgtgtggatagaagtagacatgggagacttttcattttgttctgtactaagaaaaattcttctgccttgggatcctgttgatctgtgaccttatccccaaccctgtgctctctgaaacatgtgctgtgtccactcagggttaaatggattaagggcggtgcaagatgtgctttgttaaacagatgcttgaaggcagcatgctcgttaagagtcatcaccactccctaatcttaagtacccagggacacaaacactgcggaaggccgcagggtcctctgcctaggaaaacca

SEQ ID NO: 42345 - DNA, 1378 bp, Artificial sequence
  DNA replication origin
ggtagtggcccctgtgcacgaaggtgtctctgtatcatggagtaatgcaggacattaagacaggcacaacttccagtaagagagccaggggagggggatggacaagtagaggaacagtccttcctgaggagctctgggttacataaaaagctggtccagggttgacacattatagaatgccaggggcattatgacagggagaattctttgagtaccagggagatgcagaaggccagaaatggaatctacatggaatgcaccagtgaaggcttcatttgaaaacactgaatgcacttgtggaaggatggggagggacatttaatataatactgtgtggtaggcgtctcagtgatacgacagagagggatgggggatgtccggcatccccattctaaagtggagcatctgtatatggggggatgtgagttgtgaatgtggaaagtctagaacattaactctttccctttctcctttgccattgctccttatgtgtgtacacatgtgtggggaggtagggacaggaagattgctggttgtatgccagtgaatgaggggtgtgggaggcagggagtgaacaggacagtcactgagtgaaggacttgtgtatgtgtgcttctgtatacatatttgggtggctgtgaggggtgggatgtgtggtgagacagccgttccctagaaaaggggtgtaccttgtgcatcttggggcaagaactgcagggggcaggggaacatactatctcagggagtccaccctgagttgggcatgggggtgtgtgtgtatctctgcattaagaaaatatgtggtattcaaacaggcaggggagtgtgtgtgtagatttgtaggaaatctaggtcattcagctactctgaggtactggtgggtttggggtttgagggggaggtgctttgggaattctgggacatccagaccctccatgatgtgtccctgtgtgtgtgtctacagacagggaaataggggtgaagatgaaaagttgaagcagtgatacagcctggtcagaagttgttgtttgtgtccgtgtggaacatgcctggggaagtaggaaaagagcaaagagggacaaaaatgtctgtagttgtatacttgtatatgtaagcacatagagggggagaaggaccataaagaatgtgtggtgaagcactctggtggagaggggctcatgagaagtgataccgagagcagtgaagctggagatcctgagagagcccacctgtgctaagtggggtgggtggatggacagggtgagcaggcctgtgcaccagtcggagaaccagctcatcagcccagtcttgccacttccctttgctccacagaagacgtgcgatgggacacatttcccctaggccgaatgccaggtca

SEQ ID NO: 42346 - DNA, 1097 bp, Artificial sequence
  DNA replication origin
gacagagtttcactctgttgccctggctggagtgcactggctcagtcttgactcactgtaacctccgcctcccgggttcaagcgattctccctcctcagcctcccgagtagctcggattacaggcacgtgcccggctaatttttgtaattttagtagagacggggtttcaccatgttggccaggctggtcttgaactcctgacctcaggtgatcagcccgcctcagcctcccaaagtgctgggattacaggagtgagccactatgcccggctctcacttattttttttgtatagatatgggagggggtcttgatatgctccccaggctggtctcgaattcctgggctcaagcaatcctcctgcatcagcctctcaaagtgttaagattacagtcatgagccaccgcactcagcctaaaactcagacttgaccagacgacttcaacagtctagaacactgccatcctgggattctgtgaccttgacaagaaggagaaagggagctggcagacaaaccccaagggtgtggactagggaggtcacatctaacctgagggaattatagccagccccatcaggacatcagaaagtgaatgtactgggagaggggctaaaggatcaggtcactgatttgaggaaggtgaagactgggatttagatgaaggaaagataaatgaggactgagcaaggatgggtaggaaatatgatggggagagtcctacggaagagaatggatgaagtgttttaagaggtgaggcagtttagccaaaagaagagaagtttcctgtggacctgagatcttcaggcctttgaggagctgttagggacaacaggggatctgtgtggcctcagggagcagaactgagatccatggatggaagccatagagaaaaggagttcagacacggcaagaactttctaagagccagagctgtctagagaaggaaaagataggtagtgagctccccatcagtggaaagttgcagtcaggggctgagtaagcatctgtcagggcccagggtctgggccctgagtgggggtggggctggaaggccaggacgtggaaggctaggggctgtgaccagggtgggagaggag

SEQ ID NO: 42347 - DNA, 763 bp, Artificial sequence
  DNA replication origin
gaagtttcctgtggacctgagatcttcaggcctttgaggagctgttagggacaacaggggatctgtgtggcctcagggagcagaactgagatccatggatggaagccatagagaaaaggagttcagacacggcaagaactttctaagagccagagctgtctagagaaggaaaagataggtagtgagctccccatcagtggaaagttgcagtcaggggctgagtaagcatctgtcagggcccagggtctgggccctgagtgggggtggggctggaaggccaggacgtggaaggctaggggctgtgaccagggtgggagaggagccgggtgggtctgggtggggagtggtagctaccctaggtccgcccgggcccagccgggccccccacgtggccgctgtggcctggctgcgccgggcctggccaggcggggctgggcggggcaaggccagcggtcggcggggaggcgggcgcgagggcggggagcggcgcggaagccgggccacataaaggagcgggcggcgcgacaggggcggctctttcctgggtggggtttgtgaagtcgtggcccgttagcaggaagcctaacagtcgccccgacgctagtgagggacccaatctgagtccccggccagccgaatccaagccgtgtgtactgcgtgctcagcactgcccgacagtcctagctaaacttcgccaactccgctgcctttgccgccaccatgcccaaaacggtgagtgccggaggtgggcgctgtcgacccc

SEQ ID NO: 42348 - DNA, 1941 bp, Artificial sequence
  DNA replication origin
ccctaggtccgcccgggcccagccgggccccccacgtggccgctgtggcctggctgcgccgggcctggccaggcggggctgggcggggcaaggccagcggtcggcggggaggcgggcgcgagggcggggagcggcgcggaagccgggccacataaaggagcgggcggcgcgacaggggcggctctttcctgggtggggtttgtgaagtcgtggcccgttagcaggaagcctaacagtcgccccgacgctagtgagggacccaatctgagtccccggccagccgaatccaagccgtgtgtactgcgtgctcagcactgcccgacagtcctagctaaacttcgccaactccgctgcctttgccgccaccatgcccaaaacggtgagtgccggaggtgggcgctgtcgaccccaatggctctggctgagcctcatagccctttgctgatggctgagggcttggccagccaccggcccgcctgggacgccgcgccctccgccatagccaagggtagggaggggaccggagtgggatcctggtctggtgcgccctcaggggttgagggggtgtccaggctggaagtttggacggggcgaggcctgcctctttctcaggttccagttccctgtgtctgagatgcaacagtcaggacggcttcgttggggcctggggtttccccttttccctgatgggccatgggcacagaggagaggattctggtccagaagacaacactttccccaacccaggaattggcacctttctggggcaaggctgccaatgtccaagaggggacatgggaacagagaagcagggagaaaggagggagccgctcggggcggatccggcacccccactcatctttcccacagcctcaccgggtggctccagctgttttccactaggaggtgaggagagagatgtgaggaaatcgtcatcgaggctgcacccgagagcaccaacacttatttaggcaccagtctgaggagaggcctaccccatctcctgggagagaggaccggtttctccctcctctccacctccaaatccctgcccctcctattgcttaatgcctctctatctcctcctatcccctccggactattttgtgtggtgtgggttttctcgtggggccacacctttctagagtggtggttgatttggggatgcgtctccaccccactggctgttacgagaggaacagaagcctcctgggagtggggataggggggccggatgcccaggagggagaggggaggaggggtgtgcctgactaatgagctctgcttgcttttgtgcaagtcatgccaaatggctgctgaggcccttcccttgctcagaaaggcctggtgaccaccctggcttgagtcccttaggccaaacagcttgttgagctggcctaggcaatgcagtgctcccaaacatgtctccccaggactgcttgagccttgtagaggtgagatagtgactagtagccttgaaaagggctgaaggtcccctgggatgagaggaggagagttgggggcccagccttttgggtttgtgatgagctttggttgccacgttactgtataccagcctcactgccaagtcgttcttgcctttccagaaccttgtccttcagaaacaccaagttttcaaaaagtatgtgctttcactgtctatctcctttaaattgcttgtggttttaggacatgaggcttttacacactttgttccctagtccccgcccccaaagagagagagtaatggttttggagagaggggaaaatatcccattgtctgccaaaacaagattataaagatcctgtcaggagcggctctttgggtctctctctgtggttgactcctgactcctcttaaggtgcggctttgcctgaacagttgggtggatctctgggaatagacattgctccacggtctttcttctgtagtggcatatc

SEQ ID NO: 42349 - DNA, 1022 bp, Artificial sequence
  DNA replication origin
agagcacggggttgggggtaaggttatagattaacagcatcccaaggcagaagaatttttcccagcacagaacaaaatggactctcctatgtctagttctttctacacagacacagtaacaatctgatttctctttcttttccccacatttcccccttttctattcgacaaaaccaccatcgtcatcatggcctgttctcaatgagctgttgggtacacctcacctcccagacggggtggcggcggggcagaggggctcctcacttcccagacggggtggctgggcagaggtgccccccacctcccggacggggcagcggccgggcgggggctgccccccacctccctcccggatgggttggctggccgggcggggtctgccccccacctccctgatggggcggctgccgggcggaggggctcctcacttcccagacggggcggctgccgggcggagggactcctcacttctcagatggggcggctgggcagagacgctcctcacctcccagatggggcggctgtcgggcagagacactcttcagttcccagacagggtcgccaccaggcagaggcgctcctcacatcccagacgatgggcggccgggctgagacgctcctcacttcccagacggggtggcggccaggcagaggctgcaatctcggcactttgggaggccaaggcaggcggctgggaggtggaggttgtggcgagccgagatcacgccattgcactccagcctgggcaacattgagcactgagtgagtgagactccgtctgcaatcccagcacctcgggaggccgaggcgggcagatcactcgcggtcaggagctggagaccagcctggccaacacagcaaaaccccgtctccaccaaaaaatacaaaaaacagtcaggcgtggtggtatgcgcctgcaatcccaggcactcggcaggctgaggcaggagaatcaggcagggaggttgcagtgagccgagatggcggcagtacagtccagcctcagctgggcatcagaggga

SEQ ID NO: 42350 - DNA, 1138 bp, Artificial sequence
  DNA replication origin
actccaagcctgctaagtcatgaataaactttgatgagctgagctgcattcagctgtgaaagagacaacttgatgctttctctggaccccactccctggccctctactctctggcccccgcttcagtcccaggagatttgcagctcctgccataccagtggctgggtcactgttcttcagcctcacattgttcctctcaaaggcagtttcttttcgtagccacgcctaggcactcaaacagtccaatagctgctctaggaacttcacgggggcggaagaggtaagcttaccgtgaaaggagggtttgggctgttgttgctacacgtggatgtgaaatgagtcaagcggaactttgattacaaggaatttcatatactgtgagtgtgtatgcaggctgggggctgaggggcgggggctgaggggcggggctgatgggcgggtctgaggggcgggggctgaggggcgcggggtgaagggcggggggtgacgggagggggctgggtgagatgtgtgctctgcgctgaggtggatttgtaccggagtcccatttgggagcaagagccatctactcgtccgttaccgggtgagtgtgggaacaccccctggtgtggcaaggcggctgggacctgcggcatctaggtgcagaagtacagaatcaggtcaggatgatcctgctagggtaccgcaaaatcagaacaattgggaaggcgccctgtggctggctgtcagtccatccatttgtgtccggagagcgctttctgaggtatcagggatctgggctgacatctctaggatcttggcgagccatttcctgtaggctcttactggacctgcattgcctctgagaacatgcctggacgtgtccaacaaccttgagcatctagggttgggagataaagaagagaaggaggctgggtgttagtgaaggcggggacagtggatcagacttgtggagcatcctgaggaaagcagaactgctaacccgcgtggcttgagggcaagtcagggcttgtgtaaagagcatgctggctctgtttgggggctttcaatccaccccctcacccgccgagcttggtttcacttgatctctcattcctggaagctgagccccgggcagtgttattttgatcctgcctca

SEQ ID NO: 42351 - DNA, 1195 bp, Artificial sequence
  DNA replication origin
ccgggctggggctggcgtggtgcgtcccttcggctcctgtacagcactggagcggctagctcggccctttttccctctgtcgcctcctctgcctctgggcttgctccggaccgtcccgctctcccagcaagctggctccccgggatctcggagggggcgctgggaggtggagagcaaatgcaacagtttgcgagtcgggtcccgcccccaccgggccggcctccttgccttcccacctccttttccctcccctcccctttccttttctcccctcccctcaccgcgcgctaacgcctgcctagtggctttggagaaacaagtgctggcgcagcgtgggcgagggcaggagaggctagctctagccctggaggacccctgcttcctgaatagctcctgctttcctaaaccaaggtttaggcgccagggctccagatttcctggaggccagcactcaccaaatttggttccaaagcccaatctaaaaaaccaacagggtggaggcgagggagggaggaaaaggacgataggaatacctgctcctggctgccaggggttcttttcaggactgataagagcgcgcagatgggagagtgggagagtctcctacaaactgaggagcaagccatgaccaagccagcagatacttgctgaaaccttagattccgtcatagggatagatcgggcctcgtggcattgtgccatttgctctaggaaccctcagccccaagaatcagaggtcatttctaccctcttctctgcctttcttcctgtctggaattgcctttaaccatgcatttctcatccagactctcaaaggcaaaatcacccagacaagcaggtaaacacacaaacactaaaaacacttgccatgtacacataggcgctcaattttgtccagagctctgtaaacgtttgctttgtatgcagccgcttgcttttccaagttgccttcgcatattttaaactttacaactggaactatccaaggatagaacctatatagggctgcttttcgcctcttgatggacagccaggcgtagaggatgatgtgggttactgcaactgctcttttgtggaggaggtcccataagccctgtgtaaaggtggagatgcaagtgggaatggaaagagagagaaaatgtaaacgtaaacctataaggaaaacatctttcctttatgtcagtagagaccctgg

SEQ ID NO: 42352 - DNA, 987 bp, Artificial sequence
  DNA replication origin
cttaccgcatgtccccgtaaggtccggagtagctatccatccaggggcccatttcgcttttgacacaagtgggactgggatagggcactctgctcaccatgccgccagggtaccacacatcaggtgcggtgaagtcgctttcctggcccgccagcccctgagggggccgagtgtagccgtagggggctacagctcccgcctcgccgccgccgccgccgccgccgccgccgccgccgccgccgccgccgccgccaccacccccaccaccaccacacggtccatacaactggccttcttcggctgtgaagagagtgtgccaggatgaggaagcggcggctgagggtgacccagaaccgggtcccgctgcacccgcgccatgcaggctcgccaggtccccatagcggcactgcgccgccgcagccgcccaggcgctgccgtagtccagcgggttctccagcttgatgcgagcgtggggatggggaggcggcggagggggcggcggtccggccagagccagtggaaagttgtagtagtcgcgactctggtacgcagctgcctcgtccagtgctccggacttgtagagagacagggtagacggcagttcaagtgtcccggagctccctgctgcagcgctgccagagcagcctaggctctcgccttctagccctttggtgtaacctcccttgaaaggggaatactcagcagtatcttcagtgctcttgcctgcgctgtcgtctagcagagaacctttgcattcggccaatggggcacaaggagtgggacgcacagcgggtggaactcccaaaagtggggcgtacatgcaatccccccgaagctgttcccctggactcagatgctccaacgcctccacacccaggcccatggacaccgacactgccttacacaactccttggcgttgtcagaaatggtcgaagtgccccctaagtaattgtccttggaggaagtgggagcccccgaggcctccc

SEQ ID NO: 42353 - DNA, 1311 bp, Artificial sequence
  DNA replication origin
agagcctaggctgctctggcagcgctgcagcagggagctccgggacacttgaactgccgtctaccctgtctctctacaagtccggagcactggacgaggcagctgcgtaccagagtcgcgactactacaactttccactggctctggccggaccgccgccccctccgccgcctccccatccccacgctcgcatcaagctggagaacccgctggactacggcagcgcctgggcggctgcggcggcgcagtgccgctatggggacctggcgagcctgcatggcgcgggtgcagcgggacccggttctgggtcaccctcagccgccgcttcctcatcctggcacactctcttcacagccgaagaaggccagttgtatggaccgtgtggtggtggtgggggtggtggcggcggcggcggcggcggcggcggcggcggcggcggcggcggcggcggcgaggcgggagctgtagccccctacggctacactcggccccctcaggggctggcgggccaggaaagcgacttcaccgcacctgatgtgtggtaccctggcggcatggtgagcagagtgccctatcccagtcccacttgtgtcaaaagcgaaatgggcccctggatggatagctactccggaccttacggggacatgcggtaagtttttccttccagaaatgtcgcctttcggcccagggcagagtcactctgtgttctggggtatctagcggctcctacctgcgcgaacactcagattgcccctgggagagctcagcagggtaaacctagagctctcccgtggactcccggcctgccagaggtttaacctgagctctcctaatttctgctgcgtgccctgggtgctgattcctgccctcccagattcttcaactcccccaaccgccccaaattctcactacctcctggtactcgaggtcccaaacagaaatcctattgcacgggccaccttcagagataaagctcccaagccctccactcttcctttcctcctgtcctcaaagtctgagaacctcaacaggaatttgggcaatttctcctcttcaggtctgttaggatttcactttcagcctgcgcagattagagtcaaaaagaccggcccaatagcttctcagcgggtatcctccagagaggtaaagtgaaattctcggttagggaaagaaagtggtctctgggtgctgaggtctgctgtgtgaaagggtgaacttctttctcctgaagcaactggggacttgctccagggctggaggtcagtagagataatccaaaccgtcatgtttagagtaggcagaggggcaact

SEQ ID NO: 42354 - DNA, 1201 bp, Artificial sequence
  DNA replication origin
gcggggggctgacccccccaccgccctcccggacgggcggctggccaggcagaggggctcctcacttcccagtaggggcggccgggcagaggcgcccctcacctcctggatagggcggctggccgggcgggggctgttccccccacctccctcccggacggggcggctggccaggcagaggggtcctcacttcccagtaggggcggccgggcagaggcgcccctcacctcccggacggggcggctggccaggcagggggctgatccccccacctccctcccggacggggcggctggccgggcggggggctgaccccccccacctccctcccggacggggcggctggccgggcagaggggtcctcacttcccagtaggggcggccgggcagaggccccctcacctccggacggggcgcctggccaggcaggggctgatccccccaccgtccttcccggacggggtggctgccgggcggagacgctcctcacttcccagacggggtggttgccagacggagggctcctcacttctcagacgggcggttgccaggcagagggtttcctcacttctcagacggagcggccgggcagagacactcctcacctcccagacagggttgcggcccagcagaggcgctcctcacatcccagacagggcggtggggcagaggtgctccccacatctcagacgatgggcggccgggcagagacgctcctcacttcctagatgggatggcggcggggaagaggcgcttctcgcttcctagacgggatggcggccgggcagagacgctcctcactttccacactgggcagccaggcagaggggctcctcatatcccagacgatgggtggccaagcagagacgctcctcacttcccagacggggtggcggccgggcagaggctgcaatctcggctctttgggaggccaaggcaggcggctgggaggtggttgtagcgagccgagatcacgccactgcactccagcctgggcaccattgagcactgagtgaacgagactccatctgcaatcccggcacctcgggaggccgaggctggcggatcactcgcggttaggagctggagaccagcccggccaacacagcgaaaccccatctccaccaaaaaaaaacgaaaaccagtcaggcgtggcggcgcgcgcctgcaatcgcaggcactcagcaggctgaggcaggag

SEQ ID NO: 42355 - DNA, 979 bp, Artificial sequence
  DNA replication origin
ggcgccccgtccggaggtgagggggcctctgcccggccgcccctactgggaagtgaggacccctctgcccggccagccgccccgtccgggagggaggtggggggggtcagccccccgcccggccagccgccccgtccgggagggaggtggggggatcagccccctgcctggccagccgccccgtccgggaggtgaggggcgcctctgcccggccgcccctactgggaagtgaggacccctctgcctggccagccgccccgtccgggagggaggtggggggaacagcccccgcccggccagccgccctatccaggaggtgaggggcgcctctgcccggccgcccctactgggaagtgaggagcccctctgcctggccagccgcccgtccgggagggcggtgggggggtcagccccccgcccggccagccgccccatctgggaggtgaggggcacttctgccgggccgcccctactgggaagtgaggagcccctctgcccggccacgaccccgtctgggaggtgtgcccagcggctcattggggatgggccatgatgacaatggcggttttgtggaatagaaaggcgggaagggtggggaaaaaattgagaaatcggatggttgctgggtctgtgtggatagaagtagacatgggagacttttcattttgttctgtactaagaaaaattcttctgccttgggatcctgttgatctgtgaccttatccccaaccctgtgctctctgagacatgtgctgtgtccactcagggttagatggattaagggcggtgcaagatgtgctttgttgaacagatgcttgagggcagcatgctcgttgagagtcatcaccactccctaatcttaagtacccagggacacaaacgctgcggaaggccgcagggtcctctgcctaggaaaaccagagacctttgttcacttgtttatctgctgaccttccctccactattgtcctatgaccct

SEQ ID NO: 42356 - DNA, 1103 bp, Artificial sequence
  DNA replication origin
cttcaccttcctgaagcaagaccagaaaacgtccagcagaggcatggtggcgcgtggggagcttctagggccggcggggctgtgccgggcaccggctcctccctctctggggacgaggctaaaagaggcccggggctcggcgagagccagcccggtccctgcgctccatgagccggccccgcgaggggagaggcggagagcagcggttgccggggctcagctgcctcgacagcgggcgcctcccgcctcctggaaggccaccgagggagggaaaaaaggagggagggagagaggccggctaaggaggagggaccaggaggcgggtcactgattcaaactcggcaccgttagccagttggctggaacgggacagcaatgccaattgaaattccctgaacattacagttccccggctccgggtgtccggccctcctgccggctcccctgccagccccgccacctgcatgctggcattgcctgcctgcttgcttcttggctgactgacacgccagctctccttggggacctctcggtagagcccagaccacacagggcctgtggaaagagtgccaaggaaaaggggcaaggaaggagagccccggccccagcaggaccgaacaaggtgtgaatgcagtccacggaaggggaaaagcttgcagccttagaagcccctctcagacaggtgccctggccctgcctcagtagattattctccagccctctgaagtgaggactcttgactcactgtggcatctcggagaggccccttcctcctgggtctcagttttcccagctgtacaatgagatgccgggttagaggtctctaagtatcaaatctgtttggggttaggtacagggcaagtctcaaagaaactccactctggacaatcacagttcctctcagaactcccctgctgctcctgggagtccataggaagtcaggtcttgccccaaagagaatctgagccctcaaatgccatttcatccatccccctgccccagggcataacagcagctctctcccagctcagatagactgggtgtatgcccttttctgaacatcttctgaagagatgatggcttccctcctttatccagtccca

SEQ ID NO: 42357 - DNA, 1547 bp, Artificial sequence
  DNA replication origin
ggacaggagagagaattgaccctctcaaggtcatccagaggtcatggttgagatggcgctccaggcagatttcccacctcccaagccagtgccctctaggacctgatatgcccacctgaagcggagtaacatgagggaggatttgtgttccgggcaccccttatgtgcataacaccatgctaagtgctggaagggggcaaaagaatacatcaaagaaatggttctgtatgtatgtggtgtgtgtgtgtgtatgtggtgtgtgtgtttgtggtatgtgtgatgtgtggggtgtgtgtgtgtgtggcgtgtggtgtgtgtgtgtggtgtggtgtgtgtggtgtatgtgtggtgtggtgtgtgtgtggtgtggtgtgttggggggtgtatgtggcgtgtatggtgtgtgtgtggtgtgtggggtgtgtgtgtgtgtggtggggtgtgtgtgcttgtgtggtgtggtgtgtgtgtggtgtgtgtgtggtgtatgtgtgctgtggtgtgtgtgtgctgtggtgtgtgtggtgtgtgtggtgtgtatggtgtgtgtgaggggtgtggggtgtgtgtgtggggtgtggggtgtgtgtgtgtggtgtgaggtgtatgtgtggtgtgtggtgtgtgtggtgtggtgtgtgtggtgtgtgtggggtgtgtgtgtgtggtgtggtgtgcgtttgggggtgtgtgtggggtgtgtgtggtgtgtggggtgtgtgtgtgtggtgtgtggtgtggtgtgtgtgtggtgtgtggtgtgtgtgtggtgtggtgtgtggtgtgtgtggtgtatgtgtggtgtgtgtgtgtggtgtggtgtgtatgttgtgtggtgtggtgtgtgtgtgatgtgtgtgtgctgtgttgtgtgtgtgtggtgtgtgtgtttggtgtggtgtgtgtggtgtgtggtgtgtgtgtggtgtgtggtgtgtgtgtgtggtgtgtgtggtgtgtggtgtggtgtgtgtgtggtgtgtggtgtgtgtggtgtgtgatgtgtgtgtgtggtgtgtggggtgtgtgtgtgtggtggtgtgtgtgtggtgtgtggtgtgtgtgtggtgtgtggtgtgtggtgtgtgtgtgtggtgtggtgtgtgtgtgtggtgtgtgtgatgtgtgtgtgtggtgtggtgtgtgtggtgtggtgtgtgtgtgtggggtgtgggtgtgtgtgtgtgtggtgtggtgtgtgggggtgtgtgtggggtgtggggtgtgtggggtgtgtgtgtggtgtgtggtgtgtgtgtgtgtggtgtgtggggtgtgtgtgtgggggagtgtggtgtatgtgtgtggtgtgtggtgtgtgtatggtgtgatgtgtttgtggtgtgtgtgtggtgtgtgtttcatgtgtgtggagtgtggggtgtgtggctgtgtgttgcgggggagcgggtgagaaactgactcatgcatgcttcgttgtaccaaggggccatggatgccttccgggccctgactggcctccaggggaagacacagcaaacacgtattggactatttatactgggttcatctcacacttaaacgtc

SEQ ID NO: 42358 - DNA, 1228 bp, Artificial sequence
  DNA replication origin
ggatgggacctgatgactctatatggacaggcccccaaggaaatgatcctggcccccaacacccaaggctcctgggtcagggccaggcaactgtcactctggcttctactttgtttctaccacggaggaactgtgtgacctggctgagagtcttgccctctctggctctcagtgtccccataagtacaatcagagagtctgttctcagaatctccaaggatcctgtgtttcagcgtgttcaattccatgttaaatctatggtgagaaacccaacccagtttgctatttcctccctgccctttaagtggaatcaagagcgaattagagctgggtgcaataatcccagctactttggagactgaggagggagggttgtttgagctcagaagttcgagtctcgagagagagtgagtgagtataacaattactcagaagtagtagcctggaaatataagtaccccaaaacttttttttcaatttttaaaaagacaaaatgccagagactttgggagatccctcagagacccattccttggtttggagctcccaggcaatgcgagttgattataaaggtgctaccagggttgctgggctgtgtcctgcacctggggtacagagtgggaaggtaagaggcccttggagtgatagggggatgtagggagctactgtgtaggtgataacacttaacgatctggagaccaaaaaataaataaataaataaaaataaaaggatgaaaggacagacggacaactcaatgacaaggaaaaaatacaggttgaggtttagacatatagtgggacaggaagacaggagggtgaacaagcagacaccaaaggcagagacgaagaaggtgctggaggaatgggtgtaaagggacatactgtttactgaacgcctaccacgtgttagtaaccaaagtggtgttctttttgagcggaggatgtagacagaggtgggtggggacgaagccggatagactgctgggataagaggatggggcacccatagggcggggcaagagctgcctaagaattagaagaaagaaggcgtgcggggtggaaagcctcaaaagggggcactgccggccaggggtgaggttttagacaaatggacataggactcaacgatgaaaaccgggctggaaccaaacaaggaggcagagggagcagggagcttcgaagagccggtgcgggaagctctccgcgaagcgcagctcagccctgacct

SEQ ID NO: 42359 - DNA, 1199 bp, Artificial sequence
  DNA replication origin
caaagccccagagcgacggctgcgagacccacgggcccggcggtaacaggcggacagctgccttccaccgccccactcgcgaggcttcgctggaagacgcgcggctggcgcgctcgggggtcccccaatttcggcgattctgaccccccaatcccaggggcgggggtggctcggctcgcttcctccctgtctcttgcgtacgccgcccggcggaaccgctaggagaagggccgagccggagcgcgccagagaggcaaagcggggagagggagccccaggcgcccccgtttgtctggatctccccctgccgtcgcccagactcctacctggaggccgcgtccacccctttgggttcgggcgctgacacagagcgagcgggcaggaggcgagcccaggagggactgctccgtccgggacacacgcggggcctggggtcgggcaggggtgacggtgccagccagaagagcagctgccgcggctgcttagccgttgtcaacccgagtccactcagctcaagtggggagggagcgtcggcgagtagggctgtagggacgccccgcccacctcccctcggccaatgggggcgcagtctggcccaccggactcgccagaaagtcacccaaatctgggtgggcggggcactgcctgcaggtcctccaaggccctcgccgctgcctttccctccggtcacaccgctgccagggaggaggtgcaagcccaaagactgaggctcaagcagtgacttggccaggcacacaggctaatatttattgagttctgaatgagtccggcactgtttgggggatttaaacacatatgctatgtgcccgggagggttcagtgacttgctcggataatttatgggatgtccagaagacacaacttcagtgaaatctccaattggtaggggaaaaccagataattaggaatttgagcaggaagctgccatccctacgttgctcaggccccagtggctctgcaacttccccaataccccaggcttctgtcccctaccccaagtctgaactctacctccgcagagaaatgcatggaaaatttggggcacgaacattaatcgtggcaggggagggcttccaggagttctgatagtaagcaccaccagaaagtccattcaaattcagtaagaaacaagagccttcggctttgatttctctctggcctttcatcacaagggtcca

SEQ ID NO: 42360 - DNA, 963 bp, Artificial sequence
  DNA replication origin
tgccccataccacgcccccagagcaggaagggggcggggtttcagggagctcttaaggacgccgcgcgcccgatggcaccaatctgagtgtgcggctcgtgcggttagggttgggtccctctcagtcctgttcccagagagctcaacccgtgggaagttggcactctcaagagctgccggcctgctctcctctccacgcgtctggtcaacaccccagcccactgaccctgtcccaagtaccccaggaaagtatttccattttctttttacacacaggacccctgaagtcctgctctgtgcccacctccgtgtcaaggacagcctgtctgctcctcgtccagtcccacgtaaggctttagtgggctttcctcctctcgccctcaaaatgcactgtctgcttgcacttggacccggagtcaggaacataaaagtgagaacagtgggagggggaaactggtgagggtccagtacttgattggggttagaggtggggcggggagcagggtggggtgtggtggggagagaaggcgtgttcatcgcccctggggaccaggccttcggaatctcagctttctgggggagccttgtgggacctctggagccaagatttagtcttgtcctgtccgaaggcgcgggcaaggtcccgggataggcaagcggggatgagagggcacgtcgataaagaaagacacctcgagggcaaagaggaaaaagcacagggcatgagacttttgaaaaagcaaaagcgggcatcctggaccggagaagccggactccagcctgtcccggcctcgccatctgggtctttgtctcccagccctggcccattcttcccgccccgccttgcctctttgcttataacttggctcgatcccatagctcagaccttccaggtccgacccactctcgctggtcggaccccagaggacgtacccacgtgctaatgtctccccctgctggact

SEQ ID NO: 42361 - DNA, 1846 bp, Artificial sequence
  DNA replication origin
cccgcgctgaagtagaagctgtccgggggcgcgtagcccggagtcccagtgtggcccggaggaacggagcccgtgccagggcggcccagtcgggagcccggggaccgagcttgtgctgtggggaaacccccacttcttccaagggacagcgatcccgggacggtcgaggcgtcggggcggtcaccgagacctctgcgggaagaccccgtcggggagagggcgcgcagccccgaagcgtctcgggaagtcgagcggaatcgggcgggatcacccgggggcgcagagcccccgtcgcgcctcgtgcggcagcggagagcccaggagaacgagccctcgggggccgaagcccatgcccgggttgggggcggctgcccagtgagtcctcctggccggccgggcggagaagagcgacaccgaagccggcgggaggggagcacttcaaggccggcggctgcggaggatgggcgcctgagcggctccgagcgcagcgcggcagaggaaggcgaggcgagctttggtgaggaggcgccaagggatcccgaagtgcagtctgcccccgggaagatggctcggcctgggcagcgttggctcggcaagtggcttgtggcgatggtcgtgtgggcgctgtgccggctcgccacaccgctggccaagaacctggagcccgtatcctggagctccctcaaccccaagtgagtaacttatctcctctggacgctggggtgggaggcactccttcagggtgaggccgcacgccccggagtgcatgtggggaggtcttcggaggaggagcggcgcctcattttgtctccggctttttcgagtgttttcctgcgggcgggcggatggagcagggtgcggcggggtggggtaggggcacttggctgggttgtgaccccccgggcttcccaccccctgcctctgcacgtcttggatgaagtcgaggtggtcgcacaggcggagctggggagtccgggcgcccgagagcgcaccggagaactgagtggaggcgagaacgcagctccctccggggcccctgggaacgtggtgattttcgccgagagccgctccaggagcgagcttgactcgggcgagggacgaggccagaacacgggttcctcgtttgcgtagctgtggagggaacacagagcgggacccggcgcttggggtgggtggcagcgccaacatccccactcgggcttctcccattttcatttctctttcttccctgttttcctccctggctttttgctttgctgtctctttttgccccccgcccctcctttctccctgccggagcggtagaaaggcgggcgctgctcccaggctcacaaaggcagcgggtggagaggggcggagtgggagagtggtcgttgggtagtgggggttcgaaccagtgcccgtcaggggtccaatggagccggtaacagagcttcaagggcccgccagggcggagagtggcggccgagctgttgagggaggtgggtggagaaggagcgattcctgcccaggcaggtccccttggcccccgagtctgtcccccagattgggaagctgtgcttagttttccccaaggggttggggcggggagtgggcagctatataaaggacatcctttcttttctttcttctccttcctctgcacaactaccccaccaccaccacacacacaacccctccaaacaacacgcacacctttcagggcggtggctcagtggtttctgggcttttagtgggaagtcgctggggctgttgtagtgacctctggaccttctcttttggcatccaggactcaggttggaaccaagggtcaaaattgcccttcctctcaattttctggaggtcc

SEQ ID NO: 42362 - DNA, 1138 bp, Artificial sequence
  DNA replication origin
cccacatatgggcagtgtgtgtgtgcatgcatgcacgcacatggtcagtctaaacctactggggctatgaggaacctaacagcatcttggtgggaggagaggtggcatggtaccatcggggatggagactggaactcttgtatcccaaagtttgttgaatgcttgctcccgtgtcccagagaacttggcccctggggcttcttcccctggctgcattcttttgccgtatgttcattgtgtgtctataagatgccagaaaatgttttaggagctgggatccatcagtgattagattccacagggatcctgggggagctacagtctagtgaggggagacaacaaatcaaccagtcatgcagtgtgtttgagcatggtgagtgctgtggagaggaaagggccagagtatgggagaaaatggaggcccagggtagggtgggaggtgatctgccattgttaatagagtggtactggtggatctcattgagaaagtgacagaagacatgggagttaaaaggtgaagggggagagggagtgagcctcctgtctatctggaggaagagccctgcaggcagagggtgtagcaagtgcaaagacgctgaggcaagagagtgcctggtgtgctgggggaacagcaaggaggcctgcctggctgcagtgcatcaggcaaggaggagagtggtagggggtgggggtgaaaaaagcaatggcaggggtggagtggggtgcagggcacatcagatagggccgtgataagagccatggaatggacagtggcatttactccaagtgggatgggagccctggcagggcttgcagcagggaaatgacaagattgaactgagttttaatgcaaccctctggttgtttcctggagaataggctttggtggggtgaagggaggagctggagagcagcaatcctggtgagacacgaagggggctcagccaggaggagagtggagaggtggtttgaaggatgtgtccttgccagcctctcatgcttgcctggctctggctggggttcgttagggctggggttcttgaagggccctgtctaagaagggagtaggaatccagttatatgagttcacgctcatcaggaacctggcatatttgattgagagatatgtccagtgatg

SEQ ID NO: 42363 - DNA, 610 bp, Artificial sequence
  DNA replication origin
agcccccatgggatgagttcaaggattgtggaacattggcaaggacctcacactgaggctggcaagcttataattgccaggagctaactggccaagcctgggacaacagaaggcaggaccagcagaaggtgtgcaaagcttgaatgacttcgagtcatgaaggtcacaattggtggcagggttaagaatatatgaagcagggaggtggggaaggcctagagatagctaggggctgggaaaatgaggttgtgggtggggaagaaggactggaatgcttgagggtgggaagaccattcttttttaaacaagccgttgcttaatagcccagtgccaaggaccgggaccaagaccaggtttgagaagaatgagggagccagtcatctgaaggctgggggtagggggactggggattggaaatcatggtgctggagccatcccaagtaatgacaaggcccaagatgcgctcaagccagtgggcagctccagtagagaggatatgtaggtcatggaggttgtaggatgactgggtatcagtctcaggggacatgtatgagggtgccgaagcgagtgaggaagacaatggggtggagggaaaggcctgagggcctgg

SEQ ID NO: 42364 - DNA, 717 bp, Artificial sequence
  DNA replication origin
aagagagaaggcaaatagcttaagagggaggcagggttaagggagggtttctttgaaggatgggggagagctgaaaatccttgtaggctgaggaggaaatagcactgaaaggaggggcagagatggagatacaagagaaaggggataattgatggagttagaggttagttatggagaggaggatagataagtcttcctaggagacaaaagggagagggggagaaggagggagacagagagggagggaaagaaggagggaggaaggaagagagcacacatacagagagattccaagatggacagccttaatcttagcaaaattggaagccaagcattaggagagcgtagttgtggggctggaatgtaagaaaagtagaagatgggaatgccagcccccatgggatgagttcaaggattgtggaacattggcaaggacctcacactgaggctggcaagcttataattgccaggagctaactggccaagcctgggacaacagaaggcaggaccagcagaaggtgtgcaaagcttgaatgacttcgagtcatgaaggtcacaattggtggcagggttaagaatatatgaagcagggaggtggggaaggcctagagatagctaggggctgggaaaatgaggttgtgggtggggaagaaggactggaatgcttgagggtgggaagaccattcttttttaaacaagccgttgcttaatagccca

SEQ ID NO: 42365 - DNA, 1171 bp, Artificial sequence
  DNA replication origin
gtttccgtgtctttttgtgggcgtgtgtatgcctgcgcgtttctgtatgtgtctctcccggcggctgttctgcttcctcagcaagcctttccctcccccctccacttcgtttttctttcttcttctccttattcctcattgtcgtcttcttttttttaatgagtcttaattagcgtcgagttcctcctcccgctccctacccgcccccctctccgcccctgccctcccttccctcctctccctcctccccgaggtacaggccaagcgatctgacaaatgcacttgagaacaaagcgccaggctaattcggggcctgctcaggaagcaggagctgagctgagataatgggtctgaaatagcccagcatgattatgcttcctcagcctgtggccaggcgggtgcaggctcaggcgggcaggcaggcaggcagtcggcgggcgggcggacgggcgggcgccggacgccactcgcccagggtggtgagggccatgcttctgcacccacgccggccctcctctggccttcgcaggagctgctatccctcagagagtccggtagtccccagtggggatggtccaagggtcagccagaatcacacactcaaccacagttacccgacaggttgatggcaaagctgagtcacgaatccaagcagccaggctccctgacttcagttctccttgctcggtcatgctgtccccagcctagctcagtgggaggggagtgggacaggtgattcagagcagggcttgggcctccttagctcaggcttctctaggaagacagagccccccaggatggccagagaaggaggggtcacagattgctctggtatgccaagcaagacaggatgttggcatggtgcccaccagagagatgggtcagatgtaacttgtatactttttgccttgccttcctggagcttgtccagagcctgagaccagactgagagaggaacagtaaggacccaggacgagcagaaatcgccctccatagggcactgcacccatcccacctccctgcccccgctgctcatgccttcatccctatcccagacatggcctggggcccagcaatgagactagtcatggacctttactccctgacccaactgtcaagttcactggcctcccagaccccaggaacgagtgacctgtatgtgaacatgtgt

SEQ ID NO: 42366 - DNA, 789 bp, Artificial sequence
  DNA replication origin
ggcctgggaggctgagatgggaaactagaccacggagaagaacggggctgcacttgagatgatgacaaaaccaagacagaatgccgcagaaacagagccgggccgagagaggaaaggagtggaagggagagagaaataaaggggtgggggggcaggaggagcggtagggagacccaagcagggatggggccggcagagggccgggctggggaggaggcccgaggcagcaggaggagccgaggggcggctgcggtgcccgctccgtgcgcacacacaaggcccgcccagcccgagcccggtctagcccggcctggcctgggctgtttgcagaaggaagccagctctgtggtcagggcgccccaggcccggcggcagccgccccctgcacttaatgagattcttgttccgagctgcgggagatggggccgggctgcagaggccccgcagcgcctctgctctcacccgaagggggcctgggccagggctggggcccgggcggctgaaggggctacacaggaaggtggctggacaaaggctggccacagaggctgtcaggccttgggaacgcagggggctggttctgacagaggagccttgtggccccgtggcagaggtctggggaggaggaggatggggaaagggtctggggttggccagcaggcaggaggcctgggttcaaatattggctctgtccccgacctgggctgagtgaccttgggcaagtgcccgcctttctctctgggcctcagtttccccatttgccacatgaagggcaaactcaggcaggtg

SEQ ID NO: 42367 - DNA, 1112 bp, Artificial sequence
  DNA replication origin
gcacatgtgccgcacaccgtgcgcatcccaggcacgcccaagttctgtgtatctgaacctcaggacaaggatttcggtttaaataaagaaccttccaaccgacagtgggataaagcctccaaatagggggtaggggataagcttttcctcagggggtaaggcttgtaagtatggaatgatggcaaagggcagggagctatctgagagcagagagacggctgcaatgatctctaacgggtccttgcctccaatgctttgcttcaaggtcttctgggttgtttcccttcccagagaccctgcccttgaggtctaggcaggccaggccaggagaaacacaggactgaattccatttagttggttctgggctgcagataccagagggaagtgtgtgctgctgctgctgctgctgctgcggctgcggctgcggctgcggcggctgcggctgcgtgtgtgtgtgtgtgtgtgtgtgtgtgtgtgtgtgtgtgtgtcaggggagattgttggggagcgggcgaggccaggtgagcagccccttggggcctgttctttttttccagctggggagacacccctgagctgactgagagggtcagaaggcagggacacaggcatggagaagacactgccctctccctgaggcccctgcccgcaggctcacactgcccctcctcagcccctgaggaaagcgccgtcagcagaattcctcacgtcctgctgctggggccatgtttatccagcacagcaaacctccgcagaagtgccttggggcagcctcagaaacccagactcagagcaggccagagagcccgagtgagggagacccaagggacacagaaagccgagagactggcgaggagacacagagagtggagctcggagatggagagtgacagagcctacgagggcacccctctggagcagcaagacagcaagacggagacagaggggaggaggccggcctgggaggctgagatgggaaactagaccacggagaagaacggggctgcacttgagatgatgacaaaaccaagacagaatgccgcagaaacagagccgggccgagagaggaaaggagtggaagggagagagaaataaaggggtgggggggcag

SEQ ID NO: 42368 - DNA, 827 bp, Artificial sequence
  DNA replication origin
gtacacaactgtagttccagctactagggaggctaaggcaggaggatcacttgagcacagaagttcaaggttacagtgagctataatcatgccactgtactctagcctgggtgacagagcaaactgtttcccacaaaaaaataaaaagaaaagaaaaaagaaaaaaaggacacatcagagtaatctataatctgaggtctgaaggctgaggaggaggtggccatgtgaagagtgaagagaaaagtattccaggcagaagctgcagcctgggcaaagctcaggagcagatgaggcctggcacattccatacggcagggaagagaaaacacaggagaggaggggagcaaggggagctcttgcagtgtctcaacatttattctccacctctgagaagccactggggttgctgagcatggcagtcatattatctgctttgacttgtgaaaccttccctctgactaccttgtggtaaatggactggtggccatgaacaagggtggaagtaggaggagagggaaggaggcaaccacaggcaacagatgatgagacctggaccacggtggaggctgtggagctggagagagaagagggtggactcagcatgccttggaggtagaatgggcaggatttggcaattgattggatgtgatgaggactggggagaaagaggtgtagaggatgactccagcattctgttgaggatgtggtagtgtggcacagggaacacaaggaaaagagcaggagcaggtttaaagagggtagcagctgacatttaattgggacacattgaactggagatgagtgtgagtgggggagggcatgtgatg

SEQ ID NO: 42369 - DNA, 1264 bp, Artificial sequence
  DNA replication origin
cactcttgcatcccagtgacccagtttcactcagcaatttccaacacagtgacacaacacacacatcaccaccagccccccactcaccacccctgctacacacacacacacacacacacacacacacacacacacacacagagagagagagagagaaaagagctctccctcctcacccttcctcccctccccatgtctttgctgctgggccatgccatgcctgccttaggaccctggctccagagcacagctgagctggtaggcgccatttcctagaaggctgtggatttggcctcagctgatcaaacacatgctaggaggtctgcgtttgaactccggctcaaggggtggctggtatgtggtccccaccaatgaattgcaggcagcagctgcctgctgtgggtcgccccacgaggaggagctaacaggactgagctttgtgggtgggggccaggcagggcccatgctgacttggggtgagggggcgtccagagttcaggctgcttgggggtagggggctcaagaatgcatcaccggcagggcctgagatagaagctgagtcatgaggtaagaggagaggctgtggtggaaagacaggaagatgggtggaaggaaagagagggtggaaggagactctccaggctccctgagactcttccctcaggaaaatgacagcggcagggattgggaggggaggcagggttgggggtggggaggagccagagctggaggttggcatggggtggggctttgaaaagaggctttcagaggatagtgagaggctggggcaaaggacaaagaaatgtccttggaggctgagtggtcagcctagggcatgtggcaggcacggggccccctggctgccccaaaagagggtagagaattagatgctggtcaggaagaagaggacccactgatgagaccttaaggtgggaagaacttggccattactgtgagaaagaagagtgggccattggtgaggacaaccagggagaaggacgcatgtgagaaagaaggctatccatgcgggcttgagggctgtgaggcctcagacactgagcccgtgtcatgcgggcagagagtaccatcaatatctgcagctgtcaaaactctcaactcagcaaaaacccgactcagacttcaggtcacccacaagggcatagctgacaattctctgtggcaggtggggaagaatcggccaacttcagacactggtcaactcaagttctgacctcaggagaagcagaaggtgggagaaagaaag

SEQ ID NO: 42370 - DNA, 1482 bp, Artificial sequence
  DNA replication origin
ctttcttctaaggcctggagtagcattccagtgactgtcaggtgtagacctggaacacatttttaatgttggcaaaatgattacaagactgggtttgcaggaaagccagacttagaggagaatctgacggaaggttggggggtgactggacgcttggaaggtgggtgaagtactgtggaattgtgcaacgtggggaaaggaaagactgctatagttttttttatggggtgtctgcatttttctgagtgctgcagacatacaggagaaatgcaaattggaatagagtggaaaatacagatcgccgtgtgtgcacgagtgcctatgtgtctgtctatcaagaggagagggacaggtggaaggggaccagtaatcctgcaacagagggatgtttacgtttgtagggggaaagggtatgagtgttagaatgagacccattctggatgtgggtatgaaaatgacaggcatgggtggggtggctttggaggagaggggtgcgtgtatgtatgaggaaagggaaggtgtttgtgtgtgtagctgtatgtgaggcagctgaaactacagaaggatgcccatgtttatgcgtatgtcacaggcagaggagtgtatggttggcaatggagaggagtgtctgagagtttgtgtgtgtgtatgttagtcaaaatgggaggcaacaatggagaaatgtcagtgtgagcaaatgcagcaggcacaaatggaagcgggggtggggggtgcgcagcactggagagggatgtgcttgaggtggatggaacagaggcaggcaatcaaagaatgatgcctgcctgtgtggatatggcaagcagggaggcaggttgtgtccccgtagaaggatttatgtgagtgcgagtgtgtgcacctcagggaccagcaaaagagagctgtgtctgacacacgtggcagacagagcaatagaggagagcatttgagaagggggtatgaatgagcacatgtggctacatatgtatgtcactggccagcgatagaaggatgtccttatgtgtgtatatgacaggaaggaagaaggagggcagccggagggggtgtgtgaataggcatgtgttcgcgagagcacgcagaggccgagcagggagggggccggtgctagaggtgtgtatgtggtaggcggatagaggagggggaaggcatgggagggtgtgagggtgtgagggtgtgtgagagggtgtgtgctgcgtgtgcctgcgcatgcgcgggggaggggaagcactggaaccttgaggatggaggggcaaggagggggctgcaatggaaggcttctgtgcgggggcgcgtgctcgcgacacacggggggtggggggtaggggggacgcaatgtcataaaaagaggtgggaaaaggccatcagctcaaacgggagaccccaaccgatgtggcaggggagagggaaaatgaaagaaaagggcgtgcgtgggtctagttttccctgagaataattattttttcc

SEQ ID NO: 42371 - DNA, 763 bp, Artificial sequence
  DNA replication origin
agaagctccaggtgttttgagcctagagatgagggagaacaattctccccatttcatcggcgaacacactgaggcccggagttaaaggacccaaagataagcttttgagcagcctaggaagcaccccttcccaaaacttacgtttcaaagtgagcccctttttggctgggccacagcggcgacgcggagaagggggctttagaaatgctaataccatgcgtgagtgacagtgcgaggacaatggaggagggcgctgtgaatggggccgccgaggcctgggagccgggctccccacgtgggagccaggtgggggaggggcgggaggggagaagccggtcccagcctagaagctccgagcctgggctaattggaaggggctgcagctctgggggcaggatgggggtggggattacctgcgggtcggccgcggaggggcggggctccgaggaggtagggggccctgccggcacggggagggggcgccggaagagccttggacctgctgacctggagaccgggagaaaaaaaagcggggaagctgaggggtctggataagccccgacttaaggaaggcaacagcaggtgacttggaatagtgtggagggggcccgagaacccgttccctcattcgttcattctgcatcaaaaggtggttaagaggctgctctccagtcacactgctggaagtcttttcgggctccctggcttattcaccatgtgctctccagcatcagtcacattggaataagagcacctgcctcac

SEQ ID NO: 42372 - DNA, 1260 bp, Artificial sequence
  DNA replication origin
gtgtttacaaaccttgagctagatacagagtgctgattggtgtatttacaatcccttagctagacgtaaaggttctccaagtccccaccagactcaggagcccagctggctttacccagtggatcccgcactggggccacaggtggagctgcctgtcagtcccatacgcggcactcctcaacccttgggtggtctatgggactgggcgccatggagcagggagtaaagcttgtccgggaggcttggctgcgcagaagcccacggcggggggggggagagggggcggggggtgctggggggcgggggcggcagggggaggaggctcaggcatggcaggctgcaggttccgagccctgccctgcggggaggcagctaaggcctgtcgagaaatcgagcacagcagctgctggcccaggtgctcagcccctcactgcccggggcttgcgggccagccggctgctccgagtgttgggtggccaagcccatgcccacccggaactcgcgctggccccggttcccacgtgcgcctctccctccacacctccccacaacctgagggagccagctccggccttggctggcccaaaggggctcccacagtgcagtggggggctgaagggctcctcaagcacggccagagtgggcgccaaggccgaggaggcgctgagagcaagcgagggctgcgaggactgccagcagctgtcacttctcaacactacttgactttgaaatatactacaaatctatagtaaccaaaacagcatggttctggcataaaaacggacacatagaccaatggaacagaatagagagcccagaagtaagtttacacatatatggtcagttgattttcaacaaaggtgccaagaacacacaatgcggaagggacagtctcttcaatgatgggtggagctggagaccattatcccaagtgatgtaatacaggagcagaaagccaaatgtcacatgttctcacttttaagtgggagctaaacattgagtacacgtagacagaaagaaacaatggactggggcctacttgagggtgcagagtgggaggagggtaagaattgagaaactacctattgggtgctgtgcttagtacctgggtgataaaataatctgtgcacccccataatatgcaatttacctatatcacaaatctgcacatgtagccctgaaactaagataaaagttaaaaaaaagaaaataatttgtcatgtattttaaaattaacaacacatataccttgtgagccaa

SEQ ID NO: 42373 - DNA, 1220 bp, Artificial sequence
  DNA replication origin
aatttttcttagtacagaacgaaatggagtctcccatgtctacttctttctacacagacacagcaacaatctgatttctctttcctttccccacacttcccccccttccactcgacaaaactgccatcgtcatcatggcccgttctcaatgagctgctgggtacacctcccagacggggtggcagccgggcagaggggcaccccacctcccagacggggcggccgggcagaggcgccccccacctccctcccggacggggtggctggctgggcgggggctgccccccacctccctcccagaaggggtggctggctgggcgagggctgccccccacctccctcctggatggggcggctggccgggtgggggctgccctccacctccctcccggacggggaggctggccgggcgggggctgtcccccacctcctggagggggcggctgccaggcggagatgctcctcacttcccagactgggtggctgctgggcggaggggctcctcacttctcagacagggcggccgggcagagatgctcctcacctcccagacagggtggcagtggggcagagacgctcctcagttcccagatggggttgtggccgggccagaggcgctcctcacatcccagacggggcagcggggcagaggcgctccccacatctcagacgatgggcggccgggcagagacgctcctcacttcctagatgggatggctgccgggaagaggcactcctcacttcccagactgggcggccgggcagaggggctcctcacatcccagacgatgggcggcaaggcagagacgctcctcgcttcccagacggggtggtggctgggcaaaggctgcaatctcggcactttgggaggccaaggcaggtggctgggaggtggaggttgtagcgagccgagatcacgccactgcactccagcctgggcaacattgagcactgagtgagcgagactccatctgcaatcccggcacctcgggaggctgaggctagcagatcacttgtggttaggagctggagaccagcccagccaacacggcaaaaccccgtctccaccaaaaaaatacgaaaaccagtcaggcgtggcggcgtgtgcctgcaatcccaggcacttggcaggctgaagcaggagaatcaggcagggaggttgcagtgagccgagatggcggcactacagtgtagcctcccctcggcatcagagggagacc

SEQ ID NO: 42374 - DNA, 797 bp, Artificial sequence
  DNA replication origin
ctgggaactgaggagcgtctctgccccactgccaccctgtctgggaggtgaggagcatctctgcccggccgccctgtctgagaagtgaggagcccctccgcccagcagccacccagtctgggaagtgaggagcatctccgcctggcagccgccccctccaggaggtgggggacagcccccgcccggccagcctccccgtccgggagggaggtggagggcagcccccacccggccagccgccccatccaggagggaggtggggggcagccctcgcccagccagccaccccttctgggagggaggtggggggcagcccccgcccagccagccaccccgtccgggagggaggtggggggcgcctctgcccggccgccccgtctgggaggtggggtgcccctctgcccggctgccaccccgtctgggaggtgtacccagcagctcattgagaacgggccatgatgacgatggcagttttgtcgagtggaagggggggaagtgtggggaaaggaaagagaaatcagattgttgctgtgtctgtgtagaaagaagtagacatgggagactccatttcgttctgtactaagaaaaattcttctgccttgggatgctgttaatctatggccttacccccaaccccttgctctctgaaacatgtgctgtgtccactcagggtaaatggattaagggcggtgcaagatgtgctttgttaaacagatgcttgaaggcagcatgctccttaagagtcatcaccactccctaatctcaagtacccagggacacaaaaactgcggaaggcc

SEQ ID NO: 42375 - DNA, 1097 bp, Artificial sequence
  DNA replication origin
gcgccggacgcagacaccgggctttacttagtgcgcctctcgcttccgcctctcgttcgcaccgctgtggctgcagcccagcggcacggccccgtggctcccgctggccatgcaccctcagtctgtcgccatcttccgctgtgcggagaacaccttgagagcccctgtgcaagtgtgtttggcggggagcagggcggagaaagaggcacggagaggaggagggagcgggactggtgccccgactgcgcctgcgcctcaggactccccccaccccaccccgccccagcccccgccggccgcagccggtgctgtttggggatgtttccagtccacccccaactccattcacttcagcgcctccgttcatccgcccgctgcccgcgtgcacatgccacacgctgagtcccaggcctcggcgctccccctcccccactaacccgggcgcccgccttcctctccatggccgtccctcactcccccgagggctaggggacttctgagggtgattcttggaggcaaggagcagcaggcatctcgtagctgcttgctgcctctctgggtcgcctccgccgtccccgtgactggaagacgctcgagccggctgcggatcggaccagtccagtgtccctaactccaccttcgccctcaccgtcctgcccgaggacaaggcggcccttggtgctgaaggacagctcccagcttagctgctgaggaagactgagtttggagagcgtcctggagggggcaaggcggtgggctaagatagtagtggtggggtgtcggtgtttgcccttaggaatatttccagcagcctccaccccccacccgcccgccccccacccaagcaccagcccccgtcctagctttttggctccccctacaggctgctgagaatagctgactgagagttagagaagctgcgccgcccggatggaaccatgtgcttgggccctcacagagtcacatggcactaggaattcggacgtacaaacatcctgacgcgccactaaccttgtttggactccactgaccctgtggtctgcttgccttcctcactcccagtaactcacattgtaattttttgtcaaccgttgccg

SEQ ID NO: 42376 - DNA, 960 bp, Artificial sequence
  DNA replication origin
gccgtctggcctcgcgcctgcctgttccctccagcccggacccccctgaaatatgttcaggggcgcttggatgtggcccgggaaagacgccgccgcgctgactatctgctgctgctgctgctgctgggctcccaggccgagcgacaaaccttgcgccgactccgagcgggcgcagcgatggcgactgtccctggcgtccctgctcttcttcaccgtgctgctcgctgaccatctgtggctgtgcgcgggggcccggccccgggccagggagctgagcagcgccatgcggcccccatggggggccggccgggagcggcagccggtgcctcctcgcgcggtgctgccgctgccgccgccgccgcccggcgagcccagcgcgcccccaggcacctgcggccccagatacagcaacctgaccaaagccgcccccgccgccggctctcggccggtctgcggcggcgtcccagagcccacggggctggacgcagcttgcaccaaattgcaatctttgcagagacttttcgaaccgactactccggccccccctctgcggccccctgactccctttcccgtgccccggccgagttcccctccgccaaaaaaaacttgctcaaaggccactttcggaacttcactctctccttttgcgacacctacacggtctgggacttgctgctgggcatggaccgccccgacagcctggactgtagcctggacaccctgatgggggacctgctggccgtggtggccagcccgggctccggggcctgggaggcgtgtagcaactgtatcgaggcgtaccagcggctggaccgacacgctcaggaaaaatatgacgagttcgacctcgtgctgcataaatacttacaggcggaagagtactcaatccggtcctgcacgaaaggctgtaaggtaaggactggcttccgcagccacagcagccgccctgggcagcggca

SEQ ID NO: 42377 - DNA, 1401 bp, Artificial sequence
  DNA replication origin
atgtcaactattctgaggtgtgaagtcagacagcatatctgcccgagtcacctcttctccaggtgaaacacctccttcaactctctccagaagaacatgggttcctgcctccttctcagcccagtcagtgtgagacccaaaatcaaacacactgtctgccaggtgggtttgggtcagtctggaatagagcagaactatcacatccttccctggcactcatctttactaatgcaaccctatggctggtgagagagctaagaactgcccctcccttgggcctctatttcccctcagatcaacagctatgagagaagaagccaggattttgcccccatctccatcactccccctagtctgaatgttctgaagagagagtaggaaagagacagaggtgggggaagaggcaatcagaaaggcaggagtgtggcagaactgggaggatggagagccatgggggagtgtggtggttgtccagtaaccctagctatggccaagagagtggggtgggggttggaggaaatagggcttgtggggatgcacaggaagctaagagagaggtgaggcatgaccctgggagttgggagaggccagggcggggaagggcatcggcctacctaagttacattgccctgctgtgtgagaggaagtcagttgcacattaaggaaatgttgcagctggtactaaattgggaggtgtcacaggcagcagcgaggacaggtatgattcgtggggccctgtgtggcctgaaacgggggcagatattgcaaaggcagagaacagggtttctggggccacccagggaagagctaactgatgcactcagtacagggtcctggggacagggggtcacctggctctgaaacagaggttcccagcttggtttctagaagtaagaaagcctcttcatcttggcctggggctgtggtctctccactcaggagaagctctgagggtggggcgtcatctcgcagggatcccatttggggtggggaccagacaggagggcttggagcccaggaacggggtttgggaatggcaagtaaggcctgccagggaggtggggtgagggactgaggagagaggagcctacagtccaagtagggtagcagggctgtcttttcccttcgtgcccatcatacagctggattcgagagccaggtgggtctggcctcagttgagggagagagcattggacaagggtgggaaaggccggaagagagctatggagctggcactgcccttctgccggcacagcaggcagcgagagcacaggaggagttcgctggtttgctggagagagacagacaagaagacaaaggagaggagggagggccatcaggaacttgatgtgaggccatggcaaaagcacgaggttggcaccaaaacacgtgggctggagt

SEQ ID NO: 42378 - DNA, 924 bp, Artificial sequence
  DNA replication origin
atgcatccgcatggcttagaagcaccctcgcatgcttacgatgtgttgggagattcttgaccctcctttgatcttggttccacccactgtcttccctttcctcactcccaccttcaccatgttcagcagactcttcctgccagaccatggtattgggtgggaggctgttaggctccctttctccacctaactcccccaacccccaccttcaggagataccagtgtatccttcctggaggttcccgttgctatggtgactgtagtagtcaggcaccagcctgcgggaaggatgggaagtagccatgaagaagaccgggggatgtgtgtctgtatgaatgtgtgtctgtgtgtgcatgcacacatgtacatgtctaccctgaatggtaacgagagaagggaagtgggagaaagagagcagagagggagagggggaggcaggaggaaagagggtggaagagaggaccagaagatgaaagagagcaagaaaaaggatggggagaagggaggtaaagtgtgagtggggtgtgagtgatgcaaggcccaaggggcatgcaggccagaagagggtgtgggatcttggagtaaaggtttgggaggggtgtcaggtgggagatgggaatagggggagtaatgtggaatgtgaggggctgactgttgagaggaaagaggtggggagtgaggtccagagttgaggtggaagggggtggagataactgtcaggaggggcaggggttggaggactgtaggtagagggagtaaggtgtgggtgtggcttaggaagagcgtagggtgataagtagaagattgggaaggttgtagggtcattggaaagtggataggcatgttgggtgtgagctaacgtgggaagaacatggaggttggagtgggggcaggtcagggtgggagtgaccactttcccactcc

SEQ ID NO: 42379 - DNA, 988 bp, Artificial sequence
  DNA replication origin
gcaagtagagaagcagggaaagatttcagtggtgggagaacagttgagcttggactcaaatcaggatgttagatgggatgggtagagatgaggtaaatgggcattccaggctgagacaatagcttaagcaaaggtatgtcggcaaacaaatccatggtgtgttaagagaacagagaatggttttgtatgaatggaatgaaaagggcattggtgatctcttgctcatggacacttatttccacattttcactattatgaacaacgctccagtgactgtctttatacacacatctctcacacacttgtgttaaattttatttatataaattcctaaatatgaaattactgggctaaaagagtatgtgaaaaggaacgggaaaagagtgaaaggagggtgaaaaaacaggtgaaaataggaggcagggtaagagagctggagggttaaaggagggcaggaagagaggggtttgaggggtatgagagagtggcagttggggtaaggggtggaagacaggaggtgtatagcaaagagagggtaaggaatggtaggaatagtgggggtaggaaacaacggggttggggagaaagagccagggaattagaggtggagggtgtaagggaggtgaagggttaagagtggggtgagggtgaaagaagttgaaaggtagggacataacagagggtgagataggggtaagcggagctgttaagaggaagcggtaagaaagagggagtaagaaagatgggtaagaacaagcgggggtgaataagatggaataagagtggctaagagagatggggctgtaagaaagcaaagctaagaaagaggaataagagagcgcaagaaggggaggagaaagaaacagaagtaaggcaggaaagaacatgaaattacaagaactaagggtcccagtaccttagagacttccctccatcttttgagccccagagtgccaagatgagtctctgtccataggctctgcctcaa

SEQ ID NO: 42380 - DNA, 1255 bp, Artificial sequence
  DNA replication origin
aaaatgctgccctttcagccctgagctccctttagtcccgggcctggctggacgggaccggccggctcagggctgcggtcgcgagctctgtcgttggggtccagggagactagaggcctgaacgggctgaaaaagaagggcgacactcggccccaacccctcccgtgtcccgcccaggcccctgcctctggcccggctggtcggaaagcgaaggaaggtcagaagcgaaggagagcgggctaccgcgggccgggttagggatgggaacgggcctgaacgcgggagaagcgcgcgaagtgggagaaaggaaccgacgaggaagaacccgctctgcaggcgcccacggaccctagcgccaggcccagttccgcggctgcgcctccgcctccctggtgcctccagcctgggtaggaggagccacagcgccacccagcggccggtgtcggggaacagcagtcagggctcttccgtggccccagaagagtcggggagcggggtggaacaggacagtggagggcctagaggaaagtgggtaccagcgcgggcacagagtggttgataggccctccgtttacttcacctaccagtccatccggcatatggcaccagctgaatcttactccaggtcagctctcaagctcaacatcttccatggctcccaatgggtcaccatataaagcccacacattccctggcctgaccttcacggccttctgtgtttttacctcaggctatctttcaagctcatctcttgccacccactccacacatcctgtaccactcattcctgctcagatgaaccacccaccacttctgcatctacatccattcactcagtgagcattgactaaggcactgggaagataataaataagacagacaaggtccttgtctgctcagagcttacattcaaatggagaaacaggcaataaacaagaaagccaaagtataaacaagatcgttccaaatagttacaagtgctagatcatataaaaagcagggtggtatgatagagtgtctgcggtgagaagggcactactatacctagagtagccaggaaaaacctttctgagaaagcggtatctgagctcggacctgatcatgaggagcattgcaaaagtctgggggaataacatttcaggctgagaaatggcgtgtacaaaggtcctgagacaggaacaagcttagcattatcagaggaaaataaataaggcagggtggctgtaggagagtgaagggaatatgctaggtgagg

SEQ ID NO: 42381 - DNA, 1531 bp, Artificial sequence
  DNA replication origin
cagccctggctccctcgctcccgcggcgctgctgcaggcaggagttccctgcgctccacctccgggtagcccatggcctccggagacacccactctcttgaggcccgggagccgctgcgtctgcctcagccgttcacgacctctgacaggcggctactgtcctgccatcggctgggggctgcagggacccgttcctgcgcgacagtggctgggcgggacggagcagggagcagccgcatgtgcagctctactccgaggggtgggaaagggaggaggaggggcgggagagaggggaggctcggcccgccgagggaatgaaggaggaggtcccggccgaccccgccccatccctcaagcggctgccgggacgcccaaccacggggccgccaagccttggcgccccgccccgtgccgttccagccgggcctccagccgcggggcggggcctgggggcgtgagggttcgcctctgcctggccgccccacccagctcttcccgcttgccccgtaccagttggtgactggcgctgtcgttcatccctgggctccgccccagtttaaccctatagcgccagtacggggaggaaaggagggggaggctaagaatttgggaaccttggaaagaaagtagagcaaagaaaaggaggcagaaactagcattaatagaaatgtttgcaattaactgcagttgttaataacatcatccagtacttatctgttgcttccaatcttcaaagcgtttaacagacgttaaactaattaaaacagctctgggtttggaatgaaaccatgcctgctgtgtttgcaattcaatggctcgcccgaagaaaaggagacccaggagcctgggaactatgggaatgggtgggactcaagcagcctcactcctggagtgactctgaaggctcaatctaagtaacagagaagccgccccatgccaagcggaactgaaatgatgttgtcccttgaagggtaaaacagtctcctaggatttcttgatatattaattaattcaacaaatatctatcgatccctgtacaatgcaaaaaatgctgtatgagagcatccacagccagaatagatttcttccactgcagcagttttgattggagaacgtatgtcttcagtgagtagacagggaaaccgagggccagaatgaagtggatttgtacaagtgtggtccacagaatggccagacactactggcatctttatttacaggcaactgttctggcctctccacccctcccatccttctcctggagtactccctgggggaagttcaacaagtcagccaaatgttccagatgtacactgctgcaactgcagcatcttcaacagctgcaccaatcagaaacgggttcagataaaaaaaaaaaagtggcaaaaggcagaacaatagaccctgaaatgaaggatggaaaggattaaatcaagagtcacaattgacaagagttactagtctgagattatagaaagcgaaatgaccatagcaggggaaccatgtatgcttcatagtcactacgcactct

SEQ ID NO: 42382 - DNA, 901 bp, Artificial sequence
  DNA replication origin
ggagacctgatacccctgttctgccaagaagttgaaaagagggatagtatgggtgttgcagtctctttgagaggggctacacaggagcagatcattaacatattgaaggagagtggacggttttagggataagatacagaggtcatgagcaagggcctgcccaaaatggtgggggctgtttctgaaaccttgaggtagtatgcatgtgagctggtgtgaaaggtgtcagggtcttcccacataaaggcaaagaggtcttgagaatcagggtgtaaaggaattgtgaaaaaagcatcctttaggtttagaacagaaaaatgggtggtattggagggaattgcggaaagtgaagtatatgggttaggaactactggacatactgggagtacagcctggttaatgagcctgaggtccttgactaagtgataagttccatctggctttttgacaggtagaattggtgtgttaaaaggggagtctgttgggcggagtaggtgactggcaaggaggcgagaaatgataggctttaggcctatgagagctgcttgggggatgggatactgcttctgtgataggaactgggtgggctctttaagggtaatgcggacaggagtgtggtgttttgcgactgaggaaaaaggtgtggaagtatcccaaatagcggggttaactacggatggggaataaggaaaggttgcatgttttaaagtgggaggttggaggagtagaagaaagttagaagcaccagagaggggtttgggttgatgcattgggtactatggggaacgtggaagtggagagtagtgtggagttttgaaaggatgtctctgcctaggagtggagttgggcatgagggcaggactaagaaagagcgagtgaaggaaaaggtgtgcggggagca

SEQ ID NO: 42383 - DNA, 939 bp, Artificial sequence
  DNA replication origin
cacaatcatgtggtctcgatggcagcatccaagggcttcatcttgataatcccagtgggggtcctggttggggactacctctgcgccagtaggctgggcaggagcttggtgatgaattgtattagcatacgcctgagctagggtccagatatggtcccggtcttctggggtgagggtggaagagaggataatacagaggtcatgccaagttcataagactgggtgaggtactgaaactctaatataagaggtagggtcttctggaaatgaaccaagtcttttgttaatttgagagagatcagtgagggagaagggaacatgaactctaacaataccttcagttcctgctacttcccaaaggggacactctagcacaggtgctgaagtaagggtggggcatggaccaaagatggtacctgagtgagtacaggtgggagagaaggaagaagccggaagtggttcttgccgagggtttgaagggggaagggggcgttgagctgataggcagtggaggatagataggggcataaggtggcaggatgggtttacagtcctcaggagagggcggtgggggaggagaatgggtacagacaatactagaattgtcctgaggaggggaaggtgtaggaaaagaagtggatactgctgattgggaagatggtggctgggaagatggcagctgagaggatggtggctgggaagatggcagctgagaggatggcaactgggaagatggcgactgagaagataaagaggaggcttgggggactaaaggtggttgagagagagaggaggggtggacagcagtctgctggatccaacaaggaaaaagaggttgggctgggaggagaaaggcgatcagggcggcgagaatggaggagaaggatttgaacaggtgagcaagaattgccgaggttgggttgtgatctgagtgcaaaa

SEQ ID NO: 42384 - DNA, 1402 bp, Artificial sequence
  DNA replication origin
cccccctcaaaaaaagagtaaactgaaaggactgtgtttgcaggaatgtaaggaaatgtccttgttctgatgcacaagttaatggttccctggtgaagggacctgaaagactggagaaaaacgcactgcttcctcaacagtaggggcaatgccaagtccagggttagagcacattcagcggtgtagtatctgtcatgtggctgtcaggcatggctactgcctgcattgtgtgcagacttggaaatgaagtcggctctcaatcagcgaaagactctacaggcccaactgccacacacattgcaggaaggccatatttgaatcccgccaaaaacctttgctgtggggtccaatgggctcatacttccggtctcccaacagccaatcctagcactgggcatttgcgggtggcccagcaagtggcctagcacttgcgggggcgtggccatggagacacagtgaccaaaggcagagaagaatgcgaatgggggaggggaagcggaggctgaggtgagcctagagcggcggttagagccggtgaggtgaaagagagcgaccgttaggacaggctgaggacttctggtctgttcggtacttgaactgccagcaaatttcaactcccgcttgccattcaacatcatggatgatccgaagagtgaacagcagcgcatactgcgccgccaccaacgcgagaggcaggagctgcaggcccagatccggagcttaaaaaactcggtccccaagaccgacaagacgaaaagaaagcagttgctccaagacgtggcccgcatggaggccgagatggctcagaagcaccggcaggagctggagaagttccaagacgacagtagcattgaatctgtcgtcgaagacctggccaagatgaatctggaaaaccggcctccccgctcctccaaagcccacagaaagagagaaagaatggagtccgaggagagggagcgccaggagagcatcttccaggctgagatgtcggagcacctggccggcttcaagcgcgaggaggaggagaagctcgccgccatcctgggagccaggggtctggagatgaaagcgatcccggccgacggccactgcatgtaccgcgccatccaagaccagctggtgttcagcgtgtctgtggagatgctgcgctgccgcaccgccagctacatgaagaagcacgtcgacgagttcctgcccttcttcagcaaccccgagaccagcgactccttcggctacgacgacttcatgatctactgcgacaacatcgtgcgcaccacggcatggggaggccagctggagctgagggccctgtcgcacgtcctgaagacccccatcgaggtgatccaggccgactcgcccaccttgatcatcggggaggagtacgtcaagaagccgatcatcc

SEQ ID NO: 42385 - DNA, 4158 bp, Artificial sequence
  DNA replication origin
gattgaccttgttatatcatctggtatgaagtgtgaaagatatgaatgtaacaactttccttatttcttagagatacagaaatatctaaaaagattctttaaaatattaaagttttattctattttgttacatcaaaagtgaacaatatacttttgttatttgagacttgttaatatccttgaattttccaaaagaatataaaatgaaatgatttacagtcaacaacttatgaaaattttaatctttactttctgtaattcagtgagattaattttggaaattctttctacattccaaatgctctaagataaaatatatatgtttttgaaagtttttaaacatgtagtttgttcaaaaataaaaaccatttaaaaaatacctgcttctctgtttttgtgtagctaacttcatatagagtttatatcccaggatctacttaagcaaaggaatcctggagggttagggagcataggcctgttgcgggtggcggggtggtggttgctgactggggacaggggcaaagactgctgaagggctctagaaatgggaaaggtgctctacttcagtgggctgcatagggtcagggaagggggtgacaagctaaaagaagaggcctggctagggtaggggaccttcatggacaaagaggcccagctgggtagcgggggcacaggctaggaaagaagtcctggctgagggaggatgcctgcaaagggtccaggctggaggctggggcatggactggtgaagggttcctggtaggagaaggtggcccagctggggcaggctggagaaggagaggaagggggcctggcttgggaagggaagctgtttgggaactgggctacagtctggggaaggggtcctggcaggggtggagttgggtggagagaagggcaggaaagggggctgggtcaagaaagagtcactgtctatacaaggaggaataggctgaccagggggcaactcaaagggacaagatgcctcgtagcaacgggtctttggctattgaatggggaaatggctctggcaaactgcctggccaggggaattgaagggaattgggaaattgggcctggatagggaagggagcctcactggggagggcacacaggctgaagaagtgccatatggtgtggaggggtcattgaagaaggaagcctggctgggatggggggaggggggacctggctgcaagggtgggggaatgctggctgggaaaggtggcccggctgatgatgcaggcttaggtgaccaaaggggccaagcatgggagtggccttggcagggcaaggaggaagatcttggggaagaggtaacaggctagggaggcactggcagaggaaggggacaaggctgggcaagggaacctggctgtggactgggacacggggtggggaaggaagcctggctgggagggacataatagggtgagcgggggtggggggagcaggttagggaagaactggctggtcaagggaaggaggcccagttgagttaggagccaaaggatgagaaaggtgttcctagctgttaatgagaggaaaggctggggaagaacgcctggccggcggaggggacatgggctgtccagtggagtccaggctggagaaggcactggaccagggaaggagatctagcaggaaagtaagcataagctggggaggaggacatagactcggggagaaggacatagattggcggagagggcgagactgaggaagggtcccagacatggggatgtgcctgtcttgtaaagggaccacagtcttgagaggctggcacaatctatggaagacagatgggtgtggggtagggaggattgtggggtaaaaagaccccttagggaaaggttgcctaactggagagcgactctgacagcggaaggggctggggagggaggcacagactaggaaagggaacctggtggtgggaaaggtttgaataccgagaaggacataggctagagatgggatcataggcaggttagtgggcccggctgggagagggggcctaccaggtggagagagcttgctaggaaagaaatcatgcctgggaatgagggcctctccccctgacaggaacttggctgaggaagggcacgtggttgagaaaacgggcttagttgtagaggggcacacaggataggaatggggtctggctggggtaggggcaataggctggacaaggggcctaggcaggcgaaggctgtggaaggaggcctgcctggaaaaaggagcacagactggggcagagggcacgttgggtgaggagagcttggctgcaggaggggcatggctaggaaccctttcctagccggggaagcagacttggcttagcacggggcacatgtgggtgaagggatcctggtgggaaagattgcatggctggggaggccactgggtaggtgagggagagctgagagaagatgcctgactgcggaaggaggtgctggctgggaaaggccagcaaaggggcaactccttggaaaagtggtcccgttgaaaaggggaaaggctggggatgggtgcccggctgtgggaaggggacatagagttgaaaaaaggcctgggctggggaagggcagactggctaaggaggttggggaataggctctggctggggttgagtctgtcctgggagagaaaggaaggaggggcatctggttgggggtacaggatgaggaggaagccccaccgagacacagactgggaacccagcagtaagtggttagagggcagagaggtgcgcacaggctggtcagatggctaagaaaggggccaatctaaagaggacacagcttgaggaagagggtctggctggggaaaggggccctgggcaaggggacataggctaagcaaggaaaataaagttgggtcgtggagcctgcctggagatagggatattgggcaaaggggacctggaaggagaaggggctctggctggggtagaattccttcatggtccaggacaggctagagacaagagttcaggctcgggaagtctgcctggttgccaaagaaggcctacctgtccagggggcacaggctggggaggggcaacaagctggggcagagagcctgggtagggttgctgcagaaggcagtactggctgggaaatggggcctgactggggaggccgtatcagtaggtataggggaagcatgtctagcagggcaaggtgacgtgactggagaagtggccttggctggggaaggaagcctagctgggaggaaaggtatataaatggatgaagggggcctggctaagtgaggtggcctgactgagaaagcgggcatgactgggttccagggaacaggcagaatcagggctcctgatgagagaagggcaggcagcacagggtggggatcgggtggggaagggggactccctgagaaaggaggcctaggtctagaaaggaaatagactgaggagcaaggttaaggaagcgcagctgcgcaaggaagggagaataggctggtgacaaggacactcattgctgaagggagcctagttggcatagggtataagttggtataggatgaaaaagagattcctggcttttgaagaggggaggccacctgcctgggggcagaggaacttgctaggcaaggggttcacagggtatggggggatggctggggaatgggcacagctgtggaagggtgcactggctgggaaagggggcataggctgggcaggggtcttaagtggagaagaggcataggttgctttagagggcactgcctggataatgtgagccttgctgggggtggggctggtacagcccaaaaaattctgtgacagatggcaccaaagatggtaaagtcccattttacaggcttgtccctgaatacaagagaaatagctattcctattttgggaacctttaagatctcactcggcccgtccccagctgcccccattgggtctgccttcagcaggaaggagagggaagtgttaacccaggccagatcctaaccatgcccagaacacaaagaggggggtctccactgtgggatctggcaggacacaagggatttgcagtttgttccattctataacaatgactacagtcactgaggacaggctattctgggcaagttcatgaaagccatggggtactgttctcaaaaggatctaattccagaagcaac

SEQ ID NO: 42386 - DNA, 1173 bp, Artificial sequence
  DNA replication origin
cttaatccatttaacccttagtggacacagcacatgtttcagagagcacggggttgggggtaaggttatggattaagagcatcccaaggcagaagaatttttcttagtacagaacaaaatggagtctcctatgtctacttctttctacacagacacagtaacaatctgatctctctttcttttccccacatttcccccttttctattcgacaaaaccgccatcatcatcatggcccgttctcaatgagctgttgggtacacctcccagacggggtggcggccgggcagaggggctcctcacttcccagacggggcggccgggcagaggcgccccccacctcccagacggggtggcggccgggcgggggctgccccccacttcccggacggggcggctgccaggcggagacgctcctcacttcccagatggggtgactgccaggcggaggggctcctcacttctcagactgggcagccggtcagagacgctcctcacctcccagacggggtggcagcggggcagagacactcctcagttcccagatggggtcgcggccaggcagaggcgctcttcacatctcagacggtggcggggcagaggcgctccccacatcccagacgatgggcggccgggcagagatgctcctcacttcctagatgggatgacggccgggaagaggcgctcctcacttcccagactgggcagccgggcagaggggctcctcacatcccagatgatgggcggccaggcagagacgctcctcacttcctagacggggtggcggccaggcagaggctgcaatctggacactttgggaggccaaggcaggcagctgggaggtggaggttgtagcgagccgagatcaggccactgcactccagcctgggcaacactgagcactgagtgagcgagactccgtctgcaatcccggcacctcgggaggccgaggctggcagatcactcgcagtcaagagctggagaccagcccggccaacacagcgaaaccccgtctccaccaaaaaatacggaaaccagtcaggcgtggcggcgcctgcctgcaatcccaggcactctgcaggctgaggcaggagaatcaggcagggaggttgcagtgagtcgagatggcggcagtacaatccagcctccgctcggcatcagagggagaccgtgca

SEQ ID NO: 42387 - DNA, 1002 bp, Artificial sequence
  DNA replication origin
ggtggccgggcagaggtgctcctcacttcccagatggggcggccgggcagaggcgctcctcacctcccagacagggtggccgggcagagacactccctacttcccagatggggcggccgggcagaggcgctccccacttccctgacggggcggccgggcagagacgctcctctcttcccagacggggcggctgccgggcagaggcgctcctcactactcagaccgggcagccgggcagaggcactcctcagttcccagacggggcggccgggcagagatgctcctcacatcccagacggggtggtggccgggcagaggcgctcctcacttcccagacggggtggcggctgggcagaggcactcctcacttcctagtcggggtggcggccgggcagagacgctcctcacctcccagacggggtggcggccaggcagaggcgctcctcagttcccagacggggcggccgggcagagatgctcctcacatcccagacggggtggtggctgggcagaggcgctcctcacttcccagacggggtggcagccgggcagaggcactcctcacttcctagacggggtggcggccgggcagagacgctcctcacctcccagacggggtggcggccgggcagaggcgctcctcagttcccagacggggcggccgggcagaggcgctcctcacttcccagacggggcagccgggcagaggggctcctcacatcccagacaatgggcggccaggcggagacgctcctcacttcctagatggggtggcggccgggcagaggctgtaatcttagcactttcagaggccaaggcaggtggctgggaggtggaggttgtagcgagccgagatcacgccactgcactccagcctgggcaacattgagcattgagtgagcgagactccgtctgcaatcccagcacctcgggaggccgaggcgggcagatcactcgaggtcaagagctggagaccagcctggtcaacacggcgaaaccccg

SEQ ID NO: 42388 - DNA, 942 bp, Artificial sequence
  DNA replication origin
agaagtgaggagaccctccgcctggcaaccgccccgtctgagaagtgaggagcccctccacccggcagccgccccatctgagaagtgaggagcccctccgcccggcagccgccccatctgagaagtgaggagcccctccacctggcagccaccccgtctgggaagtgaggagcgtctccgcccagcagccgccccgtccgggagggaggtgggggggtcaggccccgcccggccagccgtcccgtccgggagggaggtaggggggtcagccccccacctggccagccgccccatccgggagggaggtgggggggtcagccccccgcccggccagctgccccgtccgggaggtaaggggcgcctctgcccggccgcccctactgggaagtgaggagcccttctgcccggccaccaccccgtctgggaggtatacccaacagctcactgagaacgggccatgatgacaatggcggttttgtggaatagagcggggggaaaggtggggaaaagattgagaaatcggatggttgccgtgtctgtgtagaaagaggtagacatgggagacttttcattttgttctgtactaagaaaaattcttatcctgttgatctgtgaccttacccccaaccctgtgctctctgaaacatgtgctgtgtccactcagggttaaatggaaaaaaaaaaaaagaaaacgaagtctagaaactgaagtttgacagtggaaaacccaaattccatcctattctcataaccaaaaaagattggcgaaaactgactggatgagtagttggcagccaagaagattatatgcacgccctagaccagtattagactgacacgaataagcagaggcagattaggtggggctatatcagagaagctttctaaatagcctagagctgttttccaagcaatgtactcagtcacttcagtataaccaat

SEQ ID NO: 42389 - DNA, 1322 bp, Artificial sequence
  DNA replication origin
ttagtacagaacaaaatgaaaagtctcccatgtctacctctttctacacagacacggcaaccatccgatttctcaatcttttccccacctttccccccgctctattccacaaaaccgccattgtcatcatggcccgttctcagtgagctgttgggtatacctcccagacggggtggtggccgggcagaagggctcctcacttcccagtaggggcggccgggcagaggcgccccttacctcccggacggggcagctggccgggcggggggctgacccccccacctccctcccggatggggcggctggccaggtggggggctgacccccctacctccctcccggacgggacggctggccgggcggggcctgacccccccacctccctcccggacggggcggctgctgggcggagacgctcctcacttcccagacggggtggctgccaggtggaggggctcctcacttctcagatggggcggctgccgggcggaggggctcctcacttctcagatggggcggctgccgggtggaggggctcctcacttctcagacggggcggttgccaggcggagggtctcctcacttctcagacggggtggccgggcagagacgctcctcacctcccagacggggtcacggccgggtagaggcgctcctcacatcccagatggggcggcagggcagaggcgctccccacatctcagacgatgggcggccaggcagagacgctcctcacttcctagatgggatggcggccgggaagaggcgctcctcacttcctagatgggatggcggccggcagagacgctcctcactttccagactgggcagccaggcagaggggctcctcacgtcccagacgatgggcggccaggcagagacgctcctcacttcccagacggggtggcggccgggcagaggctgcaatctcggcactttgggaggccaaggcaggcggctgggaggtggaggttgtagcgagccgagatcacgccactgcactccagcctgggcaccattgagcactgagtgaaccagactccgtctgcaatcccggcacctcgggaggccgaggctggcggatcactcacggttaggagctggaggccagcccagccaacacagcgaaaccccgtctccaccaaaaaaatacgaaaaccagtcaggcgtggtggcgcgcgcctgcaatcgcaggcactaggcaggctgaggcaggagaatcaggcagggaggttgcagtgagccaagatggcagcagtacagtccagcttcggctcggcatcagagggagaccgtggaaagagagggagagggagaccgtg

SEQ ID NO: 42390 - DNA, 1328 bp, Artificial sequence
  DNA replication origin
tggtgcgaggggtgggggtggcccccgcctgcgagggcaaggtctgcgagctgtagcccccataacccgcgctggcgccgttgcccccacctggcccgtaagggtcggggacttgccagtcgccgtagcccggaggctcgaggcgccgcagggcggccaggcgggtcacctcatagcactcagggcacttacagcagtgctggtgcttgtgcatggcactgccccccgcggctcggaccccccagcccacgccggattccacgccgccgccaccgccgccaccaccgccgccgccgccgccgggctccctggcacactcacactgctcggaccaagaaggggggggcacccgtgggggcgcccgggctgagcggggcctggggccgggcgggcgtcccggggcctcggcccccacgctgccccgcacccacggctccccctccagcactggcggctccgtgtcgcccgtcgtggcttctgggccgaggcccagcggcaaagaagaagcgggagctcaagcagagaatgggtgctgtgaggaccgcttctgctctggtccccaggatggatctgagtggagtcaagagcatctctccctggctcccttctcagttgattccagccaatcagcgcgcagaggcaggcagcggcagcggcagcggcggcggcaggaatgctaaacagcggctacttaaaggaacagaggcagcggcgcccccaggctcagccccagctcccccaatctctagggaactgttggctctaagggcgggggcagaggacgtgggccaccagaaagctcaggcacccgatcttgtgcccttatatcgccagttttagcctgtcctctgcccactccaccccaccccacttccaagagggagttgcagggagatgttcaatgggtccccaggcttgctctgagctggggccaccagaagtaaagacgaggtagcaggatggacagaaaggacgttggagcagggtgagggaggtgctttctcttacaggggaccaaagaagaaggcagcatatgaggcccgctgtcctgtcaatgcctcctacacaagactattgttctctcagtctctaggccctgaaattactgtgacctcacacttgaccttctaccatcaccagtaaagaactcaaccctagaacagggattaacagaaagctctaagtccttgtccctggcccacaaacccctatctcctccactccacccctgcatggttatgatgggggaaggaacttcaggatatcaagatgaaagtccaggacaggtgaaaaggtaagaagggatttgaagagagagaaacccttct

SEQ ID NO: 42391 - DNA, 1345 bp, Artificial sequence
  DNA replication origin
ccccccccttcttggtccgagcagtgtgagtgtgccagggagcccggcggcggcggcggcggtggtggcggcggtggcggcggcgtggaatccggcgtgggctggggggtccgagccgcggggggcagtgccatgcacaagcaccagcactgctgtaagtgccctgagtgctatgaggtgacccgcctggccgccctgcggcgcctcgagcctccgggctacggcgactggcaagtccccgacccttacgggccaggtgggggcaacggcgccagcgcgggttatgggggctacagctcgcagaccttgccctcgcaggcgggggccacccccacccctcgcaccaaggccaagctcatccccaccggccgggatgtggggccggtgcctcctaagccagtcccgggcaagagcacccccaaactcaacggcagcggccccagctggtggccagagtgcacctgtaccaaccgggactggtatgagcaggtatggaccagcggaggggggagcggtggggcaacccaggagggctggagagtgggggcctagaggcctgggatgcagtaggggtcgctggggctccaagcctgtggaccccgagccctagcattgcagctgggcaaagagaggcggtgggaaatgtgtggttccctgtgtgtgtctgtttgggggtctccattagaagactgggaggagccgtgtgtcagggggtaagggcatggcggaggggcacattttcctgtgtgggggaattgggtttgtctcagtgtgggggtttggcaatgtctctgtgtctggcagggggcgggaggttctgcgggggctgtgtgtggtgtgtgtctccaccggaggggaggggagggggcatggtgctctgcgtaggggggacatatgtgtgtgtatgtatgttggggtgtgtggaggaaggcaatggagctgccgtgaatccgtgtggaggagcccatgtgcccggctcgctgagcttcatcccttgatgccatgagtccctctccgtcccagtccctttgtgtgtgaatgtgcacatggatgtgtggagatgtcactctgaatgtggagaggtctctgtagaggaggctgcagggatggctgtgtttgtgtgtgtggctacatgtatatgtgtgtgagcatgtggctgcaagagtgtgcacgcgtgtgcctggtgtgtgtgtgtgagtgtgtgtttgtatgtgttgtctctggtgagaggcgcttgacaggcaagggaggggagaggaaggaggcgagagacatgtcccaagcaaggctgagaggctgctgagaaggacggactcttttgtccaagcagctctgtagtgtgtgt

SEQ ID NO: 42392 - DNA, 776 bp, Artificial sequence
  DNA replication origin
tgtgagtgtgtgtttgtatgtgttgtctctggtgagaggcgcttgacaggcaagggaggggagaggaaggaggcgagagacatgtcccaagcaaggctgagaggctgctgagaaggacggactcttttgtccaagcagctctgtagtgtgtgtgccggggtggggtggcggggggcggggggagatttgaaggaactgaagcaagcctcctcgctctagagcaggcatggtgcctggagccggcaaggggcagctgccctggtgcagagactggccccagtggggcatgtcccccttgggtacctccagatgtgagagggcttagccccccagccctgacttggcacagcttgggagcccctgggtgctgggcacaactccggcttccactcccagcctaaactgccagcttagaaaatggaaggagcatctgtgggagaagcagcaaaatggaggctgggctggcagagccaggtccctggcacgcaaggcggagggcctgtctggttatccggctctgcagctcctagggtggggagagaggaagaggaggctttgctgtcgagggcaggtgatgacttccccaagctggtgaccgttctggctgcctctgtcctctggggataggatgtgctctcactcagaggcaaaggtggggacttcctggggagaagagccctcagttctggccttctgtctgtccacacttactgctttcccacatcccttgccttggcctcttgccctttccagcgagtccctctctctcctttgcc

SEQ ID NO: 42393 - DNA, 1051 bp, Artificial sequence
  DNA replication origin
cttcactgcatcaatcaatcaacccactaacaaatattaattgaccttgctcactgaggcctggggaattggggaggggatgggtttcccaaaatgatcagcagaggctgggtgtctgacaaatgtgcccagcctgccatggccccttctgaggcctggagaactagctctgggatataaggggagatgaggtacccagaactctcctttgtgccctcagagtgaacagactgtgcctttccacccacttctgcagggcaactctggcctgggcttcagtatcgcaggtggcatcgacaatccccatgtccctgatgaccctggcatctttattaccaagattatccctggtggagcagctgccatggatgggaggctggggtgagatggcctggaagcagggttgtgggtggcagggacaggatcgagatgaggggaggaaagcctgcctggcaggatgacccttccattagatctgagggcggggtgggagggcagaggaggggaggacagagaagtgggaggaagcaggagagggggtggaggggtaggggcacagtgtcatgcctctcgggcttcccccacagggtgaatgactgtgtgctgcgggtgaatgaggtggacgtgtcggaggtggtacacagccgggcggtggaggcgctgaaggaggcaggccctgtggtgcgattggtggtgcggaggcgacagcctccacccgagaccatcatggaggtcaacctgctcaaagggcccaaaggtgcggccctccaggttcctgtgctccagccagagccttaggccccagatcccatcttgccccatagggaattggaagggaatggccttactccttgcctgactccccctgttccaactcacagcctacttttttgacctcaggcctcacccttactcatctcaggatggcagcttagcgtttggatcccccggggggagctcctgtggggccagtgggttggctgggggagggggtttggatttgggatcgacaacactttaacctctccttgtggccctctcccacctcctg

SEQ ID NO: 42394 - DNA, 828 bp, Artificial sequence
  DNA replication origin
gtggtgcggaggcgacagcctccacccgagaccatcatggaggtcaacctgctcaaagggcccaaaggtgcggccctccaggttcctgtgctccagccagagccttaggccccagatcccatcttgccccatagggaattggaagggaatggccttactccttgcctgactccccctgttccaactcacagcctacttttttgacctcaggcctcacccttactcatctcaggatggcagcttagcgtttggatcccccggggggagctcctgtggggccagtgggttggctgggggagggggtttggatttgggatcgacaacactttaacctctccttgtggccctctcccacctcctgctggctcccgctcaggcctgggtttcagcattgctgggggtattggcaaccagcacatcccaggagacaacagcatctacatcaccaagatcattgaggggggtgctgctcagaaggatggacgcctacagattggggaccggctgctggcggtgagacagacttcatggggatgcccaaatggtagggtagggaggaggagctccagtaccccttactccgcctaaacctcactcagggatgaggcatcatgggggaatttcaagagttatcatctgtgttgtgtttgcccagatacaaaggccctaattctttctgtggccagggtcttgccctatcccctacctcctgcctctgctcctcacagcactatacttgggcctttgttagcatgctgttgaatttcactgaaaaggcatccctcgagttccctggagaagcctctccttcttccaagtcccagcctg

SEQ ID NO: 42395 - DNA, 1352 bp, Artificial sequence
  DNA replication origin
tgcagataaagaaaggatggggtggagcgtttagggggctgaggaggcgagggcagcggagtttcctgccctgagatagttgcagcccgctctgctgcaaccatttcaaattagagaagaaagcagttcagccggtggggctggcgggactctgaccggcccggtggcctcgccggcaacggccccgccccgctggcggcagcggcggcggcagcggctgcgcggggcctggaactggtcgggccggctggggttccgggggacaggtttgcagggtggggcccgagaggctggcgggcaggcagcagtggagccggaagggtaggcagccaggggagagagagaggagctatggagagggcccgcaagttctcgggctccggcttggccatgggcttgggctccgcctccgcttcggcctggaggagggcttcgcagaggtgggcctggccgctccgctccctgcggcccggaggggatgccaggtaggagtggagggctaggagcaagagcatccgggactcagggagggagtctcgcccctgagactgggagcaagaaaggaagagtcttgcgtggggctttgggctcctccgaggaaagatgcttgtaacaagtgaaggcggtgggccgggaacgtgccctgggagttgggcggatgacactgtgaccttttacagagggcttccttagatgtggttagttttattcgcatttctcatgtgcttgtctgctctcttcagtttggattctaaactccttttggggacctgggatccccctaagaacccaggcgctgcaaccccctggggctacatagtgttagctgctgattaaatatgttgttggggcagcaggtaggaggggtcatagttgatgggtgagattttgagactgcagaagagtgtctgtgaagtaagtgtgcacatcctgtggatgatgagtgcagtcaaccccagggtgactccactgcccctaactgcttcctcttcttgtggtccagggtccatcacacgggttggtaggataggagaatctgggaaggaagaggaccagtgagtgggcctgagatttggtctctggagttcagggtagggatttgttcacccgagagagtaggggactgtccactgggaagttgactgcaagccctcgggaagaagggagggaagaggaactgaaacttggcacctgacagaacagcagccaagcaggtttcaggagacaaagggaggctcagggtatcatacatagggaaccacgtccttactccctacagcaagtatggaccttgttccaggctggccctcaaaggacaacagtccatatctacctagtcctgactcctccac

SEQ ID NO: 42396 - DNA, 1056 bp, Artificial sequence
  DNA replication origin
cgcaacgaaggcattcgagggagagggcagaattggggcacgcagtgttggaaaagaggctgagaacagagccgtagagaggttaggggggactgcgagggggcctgacccccgtccgccccacctcacctggcgccgggtcggagtccagatctagtgctgagaaagcgccagctccggccagtccctccgtcccgcgcgggagaccacggacacaaagcggggcgcgcgggaggaggggaggagagaggagggggaaggagggaggaggaggagacgcctgaggcgcgcgatggggggaaggaggggcgcctgccgccctcctcctgggtcagggggcggggcatgcggctggaggccgccctcagccggccaatggccactccactggcccgcaggctagggcgcgccttcccgcggctcacctcggcacctgggcctcggttggccccagccaatcaaacgcctttatttgcatgaccagccccgcccattcgccccagccaaggactgctcactgagaatacaaagaaggccccccggaggggagggagtcgactccagttggcctatcccaagggcatagtatcaccttttcagcgcgtttatgggtctttcacggtcatcttgatgaggggaggggagtgggggtcacagaggtttggcccaagatctcttaagaggtcggatctcttctacctgaggtccttctaaccaagagctgctctcctcttccagggcacacagttcccagtcttctcctgtgggccctccgccccctcccctttttccagtcgccctaatctttggatgctgcttccagtaggctgctgcccactactggccttctcctgcactgcagcccacatcagcaggctctgagcacagccttaattgatgctttcaagccgcccaaaccaacccctacccagcaggaaaaggagagaggaagaggttactgctctaggtagaagggacctggtcaagtggctttgttacctaggatggcaaaaagccaacacataatataagtctaactcccccacatcatctctt

SEQ ID NO: 42397 - DNA, 1153 bp, Artificial sequence
  DNA replication origin
ttccccacctttcccccctttctattccacaaaaccgccactgtcatcatggcccgttctcaatgagctgttgggtacacctcccagacggggtggtggccgggcagaggggctcctcagttcccagtaggggcggccgggcagaggcgcccctcacctcccggacggggcggctggccgggcggggggctgaccccccccacctccctcccggacggggcggctggccgggcagaggggctcctcacttcccagtaggggcggccgggcagaggcgcccctcacctcccggacggggcggctggccgggcggggggctgacccctcccacctccctcccggacggggcggctggccgggcggggggctgacccccccacctccctcccggacgggcggctggccgggcggggggctgacccccccacctccctgcctgacgaggtggctgccgggcagagacgctcctcacttcccagacggggtggctgctgggcggaggggcttctcacttctcagacagcgcggctgccgggcggaggggctcctcacttctcagacggggcggttgccaggcagagggtctcctcacttctcagacggggcggccgggcagagacgctcctcacttcccagatgggatggcggccgggaagaggcgctcctcacttcctagatgggatggcggccgggcagagacgctcctcactttccagactgcgcagccaggcagaggggctcctcacatcccagacgatgggcggccgggcagagacgctcctcacttcccagacggggtggtggccgggcagaggctgcaatctcggcactttgggaggccaaggcaggcggctgggaggtgaaggttgtagcgagccgagatcacgccactgcactccagcctgggcaccattgagcacggagtgaatgagactccgtctgcaatcccggcacctcaggatgccgaggctggcggatcactcgcggttaggagctggagaccagcccagccaacacagcgaaacctcgtctccaccaaaaaaatacgaaaaccagtcaggcgtggcggcgcgcgcctgcaatcgcaggcagtcggcaggctgaggcaggagaatcaggcagcagtaccgtccagcttcagctcggcatcaga

SEQ ID NO: 42398 - DNA, 1026 bp, Artificial sequence
  DNA replication origin
aaccgccccgtctgagaagtgaggagcccctccgcccggcagccgcgctgtctgagaagtgagaagcccctccgcccagcagccaccccgtctgggaagtgaggagcgtctctgcccggcagccacctcgtcaggcagggaggtgggggggtcagccccccgcccggccagccgcccgtccgggagggaggtgggggggtcagccccccgcccggccagccgccccgtccgggagggaggtgggaggggtcagccccccgcccggccagccgccccgtccgggaggtgaggggcgcctctgcccggccgcccctactgggaagtgaggagcccctctgcccggccagccgccccgtccgggagggaggtggggggggtcagccccccgcccggccagccgccccgtccgggaggtgaggggcgcctctgcccggccgcccctactgggaactgaggagcccctctgcccggccaccaccccgtctgggaggtgtacccaacagctcattgagaacgggccatgatgacagtggcggttttgtggaatagaaaggggggaaaggtggggaaaagattgagaaatcggatggttgccgtgtctgtgtagaaagaggtagacgtgggagacttttcattttgttctgtactaagaaaaattcttctgccttgggatcctgttgatctgtgaccttacccccaaccctgtgctatctgaaacatgtgctgtatccactcagggttgaatggattaagggcggtgcaagatgtgctttgttaaacagatgcttgaaggcagcatgctccttaagagtcatcaccactccctaatctcaagtacccagggacacaaacactgcggaaggccgcagggtcctctgcctaggaaaaccagagacctttgttcacttgtttatctgctgaccttccctccactattgtcctgtgaccctgccaaatccccctctgcgagaaacacccaagaatgatcaattaaaaaaaaaaaaaaaaagaatctcggtctattac

SEQ ID NO: 42399 - DNA, 1528 bp, Artificial sequence
  DNA replication origin
catcacccggaagcctgaatatggcctccactctacagggcgcgcagcagtcagcacggccgctattcagagcccggggcccaggcccgtgcggcgtgcgcgtgcgtgcgtgggcgcgcgtgcgcgccgccgccgcctgtgggttggctagttattttgcaagcgggaggggccgtgcgcgctcctgcctcaggcctctgtcccccaccccctttccccggtcccaggctctccttcggaaagatgtcggacacggcagtagctgatacccggcgccttaactcgaagccgcaggacctgaccgacgcttacgggccgccaagtaacttcctggagatcgacatctttaatcctcagacggtgggcgtgggacgcgcgcgcttcaccacctatgaggttcgcatgcgggtgagtcacggggtgagggagacagctgagggaggaccgggcggcgcgagcgggaggggggagggaggctaccgcgggggcaactaacggcggggaagacgccttaggggtcatttgggggttaggggtataataggcttggaacgaggtctgccgattcagttgtggccggaggatgcagaaaactcctgagggagacatcggacggggatgcaggaaagctacccatgaggaagtgaagcatggctggatagggtggggtggatggaaaaagattagagtgaggaattcaaggagataggaatcacggctgtagcgactgaaggaagggagggaggatggaagagggctgggggatggaaagccaaggcgatatatcgctgagctccataactaaactaggttgtgagaagtctgaagagggagggcaggaaggccggctgctttctaatgaggtctccctgggataatggagtaaagcaaagccttgaattaaagggaaggtagattccagaaaaggcagacagtaggcttgtgggagcagaaataagaaagggagtctccttgagaccgagcgctttcctaacttgtgtcggatcagcatctgaaggagagaaatgttttatgcttaagttttcgcagatactacgtgctgtctcgccttgaaacctggcctggccctgggattggtgccttgtcagtcactgctttcattctatgtggatcctttagatttgaagtatccagaatgtttatttcagtatttattgactctcgtttaggtactttgtatatgaatggctttttgccctttctgtcctagattacccttttggattctgaccctggtctgtagttactttaatacatgacatttcagaattgcccaggagtggcttcttccagcatgcatgatagaggactttactctctagtgcttagcccataatgcaaggatggaatgtgcagatagagtacttggtttgcaggatcttttgcccacttgaagtggttataggcaaaacagtttgagaatcattttctagttttccttatgttttcttctcagactaaaaggccagaatattctctgtggacagcatcctgctcaaacagcatt

SEQ ID NO: 42400 - DNA, 1053 bp, Artificial sequence
  DNA replication origin
tacacgactctgaatcacaagggagacaatggaaagggggaaagggcgaaaaacgattcttaagaaaagaaagagtccgcgacgacttctaataattaaagttccacctcgttatatcctgccacgccgctctcctgccgccgtatcgggctcctggccgcgaagcaggacgggagatgtagtcctcaagagtgaccagggtggcacgactgcagaactcggtttcccgactggctttcgaggcgcgtgcgcagatggctgccccggcgagtggtaaacagagacgtcaggagggggctgctgcttggagcaaaacaaaagggaaacccggggggcggggggtggggggggttgataggggaatcggtgcgggaataagggaggccgcagccgcggggacccggaccctagtaagagtggcgagaagggaagaggcgggggaagggggagtcaggggaggggcaagtgacgcgggggagcggggcgtgggggagggcagcaatccgggtggaggaaatttgggaggagtgtccggggggcagcaacttaaaagggggagggaactgcggctaaggagacgttcggtgatgggagcgcaatatatgaggggatacagtgcctcaggtttaaaagagcaggaagctgagtgagaggttgcagaaaaagtgtcttcgctcggcagaggttacaggtggcatctcagaaagagctttgaggctacaggctgtagtcgggaaggggatcggagaactgtgtgaagggacagcttagggactagcgtcctgggactagggggaagttcgcgactttctgaagactggcaggaatgtgcctcctggccctcgatgcttcccccctgaggggaggcatcgtgagggactgtggcaggcttcactgaacgctgagccggggaggtccaactccacgtatggatccggggaatgagaattcagccacagaggctgccgcgatcatagacctagatcccgacttcgaaccccagagccgtccccgctcctgcacctggccccttccccgaccagagatcgctaa

SEQ ID NO: 42401 - DNA, 851 bp, Artificial sequence
  DNA replication origin
ttgtgctctaaagtcagagccctacctccttcttcatgactaatattccttaacagtaaaggatgacttccccccaaaacttggatagccccttacaagggagagtttcttggcagcacagggtaagctgagccaagtggcagctcacagccctttttcttcttagtgcatgagatcagctacctttccccatgaatattattgtttttaccctttgccactgcactccctcctcctgggtagagcagtgctagaacagtaccactacactgaggtactgggaggcaagcagggaatccaagtaatcccacaggaatgggagaaaaggtgttggggtgggaggtgggggaggagggaagggtaggttcatgtggggaatccacacagttcctgctgtacataggataaagacttctctgtgggaataagtgtttggggcagcccaagccaaagtgctgcgaatattgagcagtgagcagagaattcaattttctccagggcagggacagtgtcttattcatctgtgatccttcagcatcaagcaccgagtgtggcatatactatgtactaagtaaatgtttgtctaactggagattgaaggtggatctctgggcttcccaaagggggtgggggtgggaggtagtaaaaggggccccagagtagaagtaagggaggctagggggtccagggggtagatggtgttgggaagaaggtaagagggtcataattaccttccatcctgctgagctgttgctgtcacccttgtccttgaagtagggtacagtacggaccatccactcgtagatctgggcaagtgtcagtcgcttctccggggcgctttcaatggcctg

SEQ ID NO: 42402 - DNA, 1145 bp, Artificial sequence
  DNA replication origin
ccccggtttgtcagttttggggggctctggagcctttttctcaggctctagcagggtaggagcaggcggctcctcatcttctgggggcagtggcagtggctccaggtaataggcgcggggccggggcctcaggtgtgtgtggtagagcagcaaccgctgctgctcctctcctcgagccactcgccggtccactcggactgttccaaaccagccccaagagagtggtgctgacggcttcaacccctcaaaaagatcccagggcgagatcttctgtttggtggaaacctgtagaccctgctccagaaaatgaaaaacaataagctgttgggacttagaaaacagaagactgcaagcatttgtaggaatgggtagaaagaaagtcataggcagattcaggagagatggtaagaagcagacagacagacatggatacacatatacatgcggaagagagttatgcggggagagagtgaagggtggggcacagggagaggtgtggaggcacaagatgaagccagcccagaccaggagaggagatgaactaacggggcggggggcgtgtggggagagaagatcgggagagaaaggggttggggagaaagccagagagggagcggggagggagagggattgacattcagaggaagacagaaaaaggaaggcagagaaagagagagaggaaggcagggagagactctgcctttaggcaggccgagaaagagtcagagagagaaagaaacaggaagagagagacaaaaaggtggagagacaaagaaaggcaaacgagtcagacagggagagagacagagacggaggaaaagagacagatggactaggaagacagatgaagagaatgtatatatgaaggagttagactttgggttttaaactatacacaataattatggttactcaacaaataccgcaactgacagagagggaaaagataaaagtgtgcagagatgggtgggtgtagggaaacacagaaataaaagagatacaggctgtcggccagatagatgggtggggtaggacatggggcaggtggagcagaggaaagaggagggtagggtattgaaaaatgggtggtatgttaaaaggtgagggcagggtgaaggaaagagggtgggacttcaaagatggag

SEQ ID NO: 42403 - DNA, 925 bp, Artificial sequence
  DNA replication origin
ccccaccagcaacccccccacattaaccccctcggtgctgcccccaacccacaaattccattaaccctttcgggatgccctcctctccagtaacccttcggcgccaaatgccaaattctcctttgagtcaattccctgcagcccctcccccgtgaacacctagacaatcggaccgacccccaaacgccctctgtaccctaggacccactgtgaatccccaaggccaagatctccatcctggtccaacttgcaatttgggagaagacaaggggaggcagcaatgccggggatgagaatggcatctcggggtacttttggggctgcagcggtgctgggcgcggggcattgtgcaggaatggaccaatattgagaactgcagtattgggggctacgagggcttggaatggattgggggatggagttgcactggaatgggggaggataggataaaggcctccattgggtgggggggctgcagatagtgggggagggagcctggctatgagatgctatgatggaagggggatggggctgcactgcaggggaggggggactggcaatgtgcaatcccgggatggggctgggggccctcaataggggtattttgatgagcatgcgggatgggctgtggaaatagagggaccatgggcgggaggatgttagggatgcgggatttagggaggaggtagaagggagaacagaagcgggggaggatcgggggtcaggggtaccgatggagaacatggggttgagagggatgggggccactggctggggagtggaggagcctgggattgggaggggttaggatgggggcaaggtatgggcagctagaggatgagagaccggggcaggcggcctcacctgttccccgggctgctgcaagcgactgaaccgggccacggaccacccatatcgcctccag

SEQ ID NO: 42404 - DNA, 1118 bp, Artificial sequence
  DNA replication origin
atatccagacacatgcagcataatggtgacacataggtggagacagaaacagaaatagcaacacactcagacacataggccttctgacacagttacacagtcaacacatagacacaggcacacacagatactcccgcatgctcccgcacacacacgcacacacacgcacacccacgccacatgcacatttagttttcctccatttctcccgccttcccagattgcaggcctgctcctttaagaactggctgaaggggtgggggagggagattgggaacgcccggcaatcagccaccacgagaggggaatgagaatgtgtgtgtgtgtgtgtgtgtgtgtgtgtgtgtgtgtgtgtgtgtgtgtctgtgtgtgtgtgtgtgtgagagagagagagagagagagagagagagaagaaaaaggaagaggagggagggcgggtaaagtggctaaaggggtgggggctcagaggaaatgaggaaatggggagcaaagtatggggggtaagatcccagacactgcccagaatgcacccgggtgtggggaggaggggaaggggaaggaaggggtaggagtagggaggtggggcaggagggagtgggtgggtgtgtgtattggggggggcatagtccgcagctgagttcacacaatccccccattcaccgtctccatggcaactccagggcacagaccgctcattcacacagcttccccaccagcaacccccccacattaaccccctcggtgctgcccccaacccacaaattccattaaccctttcgggatgccctcctctccagtaacccttcggcgccaaatgccaaattctcctttgagtcaattccctgcagcccctcccccgtgaacacctagacaatcggaccgacccccaaacgccctctgtaccctaggacccactgtgaatccccaaggccaagatctccatcctggtccaacttgcaatttgggagaagacaaggggaggcagcaatgccggggatgagaatggcatctcggggtacttttggggctgcagcggtgctgggcgcggggcattgtgcaggaatggaccaatattgagaactgcagtattgggggctacgagggcttggaatggattg

SEQ ID NO: 42405 - DNA, 1748 bp, Artificial sequence
  DNA replication origin
aaataaataaataaataaataaataaataagcaaattaaaataaggcccttgaggtgggaggatgatcacttgagctcaggagttcaaaactggcctgggcaagagtgagaccctgtctcaaaaattaaatgaaaataaaatcaaatatggtcgtgtcccctagttagccatggaataagccacgcctaactgctggtttagcacccatatgcctacagacctgaccaagagcctacactcccgctgaaactcttcctccaggaagaagttggcttcttcatgccactacagggatgcggggcttgggggagcatgagcagggccctgtgtgcttagtcaccctctctgaggcactcgtttacctcaagaccttggccatagataggcatgggtggtcaccaaggaaggtacagggttcaagggcagcctaaatgactgacacaagcttgtgcacagcagagaatgcgggggtggggaggtgtatgggtgcatatgaggaggcatttcggcaatgagtgcatatgcatgggagtatgtgtgtgatgggtgggagtgtgcaggggacatgcttagagtacaaagagtgtgtacgtgtgcatatacggggtaaggaagtgtggggagacttgggggatgcggttgggcctgggtagaggtgtgtgtgcatgtatggatacagatgcagccccatgtacacggatgtgtatatatttgtggggtggggtgaggggagaagtgcatgggtgtgtgctgggtgtacatatacaggctgtatatggaagagtgtgcgcatgtatacgcgtgcatgcatatgtggatgtgtgtgtgggggaatgtatgtgtaggggaatgacataagggcagtgtgtgggatgtatatagatgtggatatggtgtgtgtgtagtatctgtgtatgtgtggggtgggacagtgtggacaaacaggtaagagtatatgtgtgtagggaaggggaatatttgtttgtgtttctgaggagatagtgagggacaggtgtgtgtggtaggtggatgtgtaaagtggatgtggaagtagggtgtgcagggggatacgggcgtgtgtaggtatttgtggggggtgggtggaaggaatatttatgtacatttaaggtgtatatgtgtggagtttggtgtggacatggatgtgcagggtgtaggtttttgtgtgggctgtaaatatgggggtaaagtgtgagtgtgggtgtgtatgcatcgtgggtatcggtgtagatgtggctacagagacatggggagaagtatatgagcatgtgtgtgtgtacatgcggagggtgagagccatctgcggggtgcagacgtggagtacacagaccgtgtgggtatgtggatatgtgttctggagagaccatgtgaatggagttacctggagtgctaggagaatgtgtttacatgtgaggggcctggagatgtgaatgtggggctaggtgtgtgtactttatgggggtgagtgagaaatcaccgtcttcctgcaggtgcatggcggggtggatgtgtaaacacatgaaggtaaataggtgtgtggccatggagtggactggaaggaatatctgtgcatgtgtggggtgtttagagatgtggggcgggtgggtagaggtgaagacaggacagtggaaaattgaagcatcctacaaaactcagccaagtcaaagtctggaagcagagacctggcttgggacctgagagaaggtgtgaagtttgaattgaatttctg

SEQ ID NO: 42406 - DNA, 1199 bp, Artificial sequence
  DNA replication origin
cagagaagcccctggctggagacctaccagtagacatggaatttggagaggatctactggaatcccagactgccccaactcgaggatgggccccccctggcccttctccatcctcgggagccctggacctgcttgatacccctgctggcctggaaaaagaccctggagtcctggatggagccactgagttgctggggctgggggggctgctctataaagccccctctcccccggaggtggaccacggtcctgagggaaccctggcatgggatgcaggagatcagaccctagagcctggaccagggggccagacccctgaggtggtaccacctgatccaggggctggggcaaattcctgttcacctgaggggctactagagcctttggctccagattctccaataacactgcagtccccacatattgaagaggaggagaccacctccatagctactgcaagaaggggctcccctgggcaggaggaggagcttccccaagggcagccacagagcccaaatgccccgcctagcccttcagtgggagagactctgggggatggaatcaacagttctcagaccaaacctgggggctctagcccccctgcacatccttccttgccaggtaggttgcctaattatctggagaatcagggctgggagagggtggtggtaaggaggggtggctatgtgctttgggaagtagtggggaggaggagggtggagagataagtgtagggatgtgtgtggggaaggacttggggtttacgagggaggagtggggtggtgtgtagaggaagattaaggaaagtaggggtgggcacaggctgtgggggaggaatggggtaaggtttcagggagcgtaggttgggaggagtgaatttggtgggaagggttccctttttcctaccccagtgggcttttggtgccagagtccttccttcaggatttgggggagtacaccaggcttcttggttctaagacctttacagctttttggttctagatgggagtgggatttctgggtttgatgaatggtaactaggttctggagcccctaacagcataaggatttcagcagagcgatagaaatgcagggtctaggattgcgtctctgataggggagggacaaccttgacttgagaggctctagtgtctcccctcttctgcctagtggtgtgcctctatcaggctgtgacgagg

SEQ ID NO: 42407 - DNA, 1202 bp, Artificial sequence
  DNA replication origin
gagcgctgggcgctgcgagcggcgctgccatttaaaggggccgcgacccctgtcccggctgctagggagggaggtagagaaggagcgcggggccgtcgctgtctgcagttctaggcttgtagcctttgcactaaccctgccgcaggtaggggtcgggcctgctcaagccgaaccgaacctgcaagcgggatcttgcagtagccgggaggcggtggtgggggggtctaaggagagatcgtagctccaaaatgtcttcctgtaaatgcctgaggttgggggtgggcaacaggagaagggaggactggaggagcaatgggaaagggggacggggctgaggaagtgggcgacctgaaaggtaactggggggaaggggttgcgaagggcagtttgtgggggcgggggaagggccgagggaggacctagcaacgcggggagggggggtggggccagacagggtgggtaaagactggggagctggggggctcctgcagagtggggagggaatagaaactgagatcgcgggggcgggaaaggctcctggtggcgacggccttaggagactctaagggggcgttcagcctgagttgcggggggtaaaaggtaaggggggaagggaatgggagttgcagtcgagtaggggggtgggcgggtagaacgaccgactgcctggccagtgtgggcacggggccagggcggggaacgcctctccccactgggggcgctgtattggggggagtggtcattaggactaaagccttcggaaatgcttgtagattgtggtggtgggggctgctcatgagaaatccaagtggatgatggggtgtgtctcagagcctatataagaaggaattcaggctaagaccacctctactgccccctcttctactcctaatctgcagtacatatccagccatactcatggaccccagtgatttccccagtccatttgacccattgaccctgccagagaagcccctggctggagacctaccagtagacatggaatttggagaggatctactggaatcccagactgccccaactcgaggatgggccccccctggcccttctccatcctcgggagccctggacctgcttgatacccctgctggcctggaaaaagaccctggagtcctggatggagccactgagttgctggggctgggggggctgctctataaagccccctctcccccggaggt

SEQ ID NO: 42408 - DNA, 782 bp, Artificial sequence
  DNA replication origin
gagagagagagagagagagagagagagagagagagagagagagatcagccctggtgagggaggaaaactccatagataatacagggagctcctgcaggaagactcagggagaagatcccagaacttaccctaagactgttgagagagtagggggtagctttgcaggacctggtttgggggtcatcaagcagtaacggttactgcacaggcgttgccactgagccagagccatttaacccgacctgtgtggctggggatcaagcttcagataccccataactctgactctcagactgttttgggggccccgtggctgcagacaagggaaggaggggcacgtgagggctgggtccctgcctccccccgtcctccgctgtcactcactaccccaacagtcgcccagggggcgggacccggagaggtggggatgggggagggtaatcttggcaggcgcctgctgcatggcgtaggtagggactattgaggggggcggacgccgagggggtgaacacgagtgggaagctaagagagacacggggagggggaggggaccgggaaccatttgaatgagaggaggggatcacgggtagagtgggctccaggaggtagggcgagcagggtgtgacgggggccagactcttgagccaggtaaggggagcaggtgcgtagatctgtgttttttgtgggtgagcgcactcggcccttgggtggaaaggggacgccgcctttcccggggggccggcttcaaagctccagaggctatcttttccttctcaactaac

SEQ ID NO: 42409 - DNA, 957 bp, Artificial sequence
  DNA replication origin
cgggagggaggtgggggtcagcccccgccaggccagccgccccgtccgggagggaggtggggggggtcagccccccagccggccagccgccccgtccgggagggaggtgggggagtcagccccccgcccggccagccgcccggtccgggaggtgaggggcgcctctgcccggcctcccctactggaagtgaggagcccctctgcccggccagccgccccgtccgggagggaggtgggggggtcagccccccacccagccagccgccccgtccgggaaggaggtggggggtgtcagccccccgcccggccagccgccccgtccaggaggtgaggggcgtctctgcccggccgcccctactgggaagtgaggagcccctctgcccggccagccaccccgtgcgggagggaggtggggggtcagccccccgcccggccagccgccccgtccgggaggtgaggggcgcctctgcctggccgcccctgctgggaagtgaggagcccctctgcccggccaccaccccgtctgggaggtgtgcccagcggctcattgagaacgggccatgatgacagtggcagttttgtggaacagaaaggggggaaaggtggggaaaagattgagaaatcggatggttgccgtgtctgtgtagaaagaagtagacatgggagacttttcattttgttctgtactaagaaaaattcttctgccttgggatcctgttgatctatgaccttacccccaaccctgtgctctctgaaacatgtgctgtgtccactcagggttaaatggattaagggcggtgcaagatgtgctttgttaaacagatgcttgaaggcagcatgctcgttaagagtcatcaccactccctaatctcaagtacccagggacacaaacactgcggaaggcctcagggtcctctgcctaggaaaaccagagacctttgttcacttgtttatctg

SEQ ID NO: 42410 - DNA, 1230 bp, Artificial sequence
  DNA replication origin
ggctggccgggcggggggctgaccccccacctccctcccgcacggggtggctggccgggcagaggggctcctcacttcccagtaggggcggccgggcagagacgcccctcacctcctggacggggcggctggccgggcggggggctgacaccccccacctccttcccggacggggcggctggctgggtggggggctgacccccccacctccctcccggacggggcggctggccgggcagaggggctcctcacttccagtaggggaggccgggcagaggcgcccctcacctcccggaccgggcggctggccgggcggggggctgactcccccacctccctcccggacggggcggctggccggctggggggctgaccccccccacctccctcccggacggggcggctggcctggcgggggctgacccccacctccctcccggacggggtggctgccgggcggagacgctcctcacttcccagacggggcggctgccgggtggaggggctcctcacttctcagacggggcggttgccaggcagagggtctcctcacttctcagatggggcggccaggcagagacgctcctcacctcccagatggggtcgcggccgggcagaggcgctccccacatctcagacgatgggcggccgggcagagacgctcctcacttcctagatgggatggcggccaggaagaggcgctcctcacttcctagatgggatggcggccgggcagagacgctcctcaatttccagactgggcagccaggcagaggggctcctcacatcccagacgatgggcggccaggcagagacgctcctcacttcccagacggggtggcggccgggccgaggctgcaatctcggcactttgggaggccaaggcaggcggctgggaggtaaaggttgtagcgagccgagatcacgccactgcactccagcctgggcaccattgagcactgagtgaacaagactccgtctgcaatcccggcacctcgggaggccgaggctggcggatcactcgcggttaggagctggagacaagcccggccaacacagcgaaaccccgtctccaccaaaaaaatacgaaaaccagtcaggcgtggtggcgtgcgcctgcaatcgcaggcactcggcaggctgaggcaggagaatcaggcagggagattgcagtgagccgagatggcagcagtacagtccagcttcagctcggcatcagagggagaccat

SEQ ID NO: 42411 - DNA, 810 bp, Artificial sequence
  DNA replication origin
cggccgggccgaggctgcaatctcggcactttgggaggccaaggcaggcggctgggaggtaaaggttgtagcgagccgagatcacgccactgcactccagcctgggcaccattgagcactgagtgaacaagactccgtctgcaatcccggcacctcgggaggccgaggctggcggatcactcgcggttaggagctggagacaagcccggccaacacagcgaaaccccgtctccaccaaaaaaatacgaaaaccagtcaggcgtggtggcgtgcgcctgcaatcgcaggcactcggcaggctgaggcaggagaatcaggcagggagattgcagtgagccgagatggcagcagtacagtccagcttcagctcggcatcagagggagaccatggaaagagagggagaccgtggggagagggagaccgtggggagagggagagggggagggggagggggagggggagcggagggagagggagagggagagggagcttgtatatgtatttctgtctttttctttctctcttctccttttgatactcctaaaatgcatatgttggtatgtctgatgatgtcctataggtcgctcaggttctgtttatttttcttcattcttttgcctcgatctttagaatggataatttcaattgactcatcttcaagtctgtgatcctttcttctgcctgctctaatttctatctctttatcaatattctcattttttcatacattatttcactgatttactttaattttttgtacatggtttcctttagctcactgaacatatttaagacaggtgattaggccg

SEQ ID NO: 42412 - DNA, 968 bp, Artificial sequence
  DNA replication origin
agcgtctctgcccagccgcccatcgtctgagatgtggagagcgcctctgccccgccaccccgtctgggatgtgaggagcacctctgcccggccgcgacccagtctgggaggtgaggagcgtctctgcccggctgccccgtctgagaagtgaggagaccctccgcccggcaaccgccccgtctgagaagtgaggagcccctccgcccggcagccgccccgtctgagaagtgaggagcccctccgcccggcagccgccccgtctgggaagtgaggagcatctccgcctggcagccaccccgtccaggagggaggtgggggggtcagccccccgcccggccagccgccccgtctgggagggaggtgggggggggggtcagccccccgcccggccagccgccccgtccgggaggtgaggggtgcctctgcccggccgcccctactgggaagtgaggagcccctctgcccggccaccaccccgtctgggaggtgtacccaacagctcattgagaacgggccatgatgacaatggcagttttgtggaatagaaaaaggggaaaggtggggaaaagattgagaaatcggatggttgctgtgtctgtgtagtaagaagtagacatgggagacttttcattttgttctgtactaagaaaaattcttctgccttgggatcctgttgatctatgaccttacccccaaccctgtgctctctgaaacatgtgctgtgtccactcagggttaaatggattaagggcggtgcaagatgtgctttgttaaacagacgcttgaaggcagcatgctccttaagagtcatcaccactccctaatctcaagtacccagggacacaaacactgcggaaggccgcagggtcctctgcctaggaaaaccagagacctttgttcacttctctgctgaccttccctccaccattgtcctatgaccctgccaaatccccctctacgagaaacac

SEQ ID NO: 42413 - DNA, 1597 bp, Artificial sequence
  DNA replication origin
acacagcacatgtttcagagagcacagggttgggggtaaggtcatagatcaacaggatcccaaggcagaagaatttttcttagtacagaacaaaatgaaaagtctcccatgtctacttcttactacacagacacagcaaccatccgatttctcaatcttttccccacctttcccctttttctattccacaaaactgccattgtcatcatggcccgttctcaatgagctgttgggtacacctcccagacggggtggtggccgggcagaggggctcctcacttcccagtaggggcggccgggcagaggcacccctcacctcccggacggggcggctggccgggcggggggctgacccccccccccacctccctcccagacggggcggctggccgggcggggggctgacccccccacctccctcctggacggggtggctgccaggcggagatgctcctcacttcccagacggggcggctgccgggcggaggggctcctcacttctcagacggggcggctgccgggcggaggggctcctcacttctcagacggggcggttgccgggcggagggtctcctcacttctcagacggggcagccgggcagagacgctcctcacctcccagactgggtcgcggccgggcagaggtgctcctcacatcccagacggggtggcggggcagaggcgctctccacatctcagacgatgggcggctgggcagagacgctcctcacttcctagatgggatggcggccgggaagaagcgctcctcacttcctaggtgggatggcggccgggtagagacgctcctcactttccagtctgggcagccaggcagaggggctcctcagatcccagacgatgggcggccaggcagagatgctcctcacttcccagacgaggtggcggccgggcagaggctgcaatcttggcactttggggggccaaggcaggcagctgggaggtggaggttgtagcgagccgagatcacgccactgcactccagcctgggcaccattgagcactgagttaacgaggctccgtctgcaatcccggcacctcgtgaggccgaggctggcggatcactcgcggttaggagctggagaccagcccggccaacacagcgaaacccggtctccaccaaaaaaatacgaaaaccagtcaggcgtggtggcgcgcgcctgcaatcgcaggcactcggcaggctgaggcaggagaatcaggcaggcaggttgcagtgagccgagatggcagcagcacagtccagcttcggctcggcatcagagggagaccgtggaaagagagggagagggagaccgtggggagacgggagagagagagggagaggagggagagggagagggagagggagaggaggaattctgtcttactccagaccagttggtttgtttttagagcagctttagttcatggcaaaattgagcagaagttacagagagttcccatatactccctgccctcacatacatacagcctccccagttatcaacatcttgcaccaggctgggcgttgtggctcacgcctgtaatcccagcactttgggaagccaaggtaagaggatctctttaggccaggagt

SEQ ID NO: 42414 - DNA, 2874 bp, Artificial sequence
  DNA replication origin
gtgtgttctgttacccaaaggcatacattacgaaatatatagatgctcgctggagaaactggcacaatctagaaagcgctgttttccccgtttgtttttcttggtgtgtatggagtgagtgccaaaaagcctcaagtaacctttttttatctccagggtttggagggttctggaagtaaacatcatagttcgccgttgccaggcgctgttgagttgctgccttgctcttatctaggggtctagatggccttccctgcaacccccgcccccctgcgctcccgcgtccccccgcgccccgccctcccctcggtgttcccgtccacgcccctgctcccgcgccttcgctccagttctcgtgcccccgcccctccccccgcgccctttcccagtggttgcaataacggacttagaggtctggacaattcaagtaaggaacaaggctcgcttatccaagttctcgcaggataaaagtttgttatgaacgatttcacatggtttctctttatcagaaagttgttagggacttttaatcgcagaattggcctcgggtgcccacgctctagtattgaaatggcggttttgggacaaataagcaacatccgtgggagtggaaagcgacagacctgatcccggaagcgttacagctaggcgccaagttcacaggcgcgaagttcaaatttgtcttgtgaccactgtgataggtgggtacaggggagcgcgggcgagcacacgtgaattactgctaccgccccctaggtccgggcactataaaggggcctgcgcctggcgttgttcatcgcagttgctccggatctttgcacacactccacgggcagttggaggtgagctgctgccggccacgccagaggctgcaacaccaggtaggtgaccggctggtcggactgagatgggtgctgaagtggtccagaggttaatcctaattgagtgacttaattaaaatcaggaccactgtataccttggactctggttgcccgtgtaggcctgaggtgggagtagaggaagtggcagcgaggggagaagtggaggcgccagtggtagcattgggggaggtgggggcgcccatggtggtgtaggaaacatatggtggcgccagtggcggcattgggaggggtgggggcgccggtggcggcgtaggagcagctggtagtgccagtggcggcgtggggagaaggggcgctggtggcgtcattgcagatagtggggggcctggtggtggcgtagaaggaggtgttggtgccagtggcgggtggagagaagtaggggcaccagtggcggcgttgggggaagtgggggtgcctgtggcagtgtcggggaagtgggggtgctggtggtggtgtaggagcatgtggtagcaccagtgacggtgtggggagaagtaggggcaccattggcggccttgggggaagtgggagcgctggtggtggcgtaggagcgtgtggtggcgccagtggctatgtaggaatacgtggcgccggtggcggcgcggggagaagtgagggcgctggttgcggcactggggggaggtgggggccccagtggtggtgtaggaacaggtggtgtccctagtggcgggtggggagaagtagggatgccagtggcagcgtggggggaggtgggggtgccagttgcggcctaggagtacttggtggcgttggtggcataggagcacatagtagcgctggcggtgtggggagaagtggaggcgccggtggccgcattgaaggtgggggtgccaatgggggcgttgagggaagtggggggttctggtggcggcgtaggaacacttggtggtggtggaagtggcctaggagcacgtggtggtgctggtgggcgtggggagaagtgaggatgctggtggtggcattggaggtgggggtgccagtggctgtggggagaagtgggggtgcccgttgcagcattggggggaggtgggagctagtggttgtgggtaggggtgtgtgtgtgggggttgaggtctctttggctgaggactgagtggtggtgggagacaggagtggggtagggcagaagttggatagaagtgtgggggagtggaagcctgcttggaaaaccggttgggagcagttgaaggtggctggaggtggttggaggtgcgagtgtgggggaagggtggtggggttgaggcctgattggtggaagactgaggtgagaatggtgggggtagggtccagacctgataggaggaaggagttggggaggggtcaaggcctgtttggtcgaagattggctagaggctggaggcaggaataggaagcgtggagggggtggccggattcatataagaccagtgagaagccagagtggcgggaggtaagggggcagtggaggttggacagaaggaagaaggtgatgagggggcggtggtagcctattctgggtaagattgacagagtggggagtaaagaggtaggggaagggggagaggttgacacccggtaggtgggagacttccttggggcaggagtagggggactgaaggttgtagggaggtggagggccagtgggatgtgggggcggtcgagccctgatacgtggaagactggcaagttgaggtgggagtggagggagtgggaagtgggggcgggtgcagggtgggaagagattggggtggtagaggcctgagtgggaaaagtttgcaacaaaacaaatttaaatccttttcattttgcagagcaaagtttcggctttaaggtggggaagatacccaaagataaatgcagaatgtaaatgtagagatgtctctgcttttgagttctggctttcttttttttttctttttattttattttctttttctttttcttttttgagatggagtctagctctgtggc

SEQ ID NO: 42415 - DNA, 1118 bp, Artificial sequence
  DNA replication origin
gagcaccagcccagccatggtccttgaggtaagtgctgctgcccagccaggccaggccagaattcgaagtggaaaacccggggcatcaggggaatgccagggctggcccacagcccagggtcaccacagggttgggtgagtagctggaggccgcatgggttgtggcagaaacagcactggggaattgggaacccagcttggccactgaccctgggtgcctctcctctcctctctggcttcggtgtctcgtctgcaaaatggggggggcggggggcaagtagactcgaaggctcccttcaggagacttggaactttgactcttggcgtgctggactaaattggtactggggagacctgcaggtccatagtgctgggggtgaggggataaagaagattccttctcaagctaagtgggggatccccttgtgggcagctaaatggccgtgcaagcctcagtgtagggagggggaaggactgggcagactgcatgcatttggggggcgtggtgacttgtagagaggccacacggtgggggggggcgcaggaagttggggtccccggacaagggccaaggagggaagaggagggttagtgactggaaaaggggattgtggagaggcgctggggaggaaggtggttgaactatgtgttgggggtggggcactgaggacgcaaggcaagcctgaagggagagcagggagagagaggacagtgggcagagagggctctgggcactggagggacgctcttcttcctgcccaggggtccctgggccgatgggatcacgcagaagaatgcgagagaagcagcctttgagaagggaagtcactatcccagagcccaggctgagcggatggagttgaggaagtacggccctggaagactggcggggacagttataggaggagctgctcagagtaaatcacagactaaatcagactcaatcacaaaagagttcctgccaggcctttacacagccccttcctccccgttcccgccctcacaggtgagtgaccaccaagtgctaaatgacgccgaggttgccgccctcctggagaacttcagctcttcctatgactatggagaaaacgagagtgactcgtgctgtacctccccgc

SEQ ID NO: 42416 - DNA, 863 bp, Artificial sequence
  DNA replication origin
cccggccatccatcctctgggatgtggggagcgcctctgcccggccgcgaccccgtctgggaactgaggagtgtctctgccccgccgccaccccgtctgggaggtgaggagcgtctctgaccggccgccccctctgagaagtgaggaggccctccgcccagcagccgccccgtctgggaagtgaggagcatctccgcccggcagccgccccgtccgggaggtggggggcagaccccgcccggccagccgcccagtccatccgggaggtggggggcagaccccgcccggccagccgccccatccgggaggtggggggcagcccccgcccggccagccgccccatccgggaggtggggggcagaccccgcccggccagccgccccgtctgggaggtgggggggcgcctttgcccggccaccccgtttgggaagtgagaagcccctctgcccggccggcaccccgtctgggaggtgtacccaacagctcattgagaacgggccatgatgacgatggcggttttgtctaatagaaaggggggaagtgtggggaaaagaaagagagatcggattgttactgtgtctgtgtggaaagaagtagacataggagagtccattttgttctgtgctgggaaaaattcttctgccttgggatgctgttaatctataaccttacccccagccccgtgctctctgaaacatgtgctgtgtccactaagggttaaatggattaagggcggtgcaatatgtgttttgttaaacagatgcttgaaggcagcatgctcgttaagagtcatcaccactccctaatctcaagtacccagggacacaaacactgcagaaggcggcagggccctctgcctagga

SEQ ID NO: 42417 - DNA, 851 bp, Artificial sequence
  DNA replication origin
catcatggcccgttctcaatgagctgttgggtacacctcccagacggggtgccggccgggcagaggggcttctcacttcccaaacggggtggccgggcaaaggcgcccccccacctcccagacggggcggctggccgggcggggtctgccccccacctcccggatggggcggctggccgggcgggggctgccccccacctcccggatggggcggctggccgggcggggtctgccccccacctcccggatggactgggcggctggccgggcggggtctgccccccacctcccggacggggcggctgccgggcggagatgctcctcacttcccagacggggcggctgctgggcggagggcctcctcacttctcagagggggcggccggtcagagacgctcctcacctcccagacggggtggcggcggggcagagacactcctcagttcccagacggggtcgcggccgggcagaggcgctccccacatcccagaggatggatggccgggcagagacgctcctcacttcctagacgggatgacggcggggaagaggcgctcctcacttcccagactaggcggccgggcagaggggctcctcacatcccagacggggtggcggccgggcagaggctgcaatctcggcactttgggaggccaaggcaggcggctgggaggtggaggttgtagcgagccgagatcacaccactgcactccaacctgggcaacattgagcactgagtgagcaagcctccctctgcaatcccggcacctcgggaggccgaggctggcagatcactcgcagtcaggagctggagaccagcccggccaacacggcgaaaccccgtctccacc

SEQ ID NO: 42418 - DNA, 982 bp, Artificial sequence
  DNA replication origin
accaaaaaatacaaaaaccagtcaggcatggcggcgcgcgcctgcaatcccaggcactcggcaggctgaggcaggagaatcaggcagggaggttgcagtgagtcgagatggcggcagtacagtccagccttggctcagcatcagagggagaccgtgcaaaggggtgtgggagagggaggagggagatggagagggagagggagagggagagggagagggagagggggagggggagggggagggggagggggaggggcacaagttttttagtttaattaggtctcatttatttatttttgcttctgttgcacttacttttgaggtcttagtcataaattctttgccaaggcctatgtccagaagagtttttcctaggttttcttctagaatttttttttttttttgttagatggagtttcgctcttgttgcccaggctggagtgtgatggtgcaatccccggctcaccgcaaactccgcctcccgggttcaagccgttctcctgcctcagcctcccgagtagctgggaatacaggcatatgccaccacacctggctaattttgtatttttagtagagatggggtttctccatgttggtcagggtggtctcaaactcccaacctcagatgatccgcccacgtcagcctcccaaagtgctgggattacaggcgtgagccaccgtgcctggtggttttcttctagaatttttatggtgtcaggtcttagatttatgtctttaattcatctcgagttgacttttgtgtatggtgagaaataggcgtccagtttcattcttgtacatgtggctatccagttttcccagcaccatttattgaatagggtatcctttccccagtttatgttcttgtatgctttgttgaagatccactggttgtatgtaaatatttggctttatttctgggttctctattttgttccattggtctatgtatctagctttataccagtacgacgccgttttg

SEQ ID NO: 42419 - DNA, 1135 bp, Artificial sequence
  DNA replication origin
gacagaaagaaagaagtggatcgagagctccagtgcaccctggccccaagacccgaccagagtgcatccacccagtcaaatgacgggcagcgggacaaaccaagagcctgtgtccctattggttaaagcccagaggcttcacccaacaaagggggcgctggttggtggaggggggaccaatgagaaggctcgacacgggtgtcgaaggcgcgcggaagccacccgctgtcgggaacacggtacttccacctgccgtgagggccacggtgtcctgaaggccttgttgttcctgtcccgtggcctgcttggctgggcttggttgggctcgaccatctccccataggccagggtgcctgaactggcgccatgagctcccccgatgaggtgtccgtttggagggctggtttcgacctggggggtggcgagcaggctggcacctgcacagtcagccccggagccccacagggccacagccgaggcctcgatctgggggcaccacacagcagcaagggcgagagcaggttcacagatcccgagggcttcagcttcgagtctgagagcgaattgatagagcagggaagggtggtgctctggggccaggaaggccggcctagcaccccggtcgacgaccaaggggacggtgtggactactcgtcctacctggttgatgagacagccgccatcgtgccaccgtccagcatccagggacacccgttccctgaagacgccactactgaagggtccgctgaaaactgggtggacctggaggtcggtcccagtgggagaggcatgctgagccccagccctggagaatggcagcaggcctctgccggccctctccacctcagtgttcctgaaccaggccgggcctggaagaacccagaaaggggctcgaagagcagatggagcgtccgcgtggacccccagcagccctctgtaataggccccaccaggatgtctacccacgactctgattcctccgatgagaccagtgacttaccactgatgaggatgggcattcgccacaaagaaggaagccaagccaagttcggcagccacaggaagccagcagacacatccagacactcaagcttccactgcaaggagagttacttgcccgtgccaggccgtttcc

SEQ ID NO: 42420 - DNA, 1226 bp, Artificial sequence
  DNA replication origin
gcgcacctctccaactgggaccgacctccaggtccgcccagatgtcagtggaccctttggcagtggcgccttctggggacgggtgtccctggacgctggacggcggcatgatggtggctggctcatcagccaggtagaaagagtagtccccaccacccgcttggtcgtcgaccggggtgccaggccggccttcctggccccagagcaccacccttccctgctctatcaattcgctctcagactcgaagctgaagctctcgggatctgtgaacccgctctcgcccttgcccttacccttgccactgcgctgccccccaaaattgaggtctcggccgtggccgtcaccccgtggggctcccgggctggcggtgtgggcgccggcctgctcgccaccctctgggcctaaaccagccctgcaaacggacacttcatccgtggagctcatggcgcccgccagtctagacagccaggctgtggggagacagtcgtcctggtaacagtgggagaggagagccgagcccagccaagcccagccgagggggccactctcagctttgagcctgagagcgaattgatacagcagggaagggtggtgctctggggccacaggaacagcaaggcctttgggacaccgccaccctcaccacagtctgctcacgagatgtcactgacagcgcgtggcttccgggctccctcaatgcctgcgtcctgccttctcattgttccacgccttctcattggtctgcccatcgccaatcagcgtgccccttgttgggcgcggcttctgggctttacccaattgggaggcagactcttggattgcccggacgcccgtggtttggctgggtggttgtacttgggtcaggtcttggggccagggcccactggagctctccatccacctctttcttcctgtcctgctgcctctggccaggcacctactttccaatgacagccacgtctctgagccccagtgtcccattgtaaggcggaagtcaaggggagagctgcccccagctcatcagcttgggagaataaatgtcctgatgcacgagaagcacctggcacacagaggagctatcattaaaaagtaggtgcccggccagagggagcaagacagaaagaaagaagtggatcgagagctccagtgcaccctggccccaagacccgaccagagtgcatccacccagtcaaatgacgggcagcgggacaaaccaagagcctgt

SEQ ID NO: 42421 - DNA, 1271 bp, Artificial sequence
  DNA replication origin
cagcgacttaccggtgattagggtgatcattagcaccaaagaaggaagccaggccaagcccggaagccccaagaagccaggagacacttgcggacgccgcagtttccaccgcagggagagttaccttcaggttcagggacctctcctgatctctcctccccgcagactcaccccagtcgtggagaggccggctgtgggagagctggacgtgccttccttgaagaaaatgcagagcatggtgtggggaaagaggggggtcaggcccagctgctcaggagctgccgttagagggcccctaccccggggcactctgggaaggaaggtggcccaggagaagaaatccctagagggtgcaccagaactggccctgcggggagcctttcctgcctgggggcagagactttcagcagttccacctgatccggctagcttcccgccagtgtctggcgtggggctcctggggaagtccgtgagacccaaggagcccaagcacagcagccctgggaagaaacctgcaggaaggaagaccagggagtcccaggctgcggccagagaagataatgacccaaatagagatgaggtcccaagggcccaagtgagtaggttctcttcgcgcactcctccttctcctccttgctctcctcttcctctttctcctctgtctccccccacccacctctcttccagcacacgcctctttgcccatgccctctctatcccttgctcacaggttgtcatcgggagcccagggacactaggatgcccgattggggtcctcctcttaggagcacacattaaagggagcacttggtgtgtgccaggcctggctctggacactctgcagttgtcctgcctcctccctgagagaggagctgggatggaagacagggctggcagctggtttggatcagggcgcaaagcttgggcatctagactcatcaacttcccaattcctccttccctagctgttaagcaagccctcctgtcttggggtggactgagggagaaagtgttaataagattagtctggggtctccaccttaacacaacccctccccatgtgtactcaccgcccgtccccactgccagcctgactcagaaatttctgttttagcttcccacacagaagccagagctgatttctctgtccgtgcgtcgtggagaatacagcagtggtgatcccaacatcagagctccccaagtactaggaacctcacagccctcggcctttaccttgagacgcctggtgcccagatgccatgcatcctccg

SEQ ID NO: 42422 - DNA, 1355 bp, Artificial sequence
  DNA replication origin
gcccctgctctgcccagcaactccaaccccgctctgggactgccttcactgttccccagtgtaagctcatgtgcacctgtggccccctagcattgtgactccaggttggactccagcagtgcggcagccacagccaggccctgggagggcccatgtggctgagcaggacttaacagaaaagggctcagtactgccgaaagtctccttccagagttgggagtttggggcgctgctccaaatcgccccccaccacacaaaccccactcagagaggacgatgtggcttaaagccagcccagtcaacaccccgtttccccgtgggacagctgcctgggtgggcagggaagtctgggaataaggctgagcccccagaagcgacagggccagaggtttccctcccgacccctctcccctccacccctatcaaacccacaagactcaccggagggtgcatggcgtctgggcacgaggcctcccgggctgtaggccgagggctctgaagttcccggaagttggggagctctgatgttggggtcgctactgctgaattctccacgacgcacagacaggcgaggcagtcctggcctgtgggtgggaagctaaaacagaaacttctgagtcgggctggcgatgggggccggcggtgagtacacgtggggaggggttgtggtaaggtggagactcctgagcctaatctcattagcactttctccctcagtcagcctcaggccaggaggcagaggccagccagggaaaacactggggatactgagatagcccggggccgcctgccaggtgggttgggcaacagctagggaaggaggaatcaggaagttgatgagcctagatgccccagctttgcagcccacactttaaggcatcacccgatccaaaccagctgccagccctgccttccaccccagctcctctctgcgggcggaggcaggacccctgcagagcgtccagaggcatggccatcacacaagaagtgctccctttaacgtgtgcccttatgaggaagacacccatcgggcattctagtgtccctgggctcccgatgacaaccctcgagcaagggacagaggaggcatgggtaaacaggtgtgtgctggaagagaggaggtgtggggggaggagggtaaagagggagaggagggcgagaagggcctactcacttgggctcttgggacctcatctctatttgggtcattatcttctctggccgcagcctgggactccctggtcttcctccctgctggtttcttcccagggctgctgtgcttaggcttttggggtttcttggacatcccctgtggccgcacaccagagaatggcgggaaggtggccggctccggg

SEQ ID NO: 42423 - DNA, 1220 bp, Artificial sequence
  DNA replication origin
ctgggccggtggcacgatggtggctggttcgtcagccagggaggacgagtagtccacatcgtccccttggtcgtcgactggggtgccaggccggccttcccggccccagagcaccacctttccctgctctatcaattcgctctcagactcgaagctgaagacctcgggatctgtgaacctgctctcgccctcgcggctgcctggcgcccccaaatcgaggccgtggccctggccccgtggggctccggggctggccatgcgggagccagcctgcttgccaccctccaggccgaaactggccccacaaacggctaccttgtcgggggagctcatggcgccagtctgggcagcctgggctgcggggagacggtcgtcctggtaacggcagaaggggagagccgagtcctgccaagcccggcggagcgggccacgcgacaggaacagtgaggccttcgggacaccgctgccctcaccccgggtggaagtaccagatgtccccgacagcgcgtggcttctgcgcgtgcacttgacgccagtgccgcgacttctcattggtccccctctaccaaccagcgcgccctttgttggcagaggcctctgggctttaaccaatcggaacacaggctcttggtttgccccgacacccgtcatttgactgggtggctgtgctctggtctggtcttgcggccagggggcactggagctctcgatccacctccttcttgctctcctgctgcctctggctgggaacctactttccaatgagacctcctctgtgcaccgggtgctttgcgtgcatcacgacatttactctcccaagctgatgagctgggggaaggtctccccttaatccccaccttacagatgggacactggggctcagagacgtggctctccttggaaagtaggtgcccggccagaggcagaaggacaggaagaaagaggtgatcgagagctacggtgccccctggccccaagacccgaccagagcgcagccacccagtcaaatgacgggcatggaggcaaaccaagagcctgtgtcccgattggttaaagctcaggcacctcgccccacaaagggcgtgctggttggcagacggggaccaatgagaaggctcggcgccggcgtcaagggcgcgaggaagccactcgctgtcccggacatctggtacttccgcctggggcgagggcggtggtgtcccgaaggcctcactgtttct

SEQ ID NO: 42424 - DNA, 898 bp, Artificial sequence
  DNA replication origin
cagactggcgccatgagctcccccgacaaggtagccgtttgtggggccagtttcggcctggagggtggcaagcaggctggctcccgcatggccagccccggagccccacggggccagggccacggcctcgatttgggggcgccaggcagccgcgagggcgagagcaggttcacagatcccgaggtcttcagcttcgagtctgagagcgaattgatagagcagggaaaggtggtgctctggggccgggaaggccggcctggcaccccagtcgacgaccaaggggacgatgtggactactcgtcctccctggctgacgaaccagccaccatcgtgccaccggcccagcgtccaagggcgcccctccccagaaggtgccgctgccgaagggtcggctgacaactgggcggacctggaggtcggtcccagtgggagaggcgtgctgggccccagccctggagaatggcggcaggcctccgccggcccctgggagcccagggttgccctcgggtaatgctttgtgtggctcctagaaatagaagtccacgttagatggtgggatccgtgtccaggttaaactgatttctgtgtccccccgccccgccccgtcaccaccttctgcatcccacggagagagggtgcctcttttacattgagggtttcatgccaacccacctcaccactgggctgcaggctatgggggctactaagggctgggggagacagggaagacgaggagagaggaggccagaattgactaaccatttatcttcctccggtgtctgctggtctagtgcatccggctgcagagggaaattgaggaccttacacagcagctaggtatgatggagccctggctggggcagggatggacagcggtgtctttctgctggtgcggggg

SEQ ID NO: 42425 - DNA, 897 bp, Artificial sequence
  DNA replication origin
gcgccatgagctcccccgacaaggtagccgtttgtggggccagtttcggcctggagggtggcaagcaggctggctcccgcatggccagccccggagccccacggggccagggccacggcctcgatttgggggcgccaggcagccgcgagggcgagagcaggttcacagatcccgaggtcttcagcttcgagtctgagagcgaattgatagagcagggaaaggtggtgctctggggccgggaaggccggcctggcaccccagttgacgaccaaggggacgatgtggactactcgtcctccctggctgacgaaccagccaccatcgtgccaccggcccagcgtccaagggcgcccctccccagaaggtgccgctgccgaagggtcggctgacaactgggcggacctggaggtcggtcccagtgggagaggcgtgctgggccccagccctggagaatggcggcaggcctccgccggcccctgggagcccagggttgccctcgggtaatgctttgtgtggctcctagaaatagaagtccacgttagatggtgggatccgtgtccaggttaaactgatttctgtgtccccccgccccgccccgtcaccaccttctgcatcccacggagagagggtgcctcttttacattgagggtttcatgccaacccacctcaccactgggctgcaggctatgggggctactaagggctgggggagacagggaagacgaggagagaggaggccagaattgactaaccatttatcttcctccggtgtctgctggtctagtgcatccggctgcagagggaaattgaggaccttacacagcagctaggtatgatggagccctggctggggcagggatggacagcggtgtctttctgctggtgcggggggcgggg

SEQ ID NO: 42426 - DNA, 1141 bp, Artificial sequence
  DNA replication origin
gccccaagacccgaccagagcgcagccacccagtcaaatgacgggcatggaggcaaaccaagagcctgtgtcccgattggttaaagctcaggcacctcgccccacaaagggcgtgctggttggcagacggggaccaatgagaaggctcggcgccggcgtcaagggcgcgaggaagccactcgctgtcccggacatctggtacttccgcctggggcgagggcggtggtgtcccgaaggcctcactgtttctgtcgcgtggcccgctcagctgggcttggctgggctcagctctccgctcccgccgttaccaggacgaccgtctccccgcagcccaggctgcccggactggcgccatgagctcccccgacaaggtgtccgtttgtggggccggtttcgacctggagggtggcaaaaaggctggctcccgcacggccagccccggagccccaggggcccacagccacggcctcgatttgggggtgccgggcagcggcgatggcaagagcgagagcgggttcacagatccagagggcttcagcttcgagtctgagagcgaattgatagagcaaggaagggtggtgctctggggccgggaaggccggccaggcaccccggtggatgaccaaggggacgttgtggactactcattctacctggctgacgaaccagccgccatcgtgccgccgcccagcgtccagggacacccgttcccagaaggtgccgctgccgaagggtcggctgagaattgggcagatgcggaggtcggtcccagtgggagagacgtgctgggccacagccctggaaaatggcagcaggcctctgccggccgtctccacctctgcggtcctgggccagtgcgggcctggaagaacccggaaaggggctcgaagagcagatggagcctccgcgtggatccccagcagccctctgcgaaaggccccaccaggctgcctacccacgactctgattccgcagatgagagcagcgacttaccactgatgaaggtaggcatttgccgcaacgaaggaagccaggccaagcccggcagccccaagaagcgagcagacacatccagacaggcaagcttccactgcaaggagagttacctgcctgtgccgggccgtttcctgacctctgctcc

SEQ ID NO: 42427 - DNA, 1344 bp, Artificial sequence
  DNA replication origin
cctccgcgtggatccccagcagccctctgcgaaaggccccaccaggctgcctacccacgactctgattccgcagatgagagcagcgacttaccactgatgaaggtaggcatttgccgcaacgaaggaagccaggccaagcccggcagccccaagaagcgagcagacacatccagacaggcaagcttccactgcaaggagagttacctgcctgtgccgggccgtttcctgacctctgctccccgcggactcactccagtcgcagagaggccggctgtgggagagctggaggactctccccagaagaaaatgcagagcagggcctggggaaaggtggaggtcaggcccagctgctcaggagctgctgctgcaggggccctgccccagggcctttcgaggaggaagatggccggggggaagaagtccctagggggtgcctctcaactggccctggggagaggctttcctgcctgcggagagagactctcagccgctcccccggagccggccaccttcccgccattctctggtgtgcggccacaggggatgtccaagaaaccccaaaagcctaagcacagcagccctgggaagaaaccagcagggaggaagaccagggagtcccaggctgcggccagagaagataatgacccaaatagagatgaggtcccaagagcccaagtgagtaggcccttctcgccctcctctccctctttaccctcctccccccacacctcctctcttccagcacacacctgtttacccatgcctcctctgtcccttgctcgagggttgtcatcgggagcccagggacactagaatgcccgatgggtgtcttcctcataagggcacacgttaaagggagcacttcttgtgtgatggccatgcctctggacgctctgcaggggtcctgcctccgcccgcagagaggagctggggtggaaggcagggctggcagctggtttggatcgggtgatgccttaaagtgtgggctgcaaagctggggcatctaggctcatcaacttcctgattcctccttccctagctgttgcccaacccacctggcaggcggccccgggctatctcagtatccccagtgttttccctggctggcctctgcctcctggcctgaggctgactgagggagaaagtgctaatgagattaggctcaggagtctccaccttaccacaacccctccccacgtgtactcaccgccggcccccatcgccagcccgactcagaagtttctgttttagcttcccacccacaggccaggactgcctcgcctgtctgtgcgtcgtggagaattcagcagtagcgaccccaacatcagagctccccaacttcc

SEQ ID NO: 42428 - DNA, 1144 bp, Artificial sequence
  DNA replication origin
caacaatctgatttctctatcttttccccacatttcccccttttctatttgacaaaaccgccatcatcatcatggccccttctcagtgagctgttgggtacacctcccagacggggtggccgcccggcagaggggttcctcacttcccagaaggggcggccgggcagaggcgccccccacctcccggatggggcggcggccaggcggaggcgcccccctacctccctcccggatggggcggctggccaggcgggggctgctccccacctccctccgggatggggcggcttgccgggtgggggctgccccccacctccttcccggacggggcagctggccgggtggagacgctcctcacttcccagatggggcggctgccaggcggaggggcgcctcacttctcagatggggcggccggtcagagacgctcctcacctcccagatggggtcgtggccgggcagaggcgctcctcacatcccagacggggcggcgggacagaggcgctccccacatctcagacaatgggcggccgggcagagacgctcctcacttcctagatgggatggcagccgggaagaggcactcctcacttcccagactgggcggccgggcagaggggctcctcacatcccagatgatgggtggccaggcagagacgctcctcacctcccagacggggtggcggcagggtagaggctgcaatctctgcactttgggaggccaaggcaggcggctgggaggtggaggttgtagcgagccgagatcacgccactgcactccagcctggacaacattgagcactgagtgaacgagactccatctgcaatcccagcacctcaggaggccgaggctggcagatcactcgcagttaggagctggagaccagcccggccaacacagcgaaaccccgtctccaccaaaaaaatacgaaaaccagtcaggcatggtggcgtgcacctgcaatcccaggcacgcggcaggctgaggcaggagaatcaggcagggaggttgcagtgagccgagatggcggcagtacagtccagcttcggctcggcatcagagggagaccgtggagagagaaggagagggagaccatggggagagggagagggagagggagatcaaaatctcttaatagcagaa

SEQ ID NO: 42429 - DNA, 1535 bp, Artificial sequence
  DNA replication origin
ggaggaggacgaggaagagctaggtaaaaacggcgccccggtggctcgcggccccgcgtctaccccgcctctaggggcgccggtcggcgcttagcgctgtgcccaccctctccccgcctctctccgcccctcccctcccctccattcggggagtgaggggatcccatttccccgacccccgcctccgccccacggtcgccctaccgctggaacttcctgctcttggacccggtcgcgccgtccggagtggccccgtgcccttgggactcccgaccctggggttggtggccgcctcctggggttttggctggggacgcgctgggtccaggacggcttgggcgatactccccctacccgcccacctagccccaggccctcggcgccgtcctcatcgccgcgtcgggagctaaatggccgagccgctggcttctttgctcctgtctaggagctcggccacttcagaaagcgcgccgcagccgaccgcaacctacgcggcggcaggagccggcggtggtgcctacaggctttaaacctgtgcaacttcccgctggagcgtggacgcggctcccactcacaggagtgtctgagcgtcctcccgcttgcttctctccgcacgttttgggccgctgtgctggggagtggccgggaggggggaggggagaatgtccggggctttgctgaccccctacccactaccgctagggtctggctgttatttgctggagagaatcatttaaagaaactatcatcagtttcctgaagcgcattcactttaggaatcagccatgcctgagaaaccaggttccagtggtgccctcactgagcacgcgggacgtgtgagagggtaggggggctacgcgagcccttgtcctttactgttttggatcccagcactttacacggggaatcctctgtctgtggaaatgcagtgcccctgagagtgtgggacttctgctgaaagcaaggggactgagtaggctggaaatgctgactacagctggggcatgccaggtaccagggccaatcggttcctccagaaagctggggagagaaggagcagtgtggccagaaagtttccaatgggggcagaagatgactgctggctgatttctgagtgcaagcttccagctaacttgggaaagaattgcctgggccagcccctcttcattgcagaccccaccccatccccaccccttccagaaggactggagtcaggccctggcacctctcttcataaaggtctctgacctctgaggtagatggcagaggtctctggtggagataaatgaactgagtcctattggaaaagaaaggtggaagccacagatgactgccagatggaatgtagacgttggaccaggagcctctgcatggcaggggctcagttttttgctggggtcccactgattacaggattagtctaggagaaatttgataagtcagcttgaggagtagttttcaaaatccctacacagtttgcagagagccacctactgagttcagtagggtaagttaaggacagttttttcaactct

SEQ ID NO: 42430 - DNA, 1280 bp, Artificial sequence
  DNA replication origin
tggaggagagcgggcttttagcgccagaagcttccatgatgcccaggtccgcgggcagggcgagggcacgggccggggaagcaagcgttgccgcgccgctaccgtcgggggccggcccccgggctgcttttcgtgcgcggagcagctcggccagtcaccaggcgcgtgcggaggcggcgagcctgcgagggcggccggtgcgggcgcagccggcgcgatgagtcaccatccctcagcacctccggaacacgaggctgcttggaagcagccgggcccccgcccgccctcctcccccgccccgcggagtggcggcgccagcccgatgcccggcagagggcgctgcagtgcggctgcggggccaccggcccgcgctgctctggctgccaaaggccggcgctgcctttggctcagagggaaagatcggggcccagggatggggtgcgtgaggaatgaatgtttctgcagtgccagaggtggctctgtttttgatccagaaacgaaatggacttcaagattcagacactgggcagagtgatggggccgacacggcccctactggagagtgtccagtcttgatcgccccaagcttttgagcagggatgtcctgtccgaggctggtgtcgtccccactctcgccagagaggatctgtgataggatgagtctcgcctttccaaaatgaatctgcctaaggacccagtccttgatctcctctgtgacctctttcacctgaggtgatggaggttacgaagattggagctgtctgcagtggagcgcaggagaaagtgcacaagctttcgggtgaccagggtttcagtgccagctccatcatgagattgctgtgtgaccttggtcatttcattattcattcattcattcagaaaacactcactgtgtcacaaggcactcacggtgaagggaagagaaggaggccaagcctgtggagacaattgccctgaccataaaatagcttaggccaggtacagaaacccgacacgtaggtaaacactggctgaatgaacaaatgcgatgatttagtcaccacacactagggcagagatttttggtcacttatgctcccgagtacatggaacagtgcctgacacacagtgggtgctcagtaatttgtcgaatgaatgacagaggaatgtactgagtgttctgtgagcacagcagaggccacctaactcacaagattctgtgctgtttgaaccgagtcttgaaggaagggttgggattagttaggcagacaagggccagatggagggtgatacaggcagag

SEQ ID NO: 42431 - DNA, 1062 bp, Artificial sequence
  DNA replication origin
atgctcagaatttttattctttggctcagtccaccacagagacccaaattcagcccatataggaggccaaacaaagccctgctctgacaggcgggctccagaaacagttaccctgcgtgccagcatatcccaagttgctttcctgtagcttctctccccaccacgccctgtaagaatcccattgtagggctgcccctgggactggctggccttggacaactaccctcaactgcatagccagctgagtccccagaaggaggcagaggcaaccctctgggccggagcatggcacacttttggcaagacaacaatccatttattgctttcttatggtaaacgtgagtcaaacttggcaaaaacttttccttccttctcacaggcccgaatggtgaatgagagcttcccaaacaggcacagagggaactgcaggctcctcctggactctgtgtgatgcgaagggtgtgtgtgtgtgtggtggtggtggtgggggtggtgggtgctgacaaaggaggagagggaactccaccaagacagagggaggagggcacagagagaaagtacttgtgaccctactgcatgaagcctaaccccaggtagcagtggaaggtactttcaagtggccaaggggtagataggagggtaagagttggtggaaatgggtgaatggatgaagagaagttgcttccaaattgttcttgcaccgcctgggaaggtgagctaggaaaagttgtctgcagaccttgatttccacagtgtcagcatccaggaaggagttgttggggagaactatgccagcacccttgagtccatatctggagaggggcaaggaaggggcaaagcagagcacacccagaggtaggggaacaacaaactcaaggccggcaaatgctcttctcgcccatgcatgaggagagctctgtcagggctggggcagggtggtggggggcagggcattacacagcaagaaacagatttgtctggatcattccatgcatgcagcatatgaggtagagccaggagaggtgtaggtgtacatgttcagggcgggtatgggggctgggg

SEQ ID NO: 42432 - DNA, 991 bp, Artificial sequence
  DNA replication origin
ctcctccggccgcccgtagttccagttcccctttccccaccacggagccccagggcccctgggcttgtcgagatgtctgaggcgtcaggaaatctcaacagcctccgcatggcgaatgtggccctgcgcgaagaattaaatgcccttcgcggggagaatgccaatttgggcctccagctcgggagagccctggccgaggttaattccttgcggggcaatgtctccagctacatccgctggccagtacccatagtgcccgtccttgcggaggagaacttggagttcgcgctcagtgagatcgaagtcattcccgggggagaactgcccttcttgtgccggcctcccccacgcgcggagcccgactgtatctcggatgatcttttgattaacgtgatccaggatcgcagcacccccgacgggcccgctgacccccctctgctgcccatcccgcccccgccggcgctgcctccgcccgcgtcaaaggaaccgcccccgcaaccccctctggcaccgctggagcggcctgagatagagcccttttcaggagacccagtctacctggctgaattcctgatgcagctagagaccttcatagccgaccatgaggttcatttccccgggggcgccgagcgggtggcctttctgatctcctttttcactggcgaagccaaggactgggccatctcggtcacccaggaaggaagccccttgcatgccaacttcccgcgcttcctggatgaaatccgtaaggaattctgtggccccatccccccacgtgtggctaaaaaggccattcgcaagctcaagcagggccactgtaccctcggcagctatgcagatgcttttcagttcctggcccaattcttgtcttgggatgactgccgcctccaaaaccaattcctcaaaggcctgtcggaattcttccgcaaagagctcttatggtcaacagaaatggccgacctggatgagctgattctcgaatgtgtggaga

SEQ ID NO: 42433 - DNA, 1258 bp, Artificial sequence
  DNA replication origin
ggaaaggggaactggaactacgggcggccggaggaggccgaaatgcggcggcggggctcgggagggaccgaagtgcggcagcggggcacgggccaggccgggccacacccaccggggcgagctcggagggcggcgctctgggcggagggcccggcggctcggcccagggcgcgttacctcgtcgccggggccggagagggcgggcggaggcacggggcccggaggcgccaggcggaggatgcgggcgacacggtggcggcggcgaccgcgcgaccgggcgggcgggcgggcaggggcgagcggagcgggagggagcggactgcggcaggatctgtcgaggaaaaatcttgcggccggcgattccccgccttttaagcgcagcctcgcactccccccaccccacgcaggggcgggccttggggaaccgcgggcgcccactggccgccgcgcgccgctcccctccagctcgcctgcgcctctcactgactctctccttccctagctgcagctaactcgggtcgggaaaatgcgacagcgactgcccactcgaggtcgtcatggcgacagccagtgaacgtgttcctctcctcgggcaggcccccgagtgtagaggagctgcttcgggaggcgcagctcaatctccagagcctgttgcaaggtaccgagagggaggggggctgcggccggagcccagaagcgagatgcgcagcggcaggagggaggcaaagaagaaagaggacagggaccagcaagataaagacagagagtttaaaaacaatcgacaaagcagtttccagctttcacctttcagcctaatgattctgaaagaggctatttccagggctgtttccccccatccccagccccttttttcagctcagtagcccatggggaaacaaggacagagactgaggcagggccataagttatgccattcaccgagagctgggtgggagactcccacaatgtgggcctacattccctccagcccccctcttgccacatcgcccatgcctttgggatcctggcaccagaagacaaagggggcatctgcaggatctcccactctgggcttcactcactctgctcttgcaataacccctggatagctactgcctcaccaaagtaagcccaatacacagcacccagaggtcacctattttgtcccccctaaccaagcctgagcttctcgatgtaaagaatcacatcttgctacccttaggtttccagaagcacctggcacaaggctggattccct

SEQ ID NO: 42434 - DNA, 1622 bp, Artificial sequence
  DNA replication origin
gcgcccctcacctcccggacggggcggccggccgggcggggggctgacccccccacctccctcccggacagggcggctggccgaccccccccccgcctccctcccggacggggcggctggccgggcagaggggctcctcacttcccagtaggggcggctgggcagaggcgcccctcacctcccggacggggcggctggccaggcggggggctgatccccccacctccctcccggacggggcggctggccgggcggggggctgaccccccccacctccctcccggacggggcggctggccaggtggggggctgaccccccacctccctcccggatggggcggctggccaggcggggggctgacccccccacctccctcccggacggggcggctggccgggcggggggctgatccccccacctccctcccggactgggcggctggccgggcggggggctgaccccccccacctccctcccggacggggtggctgccgggcggagacgctcctcacttcccagacggggtggctgccagacggaggggctcctcacttctcagacggggcggttgccaggcagagggtttcctcacttctcagacggggcggccgggcagagacgctcttcacctcccagacagggttgcggccagcagaggcgctcctcacatcccagacagggcggcggggcagaggtgctccccacatctcagacgatgggcggccgggcagagacgctcctcacttcctagatgggatggcggcggggaagaggcgctcctcgcttcctagatgggatggcggccgggcagagacgctcctcactttccagactgggcagccaggcagagaggctcctcatatcccagacgatgggtggccaagcagagacgctcctcacttcccagacggggtggcggctgggcagaggctgcaatctcggcactttggggggccaaggcaggcggctgggaggtggaggctgtagcgagccgagatcacgccactgcactccagcctgggcaccactgagcactgagtgaacgagactccgtccgcaatcccggcaccccgggaggccgaggctggcggatcactcgcggctaggagctggagaccagcccggccaacacagcaaaaccccgtctccaccaaaaaaaaaacgaaaaccagtcaggcgtggcggcgtgcgcctgcaatcgcaggcactcagcaggctgaggcaggagaatcaggcagggaggctgcagtgagccgagatggcagcagcaccgtccagccttggctcggcatcagagggagaccctacttttgatttttcgttgggaagagcctttcctgtgaccactggctatggcagttgtgaagtaggaatgaagcaaactagagttccgatcccaatgaacagccaatgtctgtcaatggctgatgtgcctagcaaatgcttagtgcctggaacactgtgagagctctgtgcattccagcagataataacagcaacaatgataataagcctgtgtccatggctgcatttttcaagcaagactgaaggccaacagctccaaggggaaaagaatgggcataggcctgctggaggtttcaaggtcaggagcactttaaga

SEQ ID NO: 42435 - DNA, 953 bp, Artificial sequence
  DNA replication origin
tccgggagggaggtggggggtcagccccccacctggccagccgccccgtccgggagggaggtggggggggtcagccccccgcccggccagccgccccgtccgggagggaggtggggggatcagccccccgcctggccagccgccccgtccgggaggtgaggggcgcctctgcccagccgcccctactgggaagtgaggagcccctctgcccggccagccgccccgtccgggagggaggcggggggggggtcggccagccgccctgtccgggagggaggtgggggggtcagccccccgcccggccggccgccccgtccgggaggtgaggggcgcctctgcccggccgcccctactgggaagtgaggagcccctctgcctggccagccgccccgtccgggaggatggtgggggggtcagccccccgcccggccagccgccccatccgggaggtgaggggcgcttctgcccggccgcccctactgggaagtgaggagcccctctgcccggccacgaccccgtatgggagatgtgcccagcggctcattggggatgggccatgatgacaatggcggttttgtggaatagaaaggcgggaagggtggggaaaaaattgagaaatcagatggttgccgggtctgtgtggatagaagtagacatgggagacttttcattttgttctgtactaagaaaaattcttctgccttgggatcctgttgatctgtgaccttatccccaaccctgtgctctctgaaacatgtgctgtgtccactcagggttaaatggattaagggcggtgcaagatgtgctttgttaaacagatgcttgaaggcagcatgctcgttaagagtcatcaccactccctaatcttaagtacccagggacacaaacactgcggaaggccgcagggtcctctgcctaggaaaaccagagacctttgttcacttgtttatctg

SEQ ID NO: 42436 - DNA, 824 bp, Artificial sequence
  DNA replication origin
tcgattgctattttctcactcagaaggagaaatttaaaaatccaaacagcactgcggcttggcttggacgcgctctaaccagaccagtcagtttcgccacctgaaaactaaaggcccgttgtttgcggacagctcggctgccctcctcgccgcatcccagatggagccgcggaaccgggggcggccgggagcatcccttgcacggcgggcgcgtgcacccaggccaccggggccctgagcgtccgttcccgcaagtgctgtatcaggaactgatcttagagacaggatggacaggcaggaaggggcacggggtgtcggcctccgcggcgagtccgcactccggcgccggctgctgccactctcgcgcctgatcaacacttactgagcgcccgctgagcatccgacgcggcagcaggctgagcctaccccctagccaagccgcctgcggtcagtgctaaaaccccgctaggagaagagtgagagaggctcggagaggtgcggtaacttgcccaaggtcacagcgctagaaagtggcggagccgggattcgcagccaggtctctctgactccaagtccggtgctctgcgaagcagggactcggcgcgcggctcgccagcccgcgtttatagggagaggggtgtgcgcgtgggtgtgtgtgtgtgggcgtgtgtcgggggaggggagggctgaggtcgactgggcagtagaggcaagttgcccaaattcgctaacttccatcccgcaattccgctgaactcggcccgaaaagccccctcttgcctcaattccccgaagtaaatctgagctttgtgcagctccggagc

SEQ ID NO: 42437 - DNA, 762 bp, Artificial sequence
  DNA replication origin
cccagcagagcagctttccaacagaaagcaagtctccccagaaccctccggcccgcctggcggccgcccactccccatacccgctccacgggagtcctcggccccgccgcccagcccggcgcccagcccggcggcccggcttacctctgagaagccgcctgccctggagagagggaagcgcggagctcggtgagccgcaagagaggcggcggagcccccagcccctggcacgcacgccgccgccaccgctaccgcgaaccggtcgcgctcagcgcccgcggccgcgccgttggccacccgaccccggggcgcctgggaaaagcccgcaccgcgccgcgccgccgctgcaccgcacagtgccgcgccaagcagcccctgaccgagctggtgcccgcccgcccgcccgcagcttcggcgccggactccggggcggtggcggtggcggccaccgcgctcccttcccggcgctggggacccggctctcaagcccccattgccgcccggagagccctgacgcacacgcacacggcagcagactggcctcggctaggaatcccaggaaggacagaccctttttttccctttttttttctcccctcaatttccacgtctttataaccggcttagggcattattagcacatgtcctggctcgtgggcgagttggtggcaaaatctgaactggatactcacggagggcccgcgcgggtgctgtgccgtccgctgctctcttcctcctcaccgagaactgcccctcgccggc

SEQ ID NO: 42438 - DNA, 1158 bp, Artificial sequence
  DNA replication origin
tgaactggatactcacggagggcccgcgcgggtgctgtgccgtccgctgctctcttcctcctcaccgagaactgcccctcgccggcggactacaagagggcagccgggcagagcgagcttcctctcggcagctcagcggtgccccttctgcagctttgccgccgggcacatttttatagcagcggctggcgtctgtggccctttaaaggcgctcgagctggtgcagtcaccgcggatcgtgtgaaagcaaagggccggctggggaacggagtccacgcggccacgcgagtccggcagccctgtggaccggccaaggctcccggggtggggctggcgagtccgggctatgggcagccctcgcccggagccctggccagtgcccggcttctaaagctgtcgggggccagggcccgggacaccggctctccccaccgccctgcgtggacttgcccaataaattccacttagtaatttcactgaggcaaaggagagccgttagtgtctgttttctgacctaaatctagtcgggggccaaaacgggcttcaggggttttgggagagagctgtgggctcaaggagtgacctggaagagcggggcgcacacgagacgggggaatggtcattagttttctgcagggctgtcttggagcctgtctgccttttgggggggctgtactatctcattcgttgaagagctgaggctgggggctccttttcctcttaaagtcgccagattctgggcagagtcgcatggggggcctatatggcagcggtggctcttctagaagttctgagctggggttgggttcgagggtttctgttctgtggtcatccagggcaggaggctggcaggatgcgacccggagaaatgctactctcccggaccgtggggccaggtacagctcactaggctcgccgaaaagccaacagtaggcaacggggtacgaagagcttgccccagggttcgcggagattcctcctgccttcccacgatgtcaggttgttttattgtaactacataatcattcccgtctagcaagaataacgttttgcatttggagttcgtctttcttaggtagagatgttgtcttacaaatccttactggaaagaggtctgggtcttctccttcacctcaattcggattctttgtggccaag

SEQ ID NO: 42439 - DNA, 1405 bp, Artificial sequence
  DNA replication origin
actgcactccagcctgggcaacattgagcactgagtgagtgagactccatctgcaatcccggcacctcgggaggccgaggctggcagatcactcgcggttaggagctggagaccagcctggccaacacagcgaaaccccgtctccaccaaaaaagtacgaaaaccagtcaggcgtggcagcacgcctgcaatcccaggcactcggcaggctgaggcaggagaatcaggcagggaggttgcagtgagccgagatggtggcagtacagtccagcttcggctcggcatcagagggagaccgtggagagagagggagagggagagggagaccgtggggagggggagggggggagggggagggggagggggagaagctaggtatattcttaagtattttattttttctgcagctattgtgaaaggggttgagttcttgatttgattatcagctttgttgctgtggtgcatagcacagctattgatttatgtatattaattttgtatcctaaaactttgctgaattcatttaccagttctaggagctatttggatgagtcttcagggttttctaggtatatgatcatatcatcaacaaagagcaacagtttgacttcctctttaccgatttgggtgccctttatttctttctcttgtctgattgctctgactaggacttccagtactatgttgaatagaagtggtgaaagtgggcatccttttcttcttccagttcttggggggaatgctttcaacttttgcccgttcagtataatgttggccgtgggtttgttgtagattattaccttttattaccttaaggtacgtccctcctatgccaattttgctcggggttttaatcataaagcgatgctgaattttgtcaaatgctttttctgcatctattgagatgatcatgcgatttttgtttttaattctgtttatgtggtatatcacacttattgacttgtgtatgttaaactatccctgcatctctaatatcgaacccagttgatcatggtgaattatcttttgatatcctgttggatttggttcactattatcttgttgaagatttttgcatcttcatcagggactttggtctgtagttttctttttttgttatgtccttccctagttttggtattagggtgatattggcttcatagaatgatttagggaggattccctcttcctctaacttttggaatagtgtcaataagattggtatcaattcttctttgaatgtctgatagagttcaactgtgaattcgtctggtcctgtgcacttttttgttggcattttttgttgttgttgttaccatttcaatctcgctgcttgttactggtctgttcagagatgctttatgttcctggtttaatgtaggagggttgtatatttccaggaatt

SEQ ID NO: 42440 - DNA, 1178 bp, Artificial sequence
  DNA replication origin
gttgggggtaaggttatagattaacagcatcccaaggcagaagaatttttcttagtacagaacaaaatggagtctcctacgtctacttccctctacacggacacagcaacaatctgatttctctatcttttccccacatttcccccttttctagtcgacaaaaccgccatcgtcatcatggcccgttctcaatgagctgttgggtacacctcccagacggggtggtggccaggcagaggggctcctcacttcccagacggggcggccgggcagaggcgccccccacctcccagacggggcagcggccgggcgggggctgccctccacctccctcctggacggggcggctggcggggtgggggctgccctccacctccctcccggacggggtggctgccaggcggagacgctcctcacttcccagacggggcagctgctgggcggaggggctcctcacttcacagacgggcggctgctgggcggaggggctcttcacttctcagacggggcggccgggcagagatgctcctcacctcccagatggggtcccggctgggcagaggcgctcctcacatcccagacggggtggcggggcagaggtgctccccacatctcagacgatgggcggccgggcagagacgctcctcacttcctagatgggatggcggccgggaagaggcactcctcacttcccagactgggcggcggggcagaggggctcctcacatcccagacgatgggcggccaggcagagacgctcctcacttcccagacggggtggcggccgggcagaggctgcaatctcggcactttgggaggccaaggcaggcggctgggaggtggaggttgtagcgagcagagatcacgccactgcactccagcctgggcaacattgagcactgagtgagtgagactccatctgcaatcccggcacctcgggaggccgaggctggcagatcactcgcggttaggagctggagaccagcctggccaacacagcgaaaccccgtctccaccaaaaaagtacgaaaaccagtcaggcgtggcagcacgcctgcaatcccaggcactcggcaggctgaggcaggagaatcaggcagggaggttgcagtgagccgagatggtggcagtacagtccagcttcggctcggcatcagagggagaccgtggagagagag

SEQ ID NO: 42441 - DNA, 598 bp, Artificial sequence
  DNA replication origin
aagtgaggagcccctccgcccagcagctgccccgtctgggaagtgaggagcgtctccgcctggcagccaccccgtccgggagggaggtggagggcagcccccaccccgccagccgccccgtccaggagggaggtggagggcagcccccgcccggccgctgccccgtctgggaggtggggggcgcctctgcccggccgccccgtctgggaagtgaggagcccctctgcctggccaccaccccgtctgggaggtgtacccaacagctcattgagaacgggccatgatgacgatggcggttttgtcgactagaaaagggggaaatgtggggaaaagatagagaaatcagattgttgctgtgtccgtgtagagggaagtagacgtaggagactccattttgttctgtactaagaaaaattcttctgccttgggatgctgttaatctataaccttacccccaaccccgtgctctctgaaacatgtgctgtgtccactcagggttaaatggattaagggcgttgcaagatgtgctttgttaaacagatgcttgaaggcagcatgctcattaagagtcatcaccactccctaatctcaagtaccc

SEQ ID NO: 42442 - DNA, 951 bp, Artificial sequence
  DNA replication origin
caccccgtccgggaggtgaggggcgcctctgcccggccgcccctactgggaagtgaggagcccctctgcccggccagccgccccgtccgggagggaggtgggggggtcggccccccgcccggccagccgccccgtccgggagggaggtggggggggtcggccccccgcccggccagccgccccgtccgggaggtgaggggcgcctctgcccggccgcccctactgggaagtgaggagcccctctgcccggccagccgccccgtccgggagggaggtgggggggtcagccgccccgtccgggagggaggttggggggtcagccccccgcccggccagccgccccgtccgggagggaggtggggggggtcagcccccctgcccagccagccgccccgtccgggagggaggtgggggggtcagccccctgcccggccagccgccccgtccgggaggtgaggggcgcctctgcccggccaccaccccgtctgggaggtgtgcccaacagctcattgagaacgggccaggatgacaatggcggctttgtggaatagaaaggcgggaaaggtggggaaaagattgagaaatcggatggttgccgtgtctgtgtggagagaagtagacatgggagacttttcattttgttctgcactaagaaaaattcctctgccttgggatcctgttgatctgtgaccttacccccaaccctgtgctctctgaaacatgtgctgtgtccactcagggttaaatggattaagggcggtgcaagatgtgctttgttaaacagatgcttgaaggcagcatgctcgttaagagtcatcaccaatccctaatctcaagtaatcagggacacaaacactgcggaaggccgcagggtcctctgcctaggaaaaccagagacctttgttcacttgtttatctgctgaccttccctccactattgtcccatgaccc

SEQ ID NO: 42443 - DNA, 806 bp, Artificial sequence
  DNA replication origin
tcgccagccacagcggcgggaggtcgaaggcagcgcaagagctcattggcctttgtggcaagagcgggaagggaagcagaagctggatcttccctcagaccgtctgactggttctgacttgccggaggctgaggcaaccacaggctgacatcagaattaggtcctcgttctccacgcctcttatttcctcccaccctcctgagccagattcccaaccccttcccctctctgctacctcagcagggaacccccaactgctcctgatgtcccatcgcgccctcagctctcccggaatccctttcgggaggactccttgctccagccccctgagccctggcctttggccaatgaggcagggctcatgggattgcttttgattcggaggtccgggagggagtggatgattgggcttcctgaggaagtggtgcgctccagggtggtgggactgcgtgtgtggggtggggtgggggtggggggaaatggtgtgctcaagcacaattgttgaagtgtggagaggattatggaagattttggggaggctgtggagggaatgtgtgggttttcatgaaagcagaaaaggtgtgtgagtccaagagaaacactactgcactgaggagttccctactggctagatcagaacctgacacttcataggaggctcaacaggtacctgctgaatgaagaatcaagggaatcggccgggcccggtggctcacgcctgtaatcccagcaccttgggaggccgaggcaggtggatcagcctggccaacatgtgaaaccccgtctctattaaaaaatacaaaaaa

SEQ ID NO: 42444 - DNA, 1254 bp, Artificial sequence
  DNA replication origin
cctgtaatcccagcactttgggaggccgaggcgggcggatcacgaggtcaggagatcgagaccatcctggctaacacggcgaaaccccgtctctactaaaagtacaaaaaaattagccgggcgtgatggcgggcgcctgtagtcccagctacgcgggaggctgaggcaggagaatggcgtgaacccgggaggcggagcttgcagtgagccgagattgcgccactgcactcccgcctgggcgacagagcgagactccgtctaaaaaaaaaaaaaatacaaaaaattagccaggcgtggtggcaggcacctgtaatcccagctactcgtgaggatgaggcaggagaatcacttgaacccgggaggcagaggttgcagtgagccgagatcacaccattgccctccagcctgggtaacgagtgaaactccgtctcaaaaaaaaaaaaaaaaaaaaaggccgggggggatgcatgaagggatgaatgaaattagtaactgaaagagggccagggatccaggagaacaatatgatttcatgggatacaagagggaaatcagctcaaagggggagcaagggaataattaagtgtaaggtggagtacaagaaaaaaatcagcatgaaccagcatgaaatgtgaggggaaaattgaatatagggcatagaagagactgacaatggaattgagtgctggtggcacaaaatcctgtgcggggagtgaatgaatgcaggaggttctgaagagaattggtgaagtggatgccaggaataatacttgggtttggcagagtgcaggatgatacacaagaagggcgtgtagtaatggtggaagagggcaggggagtgcatgtgcatgcctgaaagtggggtctatggtgaagtgacggtaagcaaggagaataatgactgcattgaatgggtatgggatccattccaagagtttcttgggagggggctatgtgtgagtggggcttctgggaaggaggcaacatcagcaagggggttgcagtgaaggttggcgaaaaccatgggagaagaaggggagggaaggcaatctgattccagcggtgagaaggatggagaaggagcattgagccacctcagatagggttttccaagggcagaggaagtacgttgggggtaggggatcacgtggccattctgacctccgctcctgaccctagaagcatggatcccgtgtgtctgaacctccatttccctatggatgtactgaggacaaataaatacccgctgcaccc

SEQ ID NO: 42445 - DNA, 1246 bp, Artificial sequence
  DNA replication origin
taatcccagcactttgggaggccgaggcgggcggatcacgaggtcaggagatcgagaccatcctggctaacacggcgaaaccccgtctctactaaaagtacaaaaaaattagccgggcgtgatggcgggcgcctgtagtcccagctacgcgggaggctgaggcaggagaatggcgtgaacccgggaggcggagcttgcagtgagccgagattgcgccactgcactcccgcctgggcgacagagcgagactccgtctaaaaaaaaaaaaaatacaaaaaattagccaggcgtggtggcaggcacctgtaatcccagctactcgggaggatgaggcaggagaatcacttgaacccgggaggcagaggttgcagtgagccgagatcacaccattgccctccagcctgggtaacgagtgaaactccgtctcaaaaaaaaaaaaaaaaaaaaaggccgggggggatgcatgaagggatgaatgaaattagtaactgaaagagggccagggatccaggagaacaatatgatttcatgggatacaagagggaaatcagctcaaagggggagcaagggaataattaagtgtaaggtggagtacaagaaaaaaatcagcatgaaccagcatgaaatgtgaggggaaaattgaatatagggcatagaagagactgacaatggaattgagtgctggtggcacaaaatcctgtgcggggagtgaatgaatgcaggaggttctgaagagaattggtgaagtggatgccaggaataatacttgggtttggcagagtgcaggatgatacacaagaagggcgtgtagtaatggtggaagagggcaggggagtgcatgtgcatgcctgaaagtggggtctatggtgaagtgacggtaagcaaggagaataatgactgcattgaatgggtatgggatccattccaagagtttcttgggagggggctatgtgtgagtggggcttctgggaaggaggcaacatcagcaagggggttgcagtgaaggttggcgaaaaccatgggagaagaaggggagggaaggcaatctgattccagcggtgagaaggatggagaaggagcattgagccacctcagatagggttttccaagggcagaggaagtacgttgggggtaggggatcacgtggccattctgacctccgctcctgaccctagaagcatggatcccgtgtgtctgaacctccatttccctatggatgtactgaggacaaataaatacccgctgc

SEQ ID NO: 42446 - DNA, 752 bp, Artificial sequence
  DNA replication origin
tcattggtcgccagccacagcggcgggaggtcgaaggcagcgcaagagctcattggcctttgtggcaagagcgggaagggaagcagaagctggatcttccctcagaccgtctgactggttctgacttgccggaggctgaggcaaccacaggctgacatcagaattaggtcctcgttctccacgcctcttatttcctcccaccctcctgagccagattcccaaccccttcccctctctgctacctcagcagggaacccccaactgctcctgatgtcccatcgcgccctcagctctcccggaatccctttcgggaggactccttgctccagccccctgagccctggcctttggccaatgaggcagggctcatgggattgcttttgattcggaggtccgggagggagtggatgattgggcttcctgaggaagtggtgcgctccagggtggtgggactgcgtgtgtggggtggggtgggggtggggggaaatggtgtgctcaagcacaattgttgaagtgtggagaggattatggaagattttggggaggctgtggagggaatgtgtgggttttcatgaaagcagaaaaggtgtgtgagtccaagagaaacactactgcactgaggagttccctactggctagatcagaacctgacacttcataggaggctcaacaggtacctgctgaatgaagaatcaagggaatcggccgggcccggtggctcacgcctgtaatcccagcaccttgggaggccg

SEQ ID NO: 42447 - DNA, 1334 bp, Artificial sequence
  DNA replication origin
gctgccgccaccgccgccgccactgtcgctgctgtcgccacggtcgccgctgccgccgggccgctgccgcgacctcccttcccgcgagctgggggacggagaggcgggggagggcgggagggcaggagggcgggtgggtgcgggaacacagacccgatgcgcgagcgggagctggcgcaggggatccgaactggcgagttcaagtcacctgggatggcaagtgctgccaggagcgcgccggtgcgagtcgccgcagcctgcagccagctgctgttgccgccgccgctcggtcgtgggctagcgcgcagggtgcggggtgcgggcgggcaggcggcgtgtggtggggggcggggggtgttggcgtctgtcgtccgggcagctgggaaggcttctgtctctttggttccccctgtggctgctgcggggctgcggggctgcggggctgcggggctgcggggctgcggggctgcggggctgcggggctgcggggctgcggggctgccgggctgcgggcggtgggagatgacgggggtgggagcaggagcgggagcaggggcgggagcgggagcgggagtgggagtgctcagtctctcgggtcgcctggatatttatgaaaaggacgccagggaaagggctccgctgtagaccgaagggataagggttcgattcagaagggagcgttatttttatcccctctccacataatggaacgtttaaatggttaaatcaagtaccttgcaggagagggtggggtggccttgagaatacactcaaggcctcagtacatgcagtctggaagtgggggaatcaagagcaccctgtctctagtactgtcctcaatgataaggtgaggaaagccaaacccaggactgggaacagggcctggtccagagccaggcgcttgtttattcttgactctgctctcaaggcgctgaggttcccaacctggaccaagaagtacatattcaggttcaaaggataaaccaaaacaaaacctgagctctctctctagaatgaagtgcctggtcccagttcaccatctaatatttatggaaagcttatcaggtacttggtgctgggggctaaggggcccgcaatgtggtaagtgagcagggactgttgatgtgttggaggtgtggagcagggtgagaagaggtgagcagtgtgtgtgtagtgagagcagagaggccacacagagccaaatgctgggggtatagacaagggagcaaccatgagagttgagtgtaacagaagctacagtcccacttcctccagagaggaggaccagccactaactcttcttagtagcaattaggtgaggctgcaccaaagac

SEQ ID NO: 42448 - DNA, 2391 bp, Artificial sequence
  DNA replication origin
ggatcccctgcgccagctcccgctcgcgcatcgggtctgtgttcccgcacccacccgccctcctgccctcccgccctcccccgcctctccgtcccccagctcgcgggaagggaggtcgcggcagcggcccggcggcagcggcgaccgtggcgacagcagcgacagtggcggcggcggtggcggcagcggctgcggcggcggcggaggctgcggcggcgaccgtggcagaggcggtggcggaggcctccgtggcggaggcggaagcagaggtagaggctgaggtggaggccgaggcctcaatagaggaggcagcatcggaggccaccccgggggaggcggaggccgcccgggtggcaacggtggtggcggtggcggagggcagcgcggccgaagccgccgccgcagcggaggctgcggggccccccttgggggaggcggaggcggatgcggatgcggatgcggatgcgaatgcgaaggtggcggccgaggtggcggccgaggtggcggctgcggcggccgccgcggatgcagatgcggatgagaccctcggtgactgtgaggggaacccagattttcagatggcctccctgtacgtgggcgacctgcaccctgaggtgaccgaggcaatgctgtacgagaagttcagtccagctgggcccatcctctccatccgcatctgcagggacaagatcacccgccgctcattgggctacgcgtatgtcaactaccagcaaccggtggacgccaagcgggccctggagaccctgaactttgatgtcataaagggcaggccagtgcgcatcatgtggtcccagagggacccgtcgctccgcaagagcggggtgggcaacgtcttcatcaagaacctgggcaagaccatcgacaacaaggcgctgtacaacatcttctcggcgttcggcaacatcctctcctgcaaagtggcctgtgacgaaaaggggcccaagggctacgggttcgtgcacttccaaaagcaggaatctgcggagcgggccatcgatgtgatgaatggcatgttcctgaactaccgcaaaattttcgtcgggagattcaagtcgcataaagaacgagaggccgaaaggggagcctgggccaggcagtccactagtgctgacgtcaaggatttcgaggaagacaccgacgaggaggccaccttgcgatgaagacatcccaggagctagccagccagcagagccaaaccttggctcacacccggtttacaaccccccacccccagccctcccccgccaacccaccagcagtgtatttattgtattgagagtgcaggtctctctctctctctctctccccttctctctccccgcttcctattttctccctccacctctcctctccttcccttcctctcccccgcccacccccaccaagggcgttgtgaataatcttactaatctgtgccatttgtaggttaaaggctgcctcttctccctgtggtttggtttaaaaagcattttcattctctctttgtttactgcacaggtggtacaatttcatggtagaatcatcagaaaggagaaggatatcagatgagggaagaaacaagagagtaattgctcccctggtcctactccccagagagaaccacttttacctttttggtgtgctgcttttccaggctctcttctctccctctctctcctttgctcacccccaccccgccttcccttttaacacaccgttatagaatggttcatgtatgtggtgtttcttaacctgctttttcagcaactaaaaccaaacaaaaatcaacccattgaacttctttccatgttatcaacaggcttatgaaatgtcatcttcagtgcctgcagagtgctccagtgtatccgtggaccttaacatttctgtaatcattcccgcattgttggacattcaggtggtgcctagttctttccctgtgtttaagaccaacattgcgtgctctgtgctttgatgagtgaatccttccttgtcaagccaaatctttgctagcatcccggtggtctccttaactgcggacttgcaagatccacatatagacattttaaagacttttcctgtgtgttgccaaaaggcccccttcataagcattgtaccgatttgcactcgtgccggccagcgcagctagtaaagagtatgcccgtttcccctgcatagcctcctggtcactgtaattgatcgtgtgtgtgcgtgcgtgcgtgtgtgcatgcgtgtgtgtgtctttgtgtgtgtgtcttggccagcttggcgggctgcaaagggtgtttccctgtcctcagtggttttgctgcaatcaaacactgtttattacccccttcccctgtgcccacttcctgtccttttccctgttgtcagaaaaataattcagcgtca

SEQ ID NO: 42449 - DNA, 945 bp, Artificial sequence
  DNA replication origin
aggagtgcctctgtctggccaccctgtctgggaactgagaagcacctctgcccagctgccccatctgagagatgaggagtgcctctgcctggcagccgccctgtctgggaagtgaggagcgtctctgcctggctgcccatctgggaagtggggagcgcctctgcccagctgccccaactgggaagtggggagcgcctctgcccggccgccccaactgggaagtggggagcgcctctgcctggctgccctgtctgggaggtgaggagcgcctctgcccggccgctcatcatctgggaagtgaggagcgcctctgctcagctgccacgctgtctgggaagtgaggagctcctctgcccggccgccccgtctgggaaatgaggagcgcctctgcctggccgctgtgcaatcttccaagtgtgaagtgacagcctttctgcaggtatacccaacagctccgaagagacagtgaccatcaagaatgggccatgatgacgatggcggttttgtcgaaaagaaaagggggaaatgtggggaaaagaaaaagagatcagattgttactgtgtctgtgtagaaagaagtagacataggagactccatgttgttctgtactaagaaaaattcttctgccttgggatgctgttaatcgataaccttacccccaaccccatgctctctgaaacatatgctgtgtcaactcagggttaaatggattaagggcggtgcaagatgtgctttgttaaacagatgcttgaaggcagcatgctcaataagagtcatcaccactccctaatctcaagtacccagggacacaaactctgtggaaggctgcaggaacctctgcctaggaaaaccagagacctttgttcacgtgtttatctgctgaccttctctccactattatcctatgaccctgccacatccccctctccgagaaacacccaaga

SEQ ID NO: 42450 - DNA, 2370 bp, Artificial sequence
  DNA replication origin
cccctgcgccagctcccgctcgcgcatcgggtctgtgttcccgcacccacccgccctcctgccctcccgccctcccccgcctctccgtcccccagctcgcgggaagggaggtcgcggcagcggcccggcggcagcggcgaccgtggcgacagcagcgacagtggcggcggcggtggcggcagcggctgcggcggcggcggaggctgcggcggcgaccgtggcagaggcggtggcggaggcctccgtggcggaggcggaagcagaggtagaggctgaggtggaggccgaggcctcaatagaggaggcagcatcggaggccaccccgggggaggcggaggccgcccgggtggcaacggtggtggcggtggcggagggcagcgcggccgaagccgccgccgcagcggaggctgcggggccccccttgggggaggcggaggcggatgcggatgcggatgcggatgcgaaggtggcggccgaggtggcggccgaggtggcggctgcggcggccgccgcggatgcagatgcggatgagaccctcggtgactgtgaggggaacccagattttcagatggcctccctgtacgtgggcgacctgcaccctgaggtgaccgaggcaatgctgtacgagaagttcagtccagctgggcccatcctctccatccgcatctgcagggacaagatcacccgccgctcattgggctacgcgtatgtcaactaccagcaaccggtggacgccaagcgggccctggagaccctgaactttgatgtcataaagggcaggccagtgcgcatcatgtggtcccagagggacccgtcgctccgcaagagcggggtgggcaacgtcttcatcaagaacctgggcaagaccatcgacaacaaggcgctgtacaacatcttctcggcgttcggcaacatcctctcctgcaaagtggcctgtgacgaaaaggggcccaagggctacgggttcgtgcacttccaaaagcaggaatctgcggagcgggccatcgatgtgatgaatggcatgttcctgaactaccgcaaaattttcgtcgggagattcaagtcgcataaagaacgagaggccgaaaggggagcctgggccaggcagtccactagtgctgacgtcaaggatttcgaggaagacaccgacgaggaggccaccttgcgatgaagacatcccaggagctagccagccagcagagccaaaccttggctcacacccggtttacaaccccccacccccagccctcccccgccaacccaccagcagtgtatttattgtattgagagtgcaggtctctctctctctctctctccccttctctctccccgcttcctattttctccctccacctctcctctccttcccttcctctcccccgcccacccccaccaagggcgttgtgaataatcttactaatctgtgccatttgtaggttaaaggctgcctcttctccctgtggtttgatttaaaaagcattttcattctctctttgtttactgcacaggtggtacaatttcatggtagaatcatcagaaaggagaaggatatcagatgagggaagaaacaagagagtaattgctcccctggtcctactccccagagagaaccacttttacctttttggtgtgctgcttttccaggctctcttctctccctctctctcctttgctcacccccaccccgccttcccttttaacacaccgttatagaatggttcatgtatgtggtgtttcttaacctgctttttcagcaactaaaaccaaacaaaaatcaacccattgaacttctttccatgttatcaacaggcttatgaaacgtcatcttcagtgcctgcagagtgctccagtgtatccgtggaccttaacatttctgtaatcattcccgcattgttggacattcaggtggtgcctagttctttccctgtgtttaagaccaacattgcgtgctctgtgctttgatgagtgaatccttccttgtcaagccaaatctttgctagcatcccggtggtctccttaactgcggacttgcaagatccacatatagacattttaaagacttttcctgtgtgttgccaaaaggcccccttcataagcattgtaccgatttgcactcgtgccggccagcgcagctagtaaagagtatgcccgtttcccctgcatagtctcctggtcactgtaattgatcgtgtgtgtgcgtgcgtgtgtgtgtgtgtgtgtgtgtgtgtgtgtcttggccagcttggcgggctacaaagggtgtttcgctgtcctcggtagttttgctggaaacaaacactgcttatgaccccattcccctgtgccctcttcctgtccttttccctgttgtcagaaaagtaattcagcgtc

SEQ ID NO: 42451 - DNA, 1315 bp, Artificial sequence
  DNA replication origin
cgccaccgccgccgccactgtcgctgctgtcgccacggtcgccgctgccgccgggccgctgccgcgacctcccttcccgcgagctgggggacggagaggcgggggagggcgggagggcaggagggcgggtgggtgcgggaacacagacccgatgcgcgagcgggagctggcgcaggggatccgaactggcgagttcaagtcacctgggatggcaagtgctgccaggagcgcgccggtgcgagtcgccgcagcctgcagccagctgctgttgccgccgccgctcggtcgtgggctagcgcgcagggtgcggggtgcgggcgggcaggcggcgtgtggtggggggcggggggtgttggcgtctgtcgtccgggcagctgggaaggcttctgtctctttggttccccctgtggctgctgcggggctgcggggctgcggggctgcggggctgcggggctgcggggctgcggggctgcggggctgcggggctgcggggctgccgggctgcgggcggtgggagatgacgggggtgggagcaggagcgggagcaggggcgggagcgggagcgggagtgggagtgctcagtctctcgggtcgcctggatatttatgaaaaggacgccagggaaagggctccgctgtagaccgaagggataagggttcgattcagaagggagcgttatttttatcccctctccacataatggaacgtttaaatggttaaatcaagtaccttgcaggagagggtggggtggccttgagaatacactcaaggcctcagtacatgcagtctggaagtgggggaatcaagagcaccctgtctctagtactgtcctcaatgataaggtgaggaaagccaaacccaggactgggaacagggcctggtccagagccaggcgcttgtttattcttgactctgctctcaaggcgctgaggttcccaacctggaccaagaagtacatattcaggttcaaaggataaaccaaaacaaaacctgagctctctctctagaatgaagtgcctggtcccagttcaccatctaatatttatggaaagcttatcaggtacttggtgctgggggctaaggggcccgcaatgtggtaagtgagcagggactgttgatgtgttggaggtgtggagcagggtgagaagaggtgagcagtgtgtgtgtagtgagagcagagaggccacacagagccaaatgctgggggtatagacaagggagcaaccatgagagttgagtgtaacagaagctacagtcccacttcctccagagaggaggaccagccactaactcttcttagtagcaattaggtgag

SEQ ID NO: 42452 - DNA, 1007 bp, Artificial sequence
  DNA replication origin
tttgtctcacaatggaggcaaggaattgcaactcagaaacacattgctacttggctgcctctactctattattgtacacctttaaggtgaggttaattaagtcctgttgtggagcttgagggctggaatttaatttttggagctttattctaatttcaggagctgactgggtgataaaatgcatatttagaatgagacagccttctgacccttcagggtctagggctgtaaagggtctaagggttgctgccaaatgggccatgaactgggctaggtttttcatatttgatgaaaaagagcctaaacgctaactgatttcagagaggttggataaagaaaaaggagcattaaccttgactatgcctttagctccaggcaactttttaagaggaaattgctgggcaggtgggggagggctagttgcggaacgaaactgtaaggcagaccgggtgtgaggaggggaggtgataaaaggattatagggtgggggagcggaggctgaggaagaattgggacctagcttggcctggcgaggagcagcttagggaggaggggagaggtcagatgggtccataaaaaaggaagattggaaagactcagcgatgcttggggttgggactgaggggacaagcaggagggaaagaatgaagatttgggatgagttgcattgggaacagagactagggagggaccgatgtgtaaaagaatgcctggacatcaggcacctcagaccgtttgcccattttacgacaagaattatttaggtcttgtaggatggagaaatcgaaagtgccgttttctggccatttagagccattatcgagtttgtattggggttaagcggcattgcagaagaaaataaggcatttaggttttaggtcagtgtgagttaaagaggttttaagttcttgagaatacaggctaagggagaagaaggaggaatggagggtggttgcctataatgaaggagacaagtccagagaaaagagagggtagcatggagagaa

SEQ ID NO: 42453 - DNA, 786 bp, Artificial sequence
  DNA replication origin
gcccaacacgcaggcgcgtctcctcaaatcctgtccctacacccctcctctttctcttcatttcgttccccctcctcttgcagcacctcggcaggttcaaactcttctccgggagcgtggcggcgatcgcgaggtcacgtgatgagcatcctgctgcccaacatggcggagttcgacaccatctcggaactggaggaggaggaggaagaagaagcggcaacgtcgtcgtcgtcgccgtcgtcgtcgtcgtcggtatctgggcccgacgatgacgaggaggatgaggaggaagaggaggaagaggaggaggaggaagaagaggaggaggaggaagaggaggaggaagcgccgcccccgcctcgggtagtgagcgaggagcatctgcggagatatgctcccgaccctgtattagtgcggggtgccggccacatcactgtgtaagcgagagggggtcttgggacttgaaatgcctgagatttggcaacagaggaatgagaagtgatcgaggggcctgtggagtgggggagggttgactgattgactgaggcgtacacttaggaaaggacacctggtctaaatggggaaaccatgggtggatacgtgtgaaggaagtgaggagaatgtaaatatgatgcaccaatgccaggtaaagagtgagtataggagagggaagttaggggtttgggagccagagcgattggagtaggggtgagtctcctttcttgtatgtatgctggcaagtgaacagtctctaaactgcaggatgtaccagagggttttttgctg

SEQ ID NO: 42454 - DNA, 1012 bp, Artificial sequence
  DNA replication origin
tagtggagcttgtggtgaagttttgctggggatgacaacactatgtaagcctttttttgccccagtggtgacagcagcgggtccccagacagcatatgctggcacaagtgttagcaggtccagtcaaaccaattcttggtctccagtcagggtgcttcagtgctggtagttacagtggtgggccggttgggtggacaggatcttggggggtagtggacgtggcaaagacaatggcagtaggagtggcaggacaaccctctggctcctaaaatgtccacactggtgttggcagtgcctgcactgggctgagcagacaagtccccaggccttcaaatggtgcttgtgattggatgtcagctgtggtactagtggttgagtaggcctgaccatagcctcctaggaggagttctcaggtgtcaatgatggtattgtggggttggcggtctctaggctgctggaaaatgtgcttgggcacttggggggtggggttggtggagctggtccagatggatgtgtcctcaggccctctggtagtgtgtgcaagtgcttggtttggtacacagcggcagggtcatctccaggctcctggtggaatgtttggctgggggcaacagtgattgtaccacagccttgttcctgggtcaggtggggttgcttttagtgtcagtggctatatgcaggtggctagggggcatgtgttttgcttgtgctttggccctggtggtggcagctcacagtagaggcagctacgtggtgggtttgctgctgagggcagtggggttgttaccaatgattcaggggtcagccctggttgggacagacagtcacagaggtattgcaggtagggaagatcaatggagctctaggaatttggagattccagggttattggcccccctccccccaggcaggaggcagtatagtaggggctgggctctcagtgtgcaccttactgtagctgcttaggacttgtgggggcatgggacccaatgtgactaccctctatggagca

SEQ ID NO: 42455 - DNA, 877 bp, Artificial sequence
  DNA replication origin
catttcccccttttctatttgacaaaactgccattgtcatcatggcccgttctcaatgagctgttgggtacacctcccagatggagtggcagctgggcagaggggctcctcacttcccagacggggtggccgggcagaggcgccccccacctcccagatggggcagtggccaggcggaggcgccccccacctccctcccggattgggcggctggccgggcggaggggctcctcacttcccagatggggcggctgtgaggcggaggggctcctcacttcccagatggggcggctgtgaggcggaggggctcctcacttctcagacggggcggccgggcagagacgctcctcacctcccagacggggtggcggtcgggcagagacactccttagttcccagatggggtcaaggccgggcagaggtgctcctcacatcccagacgaggtggtggggcagaggcgctccccacatctcagacgatgggcggccgggcagagacgctcctcacttcctagacgggatggcggccgggaagaggcgctcctcacttcccagactggacagccgggcagaggggctcctcacatcccagacgatgggtggccaggcagagatgctcctcacttcccagacggggtggcggccgggcagaggctgcaatcttggcactttgggaggccaaggcaggcggctgggaggtggaggttgtagcgagccgagatcacgctactgcactccagcctgggcaacattgagcactgagtgagcgagactccatctgcaatcctggcacctcaggaggctgaggcaggcagatcactcgtggtcaggagctggagaccagcccggccaacatggcgaaaccccgtctccacca

SEQ ID NO: 42456 - DNA, 1106 bp, Artificial sequence
  DNA replication origin
ggggtggcggccgggcagaggggctcctcacttcccagatggggcggccaggcagaggcgccccccacctcccagacggggcggctggcggggtgggcgctgccgtccacctccctcccggacggggcggctggctgggcgggggatgccccccaccccctcccagatggggtggctggccgggcgggggctgccccccacctccatcccggacagggcggctggccgggcggggactgccccccacctcccggacggggcggctgccgggcggagatgctcctcacttcccagatggggcagctgccgggcagaggggctcctcacttctcagatggggcggccgggcagagacgctcctcacctcccagacggggtggcggtcgggtagagacactcctcagttcccagacggggttgcagccgggcagaggcgctcctcacatcccagatggggcggcggcgcagaggcgctccccacatctcagacgatgggtggccgggcagagacgctcctcacttcctagatgggatggcggccgggaagaggcgctcctcacttcccagactgggtggccgggcagaggggctcctcacatcccagatgatgggcggccaggcagagacgctcctcacttcccagacggggtggcggccgggcagaggctgcaatgtcggcactttgggaggccaaggcaggcagctgggaggtggaggttgtagcgagccgagatcacgccactgcactgcggcctgggcaacattgagcactgagtgagcgagactccgtctgcaatcccagcaccttgggaggccgaggctggcagatcactcggggtcaggagctggagaccagcccggccaacagggcaaaaccccatctccaccaaaaaaatacgaaaaccagtcagacgtggcagtgcgcgcctacaatcccaggaactcagcaggctgaggcaggagaatcaggcagggaggttgcagtgagccgagatggcggcagtacagtccagccttggcttggcatcagagggaaactgtggaaaggggagacgagggagagggagaccgtagaaaggaaagagaggggtagagggagaaggaga

SEQ ID NO: 42457 - DNA, 821 bp, Artificial sequence
  DNA replication origin
cccggctgcaaccccgtctgggaactgaggagtgtctctacccgaccgccaccccgtctgggaggtgaggagcgtctctgcccggccgccccatctgagaagtgaggagcccctctgcccggcagctgccccatctgggaagtgaggagcatctccgcccggcagccgccccgtccgggaggtggggggcagtccccgcccggccagccgccctgtccgggatggaggtggggggcagcccccgcccggccagccaccccatctgggagggggtggggggcatcccccgcccagccagccgccccgtccgggagggaggtggacggcagcgcccaccccgccagccgccccgtctgggaggtggggggcgcctctgcctggccgccccatctgggaagtgaggagcccctctgcccggccgccaccccgtctgggaagtgtactcaacagctcattgagaatgggccatgatgacgatggcagttttgtcgaatagaaaagggggaaatgtggggaaaagaaagagagatcggattgttactgtgtctgtgtggaaagaagtagacatgggggactccattttgttctgtactaagaaaaattcttctgccttgggatgctgttaatctataaccttaccgccaaccccgtgctctctgaaacatgtgctatgtccactcagggttaaatggattaagggcggtgcaagatgtgctttgttaaacagatgcttgaaggcagcatgctcgttaagagtcatcaccactccctaatctcaagtacccagggacacaaacacagcggaaggctgcagggtcctc

SEQ ID NO: 42458 - DNA, 1975 bp, Artificial sequence
  DNA replication origin
taactttgagaaatatgattatctaccaatagaggcaaccagcagtaactgtcctccacatattgaaaatttcagcaatgttgacatgggagaaattatcatggggaacgttgagcttgttacacgtgtccatataagagaccacttgagcaggcttagtgtgagcaacaaggctgtttattcacttgggtgcaagtgggctgaatctgagaaaggagtcagcaaagggtggtgggattatcattggttcttgtaggtttgggataggcagtggagtcaggagcaattttttgtgggcaggggatggatgttacaaagtacattcacaggggcaggggggaatgttacaaagtacatttgcaagggtggggagggtgtactgtcacaagggcggggaggaatgttacaaagtacattcacaaggatggggaatatcacaaagtacattatcacaagggcaggggaatgtcacgatggcttgaccatggtgcggccagctcagaggaccttatattcccgtctttttatgttaataatgaagaaataaaacaagaaagattaatgaaaacttgaggtgaaaattttgggggcggtatggaggggtgatgggcgatgtttctcagggctgcttcaagtgggattaggggtggcatgggaacctaaagtgggagagattagactgaagtaagattttggggtaaggggtgatattgtgggcttgttaaaagcagcacttgtcatatagagtgattagtgatagcctggatgcagttttgtaggaattgagagattaatcggaagacaaaaggcccgaataagagatggaggaagataggtattacaggactaatgattggaacaagccaggatacccagttagagagtgaccaggtgggtccagcataattagttgcctgattagtgagtttttgagctctgtctttgagttttttgatgttaccatatgccaggccagattgatttaagtaaaaacaacactcttcattaagaaatatacagagtcctcctttttcagcagtgagtaaattgaggccttggcggttctgcaggacaactgcagctaaagagtcaacctgggcttggaggacagataaagcttgtgatatatctgtaatgctagcagagaagtcattagagaggctgcggaatgctgtgacagaggttgagatgcctgctattccagttccaagtgcaagagtggaggcagaaagtcctagacccacaagcaaagggattagtgagatgactcttttttgtcatgttggtgtcatgagggggacaggcagttgttcattcccatctacaaactggattttgggagtaaggaagactagagtacatgtgcccatctagctggcaggtaggcacatgtaggtggaagagccacataaaaagaagaaaccttgtgtcaggcagaactggaaatgtaaagtgaaaaggtgagagggtgtactgaaagaggagtcctgcaccccaaatcctagagatccagcaaggacagcagctgttagaggttgtaatggggattgatggtgcaattgtgtagatgaaaggtttggttctcatggtatatgagaaagagcatagtatctatgagtaacctttcactgctattgatggggctgggtataagcaagcaagaggaggagtcaggaggagagtcagatgagcaagcggagggtagccaaggatggagtgagatgcagggtaggtgtcttcctaaacaatagtgactgccaatgttttttagtttgtcaataatgatagagggcttatcagcaatgcgaagttggaatgctcccatctgtttggtagtgtgtgtggctgggttctggagataaagagtaaaggaacatttggacggtggaaggttgcctaaagggattccagtaggctgtggtcaggagatgcaaaaaggagcagcaacagggatagttgtttgtgtggttagggg

SEQ ID NO: 42459 - DNA, 1326 bp, Artificial sequence
  DNA replication origin
cggggggctgaccccccccacctccctcccggacggggcggctggccgggtggggtgctgatccccgcacctccctcccggacggggcggctggccaggcggggggctgagccccccacctccctcccggacggggtggctggcccggcagaggggctcctcacttcccagtaggggcgctgggcagaggcgcccctcacctcccggatggggcggctggccgggtggggggctgacccccccacctccctcccggagggggcggctggccgggcggggggctgagccccccacctccctcccggacggggtggctggcccggcagaggggctcctcacttcccagtaggggcggctgggcagaggcgcccctcacctcccggacggggcggctggccgggtggggggctgaccccccccacctccctcccggacagggggctgacctccccacctccctcccggacggggcggctgccgggcggagacgctcctcacttcccagacggggtggctgccgggcagaggggctcctcacttctcagacggggtggctgccgggcggaggggctcctcacttctcagacagggcggttgctgggcggagggtctcctcacttctcagacggggcggctgggcagagacgctcctcacctcccagacggggtcacagccgggcagaggcgctcctcacatcccagacggggcggcggggcagaggcgctccccacatcccagacgatgggcggccgggcagagacgctcctcacttcccagatgggatggctgcagggaagaggcgctcctcacttcctagatgggatggcggccgggcagagacgctcctcactttccagactgggcagccaggcagaggggctcctcacgtcccagacgatgagcggccaggcagagacgctcctcacttcccagacggggtggcggccgggcagaggctgcaatatcggcactttgggaggccaaggcaggcggctgggagatggaggttgtagcgagctgagatcacgccactgcactccagcctgggcaacattgagcactgagtgaaccagactccgtctgcaatcccggcacctcgggaggccgaggctggcggatcactcacggttaggagctggagaccagcccggccaacacagcgaaaccccgtctccaccaaaaaagtacgaaaaccagtcaggcgtggtggtgcgcgcctgcaatcgcaggcactcggcaggctgaggcaggagaatcaggcagggaggttgcagtgagccgagatggcagcagtacagtccagcttcggctcggcatcagaggga

SEQ ID NO: 42460 - DNA, 962 bp, Artificial sequence
  DNA replication origin
agggaggtgggggggtcagccccccgcccggccagccaccccgtccgggaggtgaggggcgcctctgcccagccgcccctactgggaagtgaggagcccctctgcccggccagccgccccgtctgggagggaggtgggggggtcagccccccgcccggccagacgccccgtccgggagggaggtgggggggtcagccccccgcccggccagccgccccgtctgggagggaggtgggggggtcagccccccgcccggccagccgccctgtccgggagggaggtggggggggtcagccccccgcccggccagccgccccgtccgggaggtgaggggcgcctctgcccggccgcccctactaggaagtgaggcgcccctctgcccggccagccgctccgtccgggagggaggtggggggggtcagccccccgcccggccagccgccccgtccgggaggtgaggggcgcctctgcccggccgccccttctgggaagtgaggagcccctctgcccggccaccaccccgtctgggaggtgtacccaacagctcattgagaacaggccgggatgacaatggcggttttgtggaatagaaaggggggaaaggtggggaaaagattgagaaatcggatggttgccgtgtctgtgtagaaagaagtagacatgggagacttttcattttgttctgtactaaaataaattcttctgcattgggatcctgttgatcggtgaccttacccccaaccctgtgctctctgaaacatgtgctgtgtccactcagggttaaatggattaagggcggtgcaagatgtgctttgttaaacagatgcttgaaggcagcatgcttgttaagaatcatcaccactccctaatctcaagtacccagggacacaaacactgcggaaggccgcagggtcctctgcctaggaaaaccagagacctttgttcacttgtttatctgccga

SEQ ID NO: 42461 - DNA, 1344 bp, Artificial sequence
  DNA replication origin
agatgtatttaaagggcgaggccttaggattatgttcatccgatggtttgtgaaagttttccttgcctttgttcaggttgaccggtcttatgtgaatcctggggtactctagccccctcccttggagttgggaccgattccatctagatctgggattcactctgatcacctgcaacgccttctttccccgattcaacttccctagtttatcgcatctactcgcattagggaaggctggtaatggctctccttgggcactggggcagaattgtggcgagaaacacgtccagatagcatcaggcatgcatactgtatacaaatgggagcaagaagagagaggactatcgcggtgcgcagggtatttgagaggctggatgaggaggcgcggcgccgaggggcggcgctcaagcttacagtatttgagaagacctgagttaaggggacgggctccagtggggcgggggtggggagagggaggcacgcatgcgcaaggcttgaatggcgtcggggttggagggttggaaggtcgggaagtgaaggactcgcaggcatatttaacaacgcaaagttgctaggagttggtaccagcgtttgggaggtagaggtggcgctcatgcatatttgagacaacatctggatggttggggagaacggtaaggaggaagcggcgcgcatgcgtatttcagacggagtgccggggaggggaggcgctcagcattcgggtaattaaggttgcaaaatggcgaggggggaggtaagctgtctttgcttggccatcttgggctagcaggccttgcagagaactacctttttagctgagtgaagggatcaacctgagttggagttctcctatgctgtggccagatccactagaaattaacccagaatcttagcctctcagtggcctatcggtaagtgggtacaaaaatgaggaggcgatgatgactctgcaaaaggttgcggcagctggcggtgcgtaggaaatgcgtaaaaagggagcacttggagacaggccacatttgggcagtacgcattcggagggctctctggctttccgatcttgggtcgctgtacttggctctgaatacagtcaccccatcagagtagcaaaacactgtggttgtagtgtgagaatccaatgttaatgttggccgaaagctcttgattttcttccctgagaacataggcgtgaggatttggatgtgtttccaaatgcttgttactctttgccgtaaacctggaatttggacctatggctgcctgggactcatactgtcgtggagaaagattgaaaagtagttaatggcagtggtggtatgaaggtaacctgggctttcacccttt

SEQ ID NO: 42462 - DNA, 837 bp, Artificial sequence
  DNA replication origin
ggccgccaccccgtctgggaagtgaggagcgtctctgcctggccgcccatcgtctgggatgtgaggagcccctctgcccggccgcccagtctgggaagtgaggagcccctccgcccggcagccgccccgtctgagaagtgaggagcccctccacccggcagccgccccgtctgagaagtgaggagcccctccacccggcagccgccccatctgggaagtgaggagcgtctccgcccggcagccgccccgtccgggagggaggtggggggtcagcccccgcccggccagctgccccgtccgggagggaggtggggggtcagcccctgcccggccagccgccctgtccgggagggaggtagggggtcagcacccgcccggccagccgccccgtctgggaggtggggggcgcctctgcccggccgccccttctgggaagtgaggagcccctctgcccggccaccaccccgtctgggaggtgtacccaacagctcattgagaacgggccatgatgacgatggcggttttgtggaatagaaaagggtgaaaggtggggaaaagattgagaaatcagattgttgctgtgtctgtgtagaaggaggtagacatgggagacttcattttgttctgtactaagaaaaattcttctgccttgggatgctgttgaactatgaccttacccccaaccctgtgctctctgaaacatgtgctgtgtccactcagggttaaatggattaagggcagtgcaagatgtgctttgttaaacagatgcttgaaggcagcatgcttgttaagaatcatcaccactccctaatctcaagtacccagggacacaaacac

SEQ ID NO: 42463 - DNA, 996 bp, Artificial sequence
  DNA replication origin
ttctacacagacacagcaacaatctgatttctcaatcttttccccacctttcacccttttctattccacaaaaccgccatcgtcatcatggcccgttctcaatgagctgttgggtacacctcccagacggggtggtggccgggcagaggggctcctcacttcccagaaggggcggccgggcagaggcgccccccacctcccagacggggcggctggccgggcgggtgctgaccccctacctccctcccggacagggcggctggccgggcaggggctgaccccccacctccctcccggacggggcagctggccgggcgggggctgaccccccacctccctcccggacggggcggctgccgggcggagacgctcctcacttcccagatggggcggctgccgggtggaggggctcctcacttctcagacggggcggctgccgggtggaggggctcctcacttctcagacggggcggctgccgggcggaggggctcctcacttcccagactgggcggccgggcagaggggctcctcacatcccagacgatgggcggccaggcagagacgctcctcacttcccagacggggtggcggccgggcagaggctgcaatctcggcactttggggggccaaggcaggcggctgggaggtggaggttgtagctagccgagatcacgccactgcactccagcctgggcaacattgagcactgagtgaacgagactccgtctgcaatcccggcaccttgggaggccgaggctggcagatcacttgcggttaggagctggagaccagcccggccaacacagcgaaaccccgtctccaccaaaaaaatatgaaaaccagtcaggcgtggcggcgcgcgcctgcaatcgcagacactcggcaggctgagttaggagaatcaggcagggaggttgcagtaagccgagatggcagcagtacagtccagcttcggctcggcatcagagggagaccgtggaaagagggtagaggta

SEQ ID NO: 42464 - DNA, 1685 bp, Artificial sequence
  DNA replication origin
tttttgctcccataccctccttcctcacaagcagcccgcaactgaggtggcaccggggaccctaggacgacagctggcccgcgaggaaccccaccctgccctcaggagctcccatgtccctccttggacttgaggaggacgacctgaggggacagcctgggcctcggacagcgggtggacacaatcttctcgagcccgaggactcggccccccgcggtcctgcgcacccccgggagtctccccctgcccccgctcttcccggcaaatccctggcggcctgggaggggaggaggcggccatgcagcgaggcccgcccctccgggcagtcaatcagggctttgtttgcgccaacctggagcccggaggagcctcagagggccgggtctgggccgggccagggccgggccgggtctgggccgggccagggccgggccagggccgagtgtgggccaggagccgggccaggaagggagggaggtggcaccagtgggggccgggcccaggcccagtcgggagccgaagctcagttcaagctcctcccgacaatctgtcccggacttaggaggaacgagttggagtcgggtccagccgccagtttgggattgggctgccccgcccccgatatctcggctgggctggtccctcaggcctcggccgcggcttttcaggtgctggagactcagcggagctgcaagcggacggatgtcttcccagcacccaccgcccccttccgcccacctcaggcatgcagacatgggagtcccactgtatgtcgcagactgaggccccagccccactgagggtaagggagagtttgttccccaggaagcgcgccgggtcagggagaaggaaaggtgggggatctgtctttctggtggccgggcactcagcaggggtgcgcaggggtgcccagcctcagccctcagggcccgctcggcgataccgggaagctctgcctcccctaagggtctacgcgtctaatgcactaaacgtgaagtcgtggtgtcgttaccaagctactcggcttccacgagcgggcgggcgagtggcaagacctttctaccctgcatctcattaaccctcctgataagtgaaagactgcatagccagaggtgatgcagctccggggctgcgtggctgcgctagatgcctgtaaatacagtcattaagcacctgagggctggcggagctgggtggaaggatatagacgtcctgaggggcttgcgctgccatatgagaggaatcagccaaattcaaaaatcacagggccacgccactcagcagggaaggcattgcccgaacagagcacgtcccttattgccctaaggtttattattacctgcttttttgcacgaaaactgaggctcaacgaggtcaaggcatttattagcctaagatcatgggccaagtcaaggacaagctagaattcaaggcaggtctccatataacgagaagcttcatgctccctgtgtttcaccaaaagagtctaggatttgaggctccctgggaggagacagaggagggaaggcaggatctgactgcactatcacagtgggcttctggaagaggtggtgttcaagatgggcctggaattttttttttctttttgagacagtctcgctctgtagcccaggctggagtacagtggcgccatctcggctcactgcaacctccgatccctggtt

SEQ ID NO: 42465 - DNA, 1016 bp, Artificial sequence
  DNA replication origin
catccgtccgcttgcagctccgctgagtctccagcacctgaaaagccgcggccgaggcctgagggaccagcccagccgagatatcgggggcggggcagcccaatcccaaactggcggctggacccgactccaactcgttcctcctaagtccgggacagattgtcgggaggagcttgaactgagcttcggctcccgactgggcctgggcccggcccccactggtgccacctccctcccttcctggcccggctcctggcccacactcggccctggcccggccctggcccggcccagacccggcccggccctggcccggcccagacccggccctctgaggctcctccgggctccaggttggcgcaaacaaagccctgattgactgcccggaggggcgggcctcgctgcatggccgcctcctcccctcccaggccgccagggatttgccgggaagagcgggggcagggggagactcccgggggtgcgcaggaccgcggggggccgagtcctcgggctcgagaagattgtgtccacccgctgtccgaggcccaggctgtcccctcaggtcgtcctcctcaagtccaaggagggacatgggagctcctgagggcagggtggggttcctcgcgggccagctgtcgtcctagggtccccggtgccacctcagttgcgggctgcttgtgaggaaggagggtatgggagcaaaaaataggaggggtcttcccgaggctcggggttgatcagtgtcggttctagagcctgcggggaaaagagggcaggagaacaggatagtttgtgcttccttttttccattttaacttttcctctaacgggcatccgggcaagaacagggttcagtagtttgggaagggagctgggggaggcagtggcggctggagtaggtaggcgagtaaaaggaggaggaagggctggggagaagagcgaggctgtagcggctgcctgttgagggaggaagaggtggggggtgtggaggagggggaggagagagagatgacatg

SEQ ID NO: 42466 - DNA, 1294 bp, Artificial sequence
  DNA replication origin
agggctccggaccgagcgctgggggtggggcgccgtcgccgctacggcccctggtgtcggtggagcgagcagggaggtagagggcgggggatcgaggaggagctgagctcggacacgcagcagctgctgtctatccgtctggcttgctggcagttggcagggcccgaggctaggtcttcccgccccctttccctaggcgggaagggcggttgtcatgggtgggcggattcccgtctgaatagcaggggaagatgcatttccgtggcgcggctcccgggttattacccctcccaaatggggaaatggatggagacccgcggcgggggaggagccaaccccactctccgcgtccccgcccaaggtggccggaggccagcggcaggaccaggagcgaccgccagggccaaatccacccccaggcagtcccagagtgtggagtgggcatggggacctggcgggaaatagtgtcgattagcacccccaggcccggatgccagggcccagtcgtggcgaggtcagtgaagggtgggtgtgtggtgggaaaggagagtagaagtgcaaccttcttttcccctcccctggcattccagtgtattaacatttggcaggtgggctcggcgcggtctctgcggtgacgagagttggggaaagatgctcccaagtgtagtccccggtctccgcgggggggccacaggctctggcaggagtgagggaacgaggaggcccacgacaggtgctgtctgtccgctgctctgacaggcccgggcgggaatgcggcccggcccagtactgctctccccacccactcagctggacgcggactctgacacttgttagtgtgagcaatcgactaattttatccggctggggctcagcaggaaaccaatgccgaggcgcgggtagttcttccgggcgactctcgcccccgggaggatagtcgtggggagaggaagaggggttgggggtgggattcctgccgcctccatttcactgggggcgtggtggctcctgatctgcctcagagaggaccgaattttggcgctaaggtcggtactctctgggtactggcgcccagagaagaaaagggtatcttggaagttaggtagtacaaactctttgtgttcttctggtttttttctacttatgttcctttcattcctgaagttcccggattctagcagagtgtctgacacgcagcaggtctctagaaaagactgcttaaatgacttgaaaaccaggcatagaactttgcgcttggtgaccgctagagagagctgaaaggcaggaatcaaag

SEQ ID NO: 42467 - DNA, 958 bp, Artificial sequence
  DNA replication origin
cgtctgagaagtgaggagcccctccacccagcagccgccccgtctgagaagtgaggagcgtctccacccggctgccctatctgagaagtgaggagaccctctgcctggcaaccgccccgtctgagaagtgaggagcccctccgcccagcagccaccccgtctgggaagtgaggatcgtctctgcccggcagccaccccgtccgggagggaggtgggggtcagcccccgccaggccagccgccccgtccgggagggaggtgagggggtcagccccccgcccggccagccgcccggtccgggagagaggtgggggggtcagcccccctcccggccagccgccccgtccgggaggtgaggggcgcctctgcctggccgcccctactgggaagtgaggagctcctctgcccggccagccgccccgtccgggagggaggtggggggggtcagcccctcgcccggccagccaccccgtccgggaggtgaggggcgcctctgcccggccgccactactgggaagtgaggagcccctctgcccggccaccaccccgtctgggaggtgtacccaacagctcattgagaacgggccatgatgacagtggcagttttgtggaatagaaaggggggaaaggtggggaaaagattgagaaatgggatggttgccgggtctgtgtagaaagaagtagacatgggagacttttcattttgttctgtactaagaaaaattcttctgccttgggatcctgttgatctgtgaccttacccccaaccctgtgctctctgaaacatgtgctgtgtccactcagggttaaatggattaagggcggtgcaagatgtgctttgttaaacagatgcttgaaggcagcacgctcgttaagagtcatcaccactccctaatctcaagtacccagggacacaaacactgcggaaggcctcagggtcctctgcctaggaaaaccag

SEQ ID NO: 42468 - DNA, 1467 bp, Artificial sequence
  DNA replication origin
atcccatttctcaatcttttccccacctttcccccctttctattccacaaaactgccactgtcatcatggcccgttctcaatgagctgttgggtacacctcccagacggggtggtggccgggcagaggggctcctcacttcccagtagtggcggccgggcagaggcgcccctcacctcccggacggggtggctggccgggcgaggggctgaccccccccacctccctcccggacggggcggctggccgggcagaggagctcctcacttcccagtaggggcggccaggcagaggcgcccctcacctcccggacggggcggctggccgggaggggggctgacccccccacctctctcccggaccgggcggctggccgggcggggggctgaccccctcacctccctcccggacggggcggctggcctggcgggggctgacccccacctccctcccggacggggtggctgccgggcagagacgatcctcacttcccagacggggtggctgctgggcggaggggctcctcacttctcagacggggcggttgccaggcagagggtctcctcacttctcagatagggcagccgggtggagacgctcctcacttctcagacggggcggctgctgggtggaggggctcctcacttctcagacggggcggttgccaggcagagggtctcctcacttctcagatagggcagccgggtggagacgctcctcacttctcagacggggcggctgctgggtggaggggctcctcacttctcagacggggcggttgccaggcagagggtctcctcacttctcagatggggcagccaggcagaggcgctcctcgcatcccagacggggcggcggggcagaggcgctccccacatctcagacgatgggcggccgggcagagacgctcctcacttcctagatgggatggcggccgggaagaggcgctcctcacttcctagatgggctggcagccgggcagagacgctcctcactttccagactgggcagccaggcagaggggctcctcacttcccagacgatgggcggccgggcagagacgctcctcacttcccagacggggtggcggccaggcagaggctgcaatctcggcactttgggaggccaaggcaggcggctgggaggtagaggttgtagcgagccgagatcacgccactgcactccagcctgggcaccattgagcactgagtgaacgagactccgtctgcaatcccggcacctcgggaggccgaggctggcggatcactcgcggttaggagctggagaccagccctgccaacacagcaaaaccccatctccaccaaaaaaatacgaaaaccagtcaggcgtggtggcgcgcgcctgcaatcgcagacactcggcaggctgaggcaggagaatcaggcagggagattgcagtgagccgagatggcggcagtacagtccagcttccgctcggcatcagagg

SEQ ID NO: 42469 - DNA, 853 bp, Artificial sequence
  DNA replication origin
taaatggtccctcctgagttgctctccaatcgttttgctgtttcctgttgagttcccaggacgtctgaaggaaaatgaccacctaagagatttttcaatgacagccatcaggcagatctgttttccttcctggccatattcagcttcccttctttcctttattccccaaacgtcactccccaattgtctgccttcatccaacccttcaaaaaggacccaccttcctgggggcccaggcccttaagttaagagtaggtaaaggttgaatggttagatgcttggtggatgaaaccattcaaatattcttccccaaacttcagagtgcccctctccgcacacacaactgccctaaaaggcatgggagagtggtgtccggttgcgtgtctgccaggggaagaacgcaccactggcgtagtggactggaagggcagcaggaacgcgagtggggggcggggtgggaatggggaaggggggtgcgcgccctttatgacaggtggccgcgcagtgcgcgctcccgggcgcccgaggggagggaaggacagacggacagagttgggggggcacataaggaagggaccatagagagggtaaggagagcgggagggaaagggagagctgtggtggggaagaagggtagaggggggaaggcgtccagcaagaacagccgtgttggaggaaacaatggcaggggcaacagcgatggtggcagcagaggcggccccactctgggcacctttctgaatgggcagagacagctccgggagaagaggggaccaggcagtgcctgcagaggctctgagaaaagcggcagagggaggagaagagggaggaggaagagaaggaggaggaggag

SEQ ID NO: 42470 - DNA, 1645 bp, Artificial sequence
  DNA replication origin
acacacacactcacacacacacacacacacacacacacggtagcttaacagcaaatgcaggctttatgtccagcgtaaggcctacagaagtgggagaccagcttaatgccagtgccaccactgtttacaggcttggacaatttataggcctggatgggcagggtctgggggggcatgggctgctgcctggaaaatgttgataatgtgttcccatgatgaggctgttctggcccttgttctgttggaatgtggtgtttcttgcactttttcccagcagaatatgataagaggcaggctgtttctcatggcccaaatatccagtgggatgtttcactttgaccaaggtctgcaaaatggtggggggacttacaaaatggtgcagtttggactaatattcttgccttctattttaatataaaaggaagaggggtgttgttgattatctggttgcttcctgctgaataggggccctgtaatcagggtttgggtttttaagcagtgggtgtccgacttcagagttgttttcctggaggcactgatactggacttggtggagaaggatggtatcaatgtgtttctgggtggttgcctggacaagggagttcagccttcgggagataaagcaggatatgaagatgagtatacatgggccaattattagtattaggaggaggaagattagggaccctaagaaaggggcaacctgctatcccggtgctgagtgcagcagagatgtttagttctgctaacaggggaattaagtgtacaggctgttgggtatatgtggaggaggaggaaatagggattactaaaggaacctgaatggtttggttgttaggcaaaatgttaatgtttggagattaaaacaccagagtgtatgttcttaactcacctgccagcaggcaaagataagcttttttgccacacaggaaaaaagaccaggggttgacaggcaagagttgtaagtgaaggcagtgagccatgagaagatgggggttgaatcctggacaaactttttgtcccaacttttttgtttttctaggttgaatagctgttaacaagggtaacccctgtgagggcctgatagggaatgttggtgggggtggaggtgaaggttgtttggttttggagagagatagagaaatggatttttgttaactaatagccattgcggttctgatagggcagaaggatataggttgcagttgagagaactgtttgtgcattttttccaaggagagcccttgatttggctacacggagagctgcgccagcagagaggggaggggttagtaagaggtgtttaacagttggaagaaagaggggagtgtgactgatttaagaggcaatgtgtgaggttgacgaagggggtccagctctcagaggttgtgggtggggacttagagtatcccacggacaaagaggacacaaggagaaaaaggagatttgagtaggagtgaaattttggaaggtgtcctgcagccatagatcctggattaatgtgaagaatgtgtgtggactgcctagggatgtggggagggaataccaggaaagatctgaaacaaggtataagagaagatttgggccgggcgcggtggctcacgcctgtaatcccagcactttgggaggccgaggcgggtggatc

SEQ ID NO: 42471 - DNA, 1140 bp, Artificial sequence
  DNA replication origin
ggccttgttgctgtctctgcagaagttgcctgataatcccaattggggttagttttggggacagccaggatccctattgggttatgagcaacatcttgttggtagaggttgtttgcatgggcctgggcattcatccagatgtgtcccctgtcctccagggtgagggtggaggagaggattacatatatgtcatgccaggtaaggttataagattgagtgacatacagaaattccttgtggaaagatgtgagatccttggaaaaggagccaattatctttttaagatgggagaggatggctagggagaagggaacatgagctcagattatgcctttgacccttgccacctcctgcaaggaaaggactttggaaggcctttggatgtgtgcctggttttcaggaaaagggggttgggtgtgagagctgatttgcagtggagaaggaaagggggacggagggcaaaagtaagggggtggaggagccgcagccaaaggagaataaggaggggatggtggtgggagggggaccgagggagggggattgtttgccaggttgaaattagaggagggattgtccaaaggaggaggcatttttgcgggttttttgttgaggaggaggatttgaaaaggtgaacatgattggtagagagagagagctgcaaacagagataagcaaagcatctcacgtcatttaccattgcgttggaggaagttttttagattatgttgaatttggaaattgaatgttttgttttttggccattgactattgttgtccaggttacactagggctaggcaatataagagaggaaagtaaggcgttctgttttaatggagtccaccaagccctgggcttggaggatccagatgagacatttgggaggagtgaataaggtattcagttttaatggagtccactaagccctgggctgggaggttccagatgagacacccgagagtggtgtcttgaggaggtttgaggagacttgccccatactggtggctggaagggtgagaaatttagaagaggggagtgagtaccccagaggggagtgaatactccaaaggaaagtgagtaccctggagaggagtgagtacccgaattcctccgggagaaggaacataggatagctgagctgg

SEQ ID NO: 42472 - DNA, 993 bp, Artificial sequence
  DNA replication origin
ggttgtaagcccttgggtttgcagggtaagggctaggcctaggtaggtaactgagggggtgcatattagtgtttttctaggggagaatcaacaccgcattctgccaggaagtataaaagagagatagtacaggagttccagtattttgagagggactacacaggagcagatcatcaacatattgaataagagtggacggttttagggataaggcacagaagtcatgagcaaaggcctgtccaaaaaggtgagggctgtctctgaaaccttgaggtagtatgcaccaagtgagctggtgtgaaaagtgggtgttggggtcttcccacataaaggcaaagaggtcttgagaatcaggatgtaaagaaattatgaaaaaggcatcttttaggtctaggacagaaaaatgggtagtattggagggagtcttggaaagtaaagtgtatgggttaggaactactggacatactgggagtacagcttggttaatgagcctgaggtcctagactaagtgatgttacatctggctttttaagaggtagaattggtgtgttaaaatgggagtttgttgggcagagtaggtgactggcggggaggtgagaaatgataggctttaggcctatgagagctgcttgggggattggatactgctcctgtgataggaactgggtggggtttttaaggggatgaggacagggatgtggtgttttgttattagggtgtggaagtatcccaaacagtggggttaactatggatgggggataaggaaaggttgcatgttttagggtgggaggtcgaaggagtagaagaaaactggaagttccagaggggtctgtgtggatgcattgggtactatggggaatgtggaaatggagagtagactggagttttgaaaggatgtctctacctaggagaggagttgggcatgagggcaggagtaagaaagagtaagtgaaggaaaagatgcaaaaggagcagaagagtggaggggtggc

SEQ ID NO: 42473 - DNA, 918 bp, Artificial sequence
  DNA replication origin
ggagggaggtgggggggtcagcccccccgcccggccagccgccccgtccgggaggtgaggggcgcctctgcccggccgcccctactgggaagtgaggagcccctctgcccggccagccaccccgtccgggaggcagatgggggtgtcagccccccgcccggccagccgccccgtccgggagggaggtggggggggtcagcccccctgcccggccagccgccccgtccgggaggtgaggggagcctctgcccggccgcccctactgggaagtgaggagcccctctgcccggccagccgccccgtccgggagggaggtgggggggtcggccccccgcccggccagccgccccatccgggagggaggtggggggggtcagccccccctgcctggacagccgccccgtccgggaggtgaggggcgcctctgcccggccgcccctactgggaagtgaggagcccctctgtccggccaccaccccgtctgggaggtgtgcccaacagctcattgagaacgggccaggatgacaatggcggctttgtggaatagaaaggcgggaaaggtggggaaaagattgagaaatcggatggttgccgtgtctgtgtagaaagaagtagacatgggagacttttcattttgttctgcactaagaaaaattcccctgccttgggatcctgttgatctgtgaccttacccccaaccctgtgctctctgaaacatgtgctgtgtccactcagggttaaatggattaagggcggtgcaagatgtgctttgttaaacagatgcttgaaggcagcatgctcgttaagagtcatcaccaatccctaatctcaagtaatcagggacacaaacactgcggaaggccgcagggtcctctgcctaggaaaaccagagtcctttgttcacttgtttatctgctg

SEQ ID NO: 42474 - DNA, 1116 bp, Artificial sequence
  DNA replication origin
gccgggcagaggcgcccctcacctcccggacggggcggctggccgggcgggggggctgacccccccacctccctcccggacggggtggctggccgggctgaggggctcctcacttcccagtaggggcggccgggcagaggtgcccctcacctcccggacggggcggctggctgggcggggggctgacccccccacctccctcccggatggggcggctggccgggcggggggctgacccccccccacctccctcccggacggggtggctgccgggcggagacgctcctcacttcccagatggggtggctgccgggcggagaggctcctcacttctcagacggggcagctgccgggcggaggggctcctcacttctcagacgaggtggttgccaggcagagggtctcctcacttctcagatggggcggccgggcagagacgctcctcacctcccaggtggggtctcggccgggcagaggcgctcctcacatcccagatggggcggcggggcagaggcgctccccacatctcagacgatgggcggctgggcagagacgctcctcacttcctagatgtgatggcggctgggaagaggcgctcctcacttcctagatgggatggcggccgggcggagacgctccccaccttccagactgggcagccaggcagaggggctcctcacatcccagacgatgggcggccaggcagagacactcctcacttcccagacggggtggcagccgggcagaggctgcaatctcggcactttgggaggccaaggcaggcggctgggaggtgtaggttgtagtgagccgagatcacgccactgcactccagcctgggcaccattgagcactgagtgaacgagactccgtctgcaatcccggcacctcgggaggccgaggttggcggatcactcgtggttaggggctggagaccggcccggccaacacagcgaaaccccgtctccaccaaaaccagtcaggcgtggtggcgtgagcctgcaatcgcaggcactgggcaggctgaggcaggagaatcaggcagggaggttgcagtgagccgagatggcagcagtacagtccagcttcggctccgcatgagagggagaccgtggg

SEQ ID NO: 42475 - DNA, 1216 bp, Artificial sequence
  DNA replication origin
tacagaccaaaatgaaaagtctcccatgtctacttctttctacacagacacagcaaccatccgatttctcaatcttttccccacctttcccccctttctattccacaaaaccgccattgtcgtcatggcccgttctcaatgagctgttgggtacacctcccagacggggtggtggccgggcagaggggctcctcacttcccagtaggggtggccgggcagaggcacccctcacctcccagacggggtggctggccgggtggggggctgacccccccacctccctcccagatggggcagctggccgggcggggggctgaccacccccacctccctcccagacagggcagctggccgggcggggggctgacccccccacctccctcccagacggggcggctggccgggcggggggctgaccccccccacctccctcccggactgggcagctgccaggcggagaagctcctcacttcccagacggggtggctgccaggcggaggggctcctcacttctcagacggggcagctgccgggcggaggggctcctcacttctcagacggggcagttgccaggcagagggtctcctcacttctcagacggggcatccgggcagaggcgctcctcacatcccagacggggtggcggggcagagaccctcctcacttcctagatgggatggcggccaggaagaggcgctcctcacttcctagatgggatggcggccgggcagagacgctcctcactttccagactgggcagccaggcagaggggctcctcacatcccagacgatgggcagccaggcggagacgctcctcacttctcaaatggggtggtgccgggcagaggctgcaatctcggtactttgggaggccaaggcaggcggctgggaggtggaggttgtagcgagccgagatcacgccactgcactccagcctgggcaccactgagcactgagtgaacgagactccgtctgcaatcccggcacctcgggaggccgaggctggcggatcactcacggttaggagctggagaccagcccggccaacacagtgaaaccccgtctccaccaaaaaaatatgaaaaccagtcaggcgtggcggcttgcctgcaatcgcaggcactcggcaggctgaggcaggagaatcaggcagggaggctgcagtgagccgagatggcagcagtacagtccagcttcggctcggcatcagaggg

SEQ ID NO: 42476 - DNA, 902 bp, Artificial sequence
  DNA replication origin
ctctgccccgccaccccgtctgggatgtgaggagcgcctctgcccggatgccccgtctgagaagtgaggagaccctctgcctggcaactgccccgtctgagaagtgaggagcccctccgcccggcagctgccccgtctgagaagtgaggagcccctccgcctggcagccaccccgtctgggaagtgaggagcttctccgcctggcagctgcccagtccgggagggaggtggggggggtcagccccccgcccggccagccgccccgtctgggagggaggtgggggggtcagccccccgcccggccagctgccctgtctgggagggaggtgggggtggtcagccccccgcccggccagctgccccatctgggagggaggtgggggggtcagccccccacccggccagccaccccgtctgggaggtgaggggtgcctctgcccggccacccctactgggaagtgaggagcccctctgcccggccaccaccccgtctgggaggtgtacccaacagctcattgagaacgggccatgacgacaatggcggttttgtggaatagaaaggggggaaaggtggggaaaagattgagaaatcggatggttgctgtgtctgtgtagaaagaagtagacatgggagacttttcattttggtctgtactaagaaaaattcttctgccttgggatcctgttgatctgtgaccttacccccaaccctgtgctctctgaaacatgtgctgtgtccactcagggttaaatgggttaagggtggtgcaagatgtgctttgttaaacagatgcttgaaggcagcatgctccttaagagtcatcaccactccctaatctcaagtacccagggacacaaacactgcagaaggccgcagggtcctctgcctaggaaaaccagag

SEQ ID NO: 42477 - DNA, 1543 bp, Artificial sequence
  DNA replication origin
tcccaagagcctattactgatttatgttgaccttgtaggttactgggctcagcttaggcacaaaatcagaaaaatatttggagctgctgggaggtgtgctcataatttttccactttcgctacccccaccccacatctctccatcatttcatgatctttttttttggttacatatcggcaatgagttactctggtatctttatgccatttcaggaagcctctgaggccagtgtgggagtcctattccttaagaagaggaacaaaaggggactgcaaaatcacaagcaatgaaagggaaaggagccaagttaacactccctctcctcccactccaccttatcacccttttgaggacctgctgcaagtttatacagacacctgcacccctccattacccctcccaacctactgtactctagctatgtttgagtgcatttttccaagataccatagacctcattagggtttctgcctgttcccagcaaggaagaccaaccctgcccctaagttgtttgctaggcttggccttaccccgcactggcccctatgttcccctttttgctgtgcactccagatgcagctctagcaaggcatggagaataggaggatggagaggtttggggggtttggggcagatgttggcaagaaggagggtgggaaaaagaagggaagggtgtcatgtctgagtgtaggcagaacatcttactggcttggggaaaaggtgtctttcttggattatagggtccttgggaggaagcagaggacattggaggatgcggaggggcaaaggtagctgtcacagaaccccccatgatgtcttagtatagaattggaaattgaaaataaaaatggcaaattaccgaggagcgaacacatttgcttagaaacctaatgatctttgtctcagatcaaggcttatattaattgtgtaattagttctatatgtgagacaggcagctgtgttgaacagtttgtatagtggcaggcaaacagacaatcctggatggaggttgaacgtttcctgctttgggcccaagagacaactgtttctgggactgggagtgggcccaggacggtttcctcactgaggcaaggagtccagaggtagtttccggcaaaagctgccccaggacttgtgcccttacacggtggacaccgcgaggttttcctagattcccaattcgtgccaggctgcctggattgtctcctaccctggacagagcgaccccaaggcaggcggaggccacagctgcctggtacccacgggccaaaagcgatttgtgtgccggccgaccgcctcacatgcccacggcccatgcaggatcctgttccaggaaatcagctgccacagccctgctgccttcgaggctcggcccgcgctgcagccacggtcccggcctcctaggcgagagctcccacccctgtctcagctccacctgctttcattcaaggcttagagtccagctcccagaactacccccttgctccctggggagatactgtggagcggcgaaaggagaggccccaccgcaaggcgcccccg

SEQ ID NO: 42478 - DNA, 853 bp, Artificial sequence
  DNA replication origin
agtgaggagcgccttttcccggccgccatcccatctaggaagtgaggagcgtctctgcccggccgctcatcgtctgagatgtggggagcgcctctgccccgccgccccgtctgggatgtgaggagcgcctctgcccggctgcgaccccgtctgggaggtgaggagcgtctctgcctggccgccccgtctgagaagtgaggagaccctctgcgtggcaaccgcctcgtctgagaattgaggagcccctccgcctggcagccgccccgtctgagaagtgaggagcccctctgccccgctgccaccccgtctgggaagtgaggagcgtctccgcccggcagccaccccgtccaggagggaggtgggggggtcagccccccgcccggccagccgccccgtcggggaggtgaggggcgcctctgcccggccgcccctgctgggaagtgaggagcccctctgcccggccaccaccccgtctgggaggtgtgcccagcggctcattgagaacgggccatgatgacagtggcggttttgtggaatagaaaggggggaaaggtggggaaaagattgagaaatcggatggttgccgtgtctgtgtagaaagaggtagacatgggagacttcattttgttctgtactaagaaaaattcttctgccttgggatcctgttgatctgtgaccttacccccaaccctgtgctctctgaaacatgtgctgtgtccactcagggttaaatggattaagggcggtgcaagatgtgctttgttaaacagatgcttgaaggcagcatgctcgttaagaatcatcaccactccctaatctcaagtacccagggacacaaacactgtggaaggcc

SEQ ID NO: 42479 - DNA, 1237 bp, Artificial sequence
  DNA replication origin
gcacatcttgcaccgcccttaatccatttaaccctgagtggacacagcacatgtttcagagagcacagggttgggggtaaggtcacagatcaacaggatcccaaggcagaagaatttttcttagtacagaacaaaatgaagtctcccatgtctacctctttctacacagacacggcaaccatccgatttctcaatcttttccccacctttcccccctttctattccacaaaaccgccactgtcatcatggcccgttctcaatgagccgctgggcacacctcccagacggggtggtggccgggcagaggggctcctcacttcccagcaggggcggccgggcagaggcgcccctcacctccccgacggggcggctggccgggcggggggctgacccccccacctccctcctggacggggtggctgccgggcggagacgctcctcacttcccagacggggtggcagcggggcagaggggctcctcacttctcagacggggcggctgccaggcggaggggctcctcaattctcagacgaggcggttgccacgcagagggtctcctcacttctcagacggggcggccaggcagagacgctcctcacctcccagacggggtcgcagccgggcagaggcgctcctcacatcccagacggggcggcggggcagaggcgctccccacatctcagacgatgagcggccgggcagagacgctcctcacttcctagatgggatggcggccgggaaaaggcgctcctcacttcctagatgggatggcggccgggcagagacgctcctcactttccagactgggcagccaggcagaggggctcctcacatcccagacgatgggcggccaggcagagacgctcctcacttcccagacggggtggcggccgggcagaggctgcaatctcggcactttgggaggccaaggcaggtggctgggaggtgaggttgtagcgagccgagatcacgccactgcactccagcctgggcaccattgagcactgagtgaacgagactccgtctgcaatcccggcacctcgggaggccgaggctggcggatcactcgcggttaggagctggagaccagcccggccaacacagcgaaaccccatctccaccaaaaaaatacgaaaaccagtcaggtgtggtggcgcgcgcctgcaatcgcaggcactcggcaggctgaggcaggagaatcaggcagggaggttgcagtgagccgagatggcagc

SEQ ID NO: 42480 - DNA, 1179 bp, Artificial sequence
  DNA replication origin
gtcgctttgtttccgcggctcctgcggcggtggcagtggtagcggcctttgagctgtggggaggttccagcagcagctacagtgacgactaagactccagtgcatttctatcgtaaccgggcgcgggggagcgcagatcggcgcccagcaatcacagaagccgacaaggcgttcaagcgaaaacatgaccgctgagcccatgaggtaaaacgcaaccccgtctcatgggccccagcggtctgggcccaggcaccgtctgagtcgggtgtttgggaaggcgttcgcttggtgggttaggcctgtgtgttgcttagccgaaagaggcatcgttttctctttaggtgagaagggtttcggggtatcggcgcaaggctccgacgggggtgggggtggggatggggtggggggaggtggggggggcgcggcctagggtatggggcgcttcttgcaatctcccctaaacggtgacgcttggtcgggctcctctgtttattctttggtgcctgtgggattgagacctcgaagtcggaggcggtctttggtatcccggtcatttttgctaatctttgggcctagaaactgcgtggggaagaagcggggggagggtgagaagagggggaggggtgggcgggcgcgaggatgtgagatcccaggacgacttagaggcgtttaggttgctggagatgggaagcacccgggccctgcgggattttttttctgcagccccaggagacaagcctttttttgattgggttgtggtgcagttccaggtatttaggtatcttttctactccatatcctgaaggatatccttgggtttatttctaggcgaggggggacttaacacagggttttgcttccagaggaccctagtatactactttttgtgatgtccagccttaatgggacctcaagtgtttccccactttctgggcaaatttcgaggagtaattaggccctatctttatttacttatttattccatgaaggatgaagggcaggttaacgtgggctgatgcgaagtaagatttattgcaagggaaaatgcctggcaggcctcctcttaaccaatcaagcacgtttattaggttgaagctgtttttctgtgtgcttctgatttgcctcttgacgggtctgaaaatttgggtagtcaatatgaaatgtatacacttttaccca

SEQ ID NO: 42481 - DNA, 949 bp, Artificial sequence
  DNA replication origin
ccgtccaggagggaggtgggggggtcagccccccgctcagccagccgccccgtccgggagggaggtgggggggtcagccccccgcccagccagccgcccggtccgggaggtgaggggcgcctctgcccggccgcccctactgggaagtgaggagcccctctgcccggccagccgccccgtccgggagggaggtggggggggtcagccccccgcccggccagccgccccgtccaggagggaggtggggggggtcagccccccacccggccagccgccccgtccgggaggtgaggggtgcctctgcccagccgcccctactgggaagtgaggagcccctctgcctggccagccaccccgtccgggagggaggtgggcgggtcagccccccgcccggccagccgccccgtccgggaggtgaggggcgcctctgcccggccgcccctactgggatgtgaggagcccctctgcccggccaccaccccctctgggaggtgtacccaacagctcattgagaacgggccgggatgacaatggcggttttgtggaatagaaagggaggaaaggtggggaaaagattgagaaatcggatggttgccgtgtctgtgtagaaagaagtagacatgggagacttttcattttgttccgtactaagaaaaattcttctgccttgggatcctgctcatcggtgaccttacccccaaccctgtgctctctgaaacatgtgctgtgtccactcagagttgaatggattaagggcggtgcaagatgtgctttgttaaacagatgcttgaaggcagcatgctcgttaacaatcatcaccactccctaatctcaagtacccagggacacaaacactgaggaaggccacagggtcctctgcctaggaaaaccagagacctttgttcacttgcttatctgctgaccttccctccactattgtcctatgacc

SEQ ID NO: 42482 - DNA, 1083 bp, Artificial sequence
  DNA replication origin
cccacctccctcctggacggggcggctggccgggcggggggctgaccccccccacctccctcccggacggggcggctggccgggcagaggggctcctcacttcccagtaggggcggccgggcagaggcgcccctcacctcccggaccgggcggctggctgggcggggggctgacccccccacctccctcccggacggggcggctggctgagcggggggctgacccccccacctccctcctggacggggcggctggcctggcgggggctgacccccacctccctcccggatggggtggctgccgggcggagacgctcctcacttcccagacggggtggctgctgggcggaggggctcctcacttctcagatggggcagttgccgggcggagggtctcctcacttctcagatggggcggccgggcagagacgctcctcacctcccagacggggtcgcggccgggcagaggcgctcctcacatcccagacggggcggcggggcagaggtgctccccacatctcagacgatgggcggccgggcagagacgctcctcacttcctagatgggatggcggccgggaagaggcgctcctcacttcctagatgggatggcggccgggcagagacgctcctcactttccagactgggcagccaggcagagcggctcctcacgtcccagacgatgggcggccgggcagagacactcctcacttcccagacggggtggcggccgggcagaggctgcaatctcggcactttgggaggccaaggcaggcggctgggaggtggaggttgtagcgagccgcgatcacgccactgcactccagcctgggcaccattgagcactgagtgaaccagactccgtctgcaaacccggcacctcgggaggccgaggctggcagatcactcgcggttaggagctggagaccagcccggccaacacagcgaaaccccgtctccacgaaaaaagtatgaaaaccagtcaggtgtggcagcgcgcgcctgcaatcgcaggcactcggcaggctgaggcaggagaatcaggcagggaggttgcagtgagccgagatggcagcagtacagt

SEQ ID NO: 42483 - DNA, 1368 bp, Artificial sequence
  DNA replication origin
atttttttttttccaaggcagaagaatttttcttagtacagaacaaaatgaaaagtctcccatgtctacttctttccacacagacacggcaaccatctgatttctcaatccgttccccacctttcccccctttctactccacaaaaccaccaccgtcatcatggcccgttctccatgagctgctgagcacacctcccagacggggtggtggtcgggcagaggggctcctcacttcccagtaggggtggccgggcagaggcgcccctcacctcccggacggggtggctggccgggcggggggctgacccccccacctccctcccggacggggcggctggccgggtggggggctgaccccccaccttcctcccggacagggcggctggccaggcggggcgctgatccccccacctccctcctggacggggcggctggcctggcggggggctgacccccacctccctcccggatggggtggttgctgggcggagacgctcctcacttcccagacggggtggctgccgggcagagggactcctcacttctcagacagggtggttgtcgggcagagggtctcctcacttctcagacggggcggctgggcagaggcgctcctcacatcccagacggggtggtggggcagaggcgctccccacatctcagacgatgggcggccgggcagagatgctcctcacttcctagatgggatggcggctgggaagaggcgctcctcacttcctagatgggatggcggccgggcagagacgctcctcactttccagactgggcagccaggcagaggggctcctcacatcccagacaatgggtggccgggcagagacgctcctcacttcccagacggggtggtggccgggcagaggctgcaatctcggcactttgggaggccaaggcaggcggctgggaggtggaggttgtagcaagcagagaccatgccactgcactccagcctgggcaccattgagcactgagtgaatgagactccgtctgcaatcctggcaccttgggaggccgaggctggcggatcactcgcggttaggagctggagaccagcccggccaacacagcaacaccctgtctccaccaaaaaaatacgaaaaccagtcaggcatggaggcgtgcgcctgcaattgcaggcactcggcaggctgaggcaggagaatcaggcagggaggttgcagcgagccgagatggcagcagtacagtccagcctcagctcggcatcagagggagaccgtggaaagagagggagagggagaccgtggggagagggagagggagacggagagtgagagcgagttcctgtcatttttaagaacaggttaagtagccacttggcagaaagcccta

SEQ ID NO: 42484 - DNA, 1043 bp, Artificial sequence
  DNA replication origin
tttcagagagcagcgggttgggggtaaggtcatagatcaacagcatcccaaggcagaagaatttttcttagtacagaacaaaatggagtctcctatgtctacttctttctacacagacagagcaacaatctgatttctctatcttttccccacatttcccccttttctattcgacaaaaccgccaacctcatcatggcccgttctcaatgagctgttgggtacacctcccagacggggtggcagccgggcagaggggctcctcacttcccagaaggggcggccgggcagaggtgccccccacctccctccctgacggggtggctggccagtcgggggctgccccccacctccctcccggacggggcagctggccgggtgggggctgccccccacctcccggacggggcggctgctgggcggagatgctcctcacatcccagacagggcggcggggcagaggcgctccccacatctcagacaatgggcggctgggcagagatgctcctcacttcctagacgggatggcggccaggaagaggcgctcctcacttcccagactgggcagccgggcagaggggctcctcacatcccagaagatgggcggccaggcagagacgctcctcacttcccagacggggtggcggccgggcagaggctgcaatcttggcactttgggaggccaaggcaggcagctgggaggtggaggttgtagcgagccgagatcacaccactgcactccagcctgggcaacattgagcactgagtgaacgagactccatctgcaatcccggcacctcgggaggccgaggctggcagatcactcacggttaggagctggagaccagcctggccaacacagtgaaaccctgtctccaccaaaaaaatatgaaaaccagtcaggcgtggcagcgcgcgcctgcaatcgcaggcactcagcaggctgaggcaggagaatcaggcagggaggttgcagtgagcagagatggcggcagtacagtccagctttggctcggcatcagagggagactgtggaaagagaggg

SEQ ID NO: 42485 - DNA, 865 bp, Artificial sequence
  DNA replication origin
tgggatgtgaggagcgcctctgcccagctgcgaccccgtctgggaggtgaggagcgtctctgcccggccgccccgtctgagaagtgaggagaccctccacctggcaaccgccccatctgagaagtgaggagcccctccgcccggcagccaccctgtctgagaagtgaggagcccctccgcccggcaaccaccccgtctgggaagtgaggagcatctccgcccggcagccaccccgtctgggagggaggtgggggtcagccccccccccggccagacgccccgtccgggaggtgaggggcgcctctgcccagccgcccctactgggaagtgaggagcccctctgcccggccagccgccccgtctgggagggaggtgggggggtcagccccccgcccggccagccaccccgtctgggaggtgaggggcgcctctgcccggccgcccctactgggaagtgaggagcccctctgcccggccaccaccccgtctgggaggtgtacccaacagctcattgagaacgggccatgatgacaatggtggttttgtggaatagaaagaggggaaaggcggggaaaagattgagaaatcggatggttgccgtgtctgtgtagaaagaggtagacatgggagacttttcgttttgttctgtactaagaaaaattcttctgccttgtgatcctgttgatctctgaccttaccctcaaccctgtgccctctgaaacatgtgctgtgtccactcagggttaaatggattaagggcggtgcaagatgtgctttgttaaacagatgcttgaaggcagcatgctcgttaagagtcatcaccactccctaatctcaaatacccagggacacaaacactgtggaa

SEQ ID NO: 42486 - DNA, 1301 bp, Artificial sequence
  DNA replication origin
gttgagggtaaggtcagagatcaacaggatcacaaggcagaagaatttttcttagtacagaacaaaacgaaaagtctcccatgtctacctctttctacacagacacggcaaccatccgatttctcaatcttttccccgcctttcccctctttctattccacaaaaccaccattgtcatcatggcccgttctcaatgagctgttgggtacacctcccagacggggtggtggccgggcagaggggctcctcacttcccagtaggggcggccgggcagaggcgcccctcacctcccagacggggtggctggccgggcggggggctgacccccccacctccctcccagacggggcggctggccgggcagaggggctcctcacttcccagtaggggcggctgggcagaggcgcccctcacctcccggacggggcgtctggccggggggggggctgacccccacctccctcccagacggggtggctgccgggcggagatgctcctcacttcccagacggggtggttgccgggcggaggggctcctcacttctcagacagggtggctgccgggcggaggggctcctcacttctcagatggggcggttgccaggtggagggtctcctcacttctcagacggggcggccgggcagagacgctcctcacctcccagacggggtcgcagctgggcagaggcgctcctcacatcccagacggggtggcggggcagaggcgctccccacatctcagacgatgggcggccgggcagagatgctcctcacttcctagatgggatggcggccgggaagaggcgctcctcacttcctagatgggatggcggccgggcagagacgctcctcactttccagactgggcagccaggcagaggggctcctcacgtcccagacgatgggcggccaggcagagacgctcctcacttcccagacggggtggtggccgggcagaggctgcactctcggcactttgggaggccaaggcaggtggctgggaggtggaggttgtagcaagccgagatcacgccactgcactccagcctgggcaccatggagcactgagtgaaccagctccgtctgcaatcccggcacctcgggaggccgaggctggcggatcactcgcggttaggagctggagaccatcccagccaacacagcgaaaccccgtctccaccaaaaaaatacgaaaacaagtcaggcgtggcggcgcgcgcctgcaatcgcaggcactcggcaggctgaggcaggagaatcaggcagggaggttgcagtgagccgagatggcagcagtaca

SEQ ID NO: 42487 - DNA, 1619 bp, Artificial sequence
  DNA replication origin
ggtacacctcccagacggggtggtggccgggcagaggggctcctcctttcccagtaggggcggccgggcagaggcgcccctcacctcccagacaaggcagctggccgggtggggggctgacccctccacctccctcccggacggggtggctggccaggcggggggctgacccccccacctccctcctggacggggcggctggccgggcgggggtgctgacccccccacctccctcccagaaggggcggctggccgggcggggggctgacccccccacctccctcccagacggggcggctggccgggcagaggggctcctcacttcccagtaggggcggccgggcagaggcgcccctcacctcccggacagggtggctggccgggcggggggctgacgcccccacctccctcccggacggggtggctggccgggtggggggctgacccccccacctccctccgggatggggtggctgctgggtggagacactcctcacttcccagacggggcagctgccgggctgaggggctcctcacttctcagacggggcggctgccgggtggaggggctcctcacttctcagatggggcggttgccaggcggagggtctcctcgcttctcagacggggcggccgggcagagatgctcctcacctcccagacggggtcgcggccggttagaggcgctcctcacatcccagacggggcggcggggcaaaggcgctccccacatctcagatgatgggcggccgggcagagacgctcctcacttcctagatgggatggcggctgggaagaggcgctcctcacttcctagatgggatggcagtggggcagagatgctcctcactttccagactgggcagccaggcagaggggctcctcatgtcccagacaatgggcggccaggcagagacgctcctcacttcccagatggggtggcagccgggcagaggctgcaatctcggcactttgggaggccaaggcaggcgggtgggaggtggaggttgtagccagccgagatcacgccactgcgctccagcctgggcaccatggagcactgagtgaaccagactccgtctgcaatcccggcaattcgggaggctgaggctggcagatcactcgctgttaggagctggagaccagcccggccaacacagcgaaaccccgtctccaccaaaaaaatacgaaaaccagtcaggcgtggcggcgcgcgcctgcaatcacaggcactcggcaggctgaggcaggagaatcaggcagggaggttgcagtgagccgagatggcagcagtacagtccagctttggcttggcatcagagggagaccgtggaaagaggggagagggagagggagagggagagggagcgggagcgatacagaagtttttctctcctggttcagtcttgacaaagtgtatgcttccaggaatttatccttctcttctagggtttctagtttttgtgcatagaggtttcatagtagtttctgatggttatttttgtttctgtggtgtcagtggcaatactccctttgtcatttctaattgtgtttatttggatcttctctcttttattctttattagcctagctagtggcctatttgtcttcctgccccc

SEQ ID NO: 42488 - DNA, 961 bp, Artificial sequence
  DNA replication origin
ggagcccctcagcccggcagctgccccgtctgggaagtgaggagtgtctccacccagcagccaccccatcccggagggaggtgggggggtcagccccccacccggccagccaccccgtccgggagggaggtgggggcgtcagccccccgcccggccagccaccctgtccgggaggtgaggggcgcctctgcccggccgcccctactgggaagtgaggagcccctctgcccggccagccgccccgtctgggagggaggtgggggggtcagccccccgcccggccagccgccccttctgggagggaggtgggggggtcagcacccccgcccggccagccgccccgtccaggagggaggtgggggggtcagccccccgcctggccagccaccccgtccgggagggaggtggaggggtcagccccccacccggccagctgccttgtctgggaggtgaggggcgcctctgcccggccgcccctactgggaaaggaggagcccctctgcccggccaccaccccgtctgggaggtgtacccaacagctcattgagaacgggccatgatgacaatggtggttttgtggaatagaaagaggggaaaggcggggaaaagattgagaaatcggatggttgccgtgtctgtgtagaaagaggtagacatgggagacttttcattttgttctgtactaagaaaaattcttctgccttgtgatcctgttgatctgtgaccttacccccaacgctgtgccctctgaaacatgtgctgtgtccactcagggttaaatggattaagggcggtgcaagatgtgctttgttaaacagatgcttgaaggcagcacgctcgttaagagtcatcaccactccctaatctcaagtacccagggacacaaacactgcggaaggccgcagggtcctctgcctaggaaaaccagagacctttgttcacttgtttatctgctgacctt

SEQ ID NO: 42489 - DNA, 1746 bp, Artificial sequence
  DNA replication origin
gtttcagagagcacagggttggggttaaggtcatagatcaacaggatcccaaggcagaagaatttttcttagtacagaacaaaacgaaaagtctcccatgtctacttctttctacacagacacagcaaccatccgatttctcaatcttttccccacctttcccccttttctattccacaaaaccgccattgtcatcatggcccgttctcaatgagctgttgggtacacctcccagacggggtggtggccgggcagaggggctcctcacttcccagtaggggcggccgggcagaggtgcccctcacctcccggacggggcggctggccgggcagggggctgacccccccaactccctcccagacggggcagctggccgggcggggggctggcccccccacctccctcccggacggggtggctgccgggcggagacgctcctcacttcccagacggggtgggtgccgggcggaggagctcctcacttctcagacggggcggctgccgggcggaggggctcctcacttctcagacggggcagttgccaggcggagggtctcctcacttctcagacggggcggctgggcagagacgctcctcacctcccagacggggtcgcggccgggcagagatgctcctcacatcccagacggggcggcagggcagaggcgctccccacatctcagacgatgggcggccgggaagaggcgctcctcacttcctagatgggatggcggctgggcagagacgctcctcactttccagactgggcagccaggcagaggggctcctcacatcccagacgatgggcagccaggcagagacgctcctcacttcccagacagggtggcggccgggcagaggctgcaatctcggcactttgggaggccaaggcaggcggctgggaggtggaggttgtagcgagccgagatcacgccactgcactccagcctgggcaccattgagcactgagtgaacgagactccgtctgcaatcccggcacctcgggaggccgaggcttgcggatcactcgcgattaggagctggagaccagcccggccaacacagcgaaaccccgtctccaccaaaaaaatacgaaaaccagtcaggtgtggcggcgcgtgcctgcaatcacaggcactcggcaggctgaggcaggagaatcaggcagggaggttgcagtgagccgagatggcagcagtacagtccagcttcggctcggcatcagagggataccgtggggagaggggagaggggagagcatttcatttttattttaaacaactctctcctggacctagttttgtatttcagaggtggggggttggagattggactaaatttattctaaagatactttttacctcttaagaatcttaagaatgctgttgatgaaagagtcaaactctataaaatatttgaagagatttattctgagccatacatgagtgaccagtgactggatgcacagtctcaagaagtagtcccgagaacatatgcctaagatggccaggctactggttggatttatacaatttagagagacaagacatcaatcagtacatgtaagacagtacattggtttagtacagaaaggcaggacaactcatgggggtgtgacggaggaggttccaggtcataggtggattcaaaaattttctaattagcaattagttgaaagagttattgtctaaagacctagaatcaatggaaggaaatgtctgggtttagataaggaattttagaga

SEQ ID NO: 42490 - DNA, 844 bp, Artificial sequence
  DNA replication origin
gtggggagcgcctctgccctgccgccccgtctgggatgtgaggagcatctctgcccggccgcgaccccgtctgggaggtgaggagcgtctctgcccagccgccccgtctgagaagtgaggagaccctccgcctggcaactgccccgtctgagaagtgaggagcccctccgcccggcagccgccccgtctgagaagtgaggagctcctccgcccggcacccaccccgtctgggaagtgaggagcgtctccgcccggcagccaccccgtccgggagggaggtgggggggccagccccccgcccggccagctgccccgtctgggagggagttgggggggtcagccccctgcccggccagccgccccgtccgggaggtgaggggcacctctgcccggccgcccctactgggaagtgaggagcccctctgcccggccaccaccccgtctgggaggtgtacccaacagctcattgagaacgggccatgatgacaatggcggttttgtggaatagaaaagggggaaaggtggggaaaagattgagaaatcggatggttgctgtgtctgtgtagaaagaagtagacatgggagacttttcgttttgttctgtactaagaaaaattcttctgccttgggatcctgttgatctatgaccttaaccccaaccctgtgctctctgaaacatgtgctgtgtccactcagagttaaatggattaagggcggtgcaagatgtgctttgttaaacagatgcttgaaggcagcatgctccttaagagtcatcaccactccctaatctcaagtacccagggacacaaacactgcggaaggccgcagggtcctctgcctagga

SEQ ID NO: 42491 - DNA, 1202 bp, Artificial sequence
  DNA replication origin
acagccttcgcgctaagcccccattcccttagcacccccccaccccccgacacagctacccaccggcttcgatctgggtaggtgctgccgccatccttttcccgagggggtttgggggcttcgctccggaggggctggcgggggcgggtgggggcgctgcctctattgtggtgaagcccccatgcccgggagtcccgccgcttccgccgcactcctcgtcctagtttcgctctctctcgaattcatcgcatcacgtttcgacccatagatattctagcccaagagctgaggaggcggaggaggaaggagaggagagggagagggagagagagagtgagtgagtgagagagagagagagaagagagagagagagagaggaaaaagagagagagagagagagagagagagagagagagagagagagagacgcggggggtgggggggcggagagagagagagagagagagatagacggagcgagaagagggaggagccgaagtggcgaagaggtgggcgggggcaaagggggtggagagaggggagggtaaaaatggtgatagggttttgcagcgctcatagttccccgctagaggcactaatacagcagctgagcctagactctcccggagcccgatggttgcttagctacagctctgggaaggagggggaggtgctaactgacggccgacgctctggcagccgccttggaactctgtggtggcattcgcgtctgcgagctccggagtgactttcccttcctgtgaaggcaatccggccctttccggtggaggacccttccccctgggttgatcttgaggaacttaagagacggtgttttgactcgactcctttcccctttttcctcccggtaccaaagcggttttgtttgctgtttatactctaccccgtggaaaggcggctagctggctaaagggttttatgcctgggggaggatgagtcgctatttggtcgtgacttgtttctgtttaaaattattattatttaccaaatgaaaatgttgtacttaccagtccaaagtgcggggcttatattgttagaagaccacttaaaatgctcctggattctgacaaatattgcatgagaaatttgcaatcagccgtgaagcatgtttccccttctgaaagtttaacacgtgccgtatctacggctgggatctaacacatcccattcctacagggtaa

SEQ ID NO: 42492 - DNA, 1046 bp, Artificial sequence
  DNA replication origin
agacccggcggcgagggcagcgctcgctgaaggcggggctgggggtcgcggcggcggcggcggcggcggcggcggcggcgggccagttcaatagacaggatgcgcggccgcgccagcggtaggcggcagctcctgtttgagtgctcctgaaggggagatgctaccattcgctcctcaggacgagccctgggaccgagaaatggaagtgttcagcggcggcggcgcgagcagcggcgaggttagtgtggtggccaagacgggctggagccaacccccgcctccttcccctcaagaccttggctggggacggagagaggagaggcgtagggccgggaagcgggctcccgggcaagcccccttgatgctgcctccactgccctttcgctggggagcgggcggggatgagacggcgggctcgggcttgcggagtgagtgcagcctgggcccgggctcggccttgggcggagcgcctgcctggcgggccacgccagagttgttgtgactaagtttcttcactttccgacccgaaggggaactgggggactggcggggtgctgtgcctgactccgcgcgtccctttttctccgccgcgcctagtttgctggctgggaacattttgggggacagctgcggactccagctcgctgttgaaccccggacgctttacgaacccagtgcaacaaacacaccaaggtgactaagtaactctggggacatttgcacataggcacgagtgttccctggtaacagctttctcgtttctctgtggcttgttatggttccttgtaatgacccatgtcgagatacactggcgacctatctccagtcgccaggtttcaggtgatgttctactgcttcctctcaggtccccttgattctactgcactcttgctccaccccttctcctttccacaaccgctgtccctgccccgttggtctgtaaaagaagacgcaaagtaaaccccagcccttataaataagtcgaatctttggtaagacttagcgaggttcaaccaaaatactttggttcacctctcttcccactc

SEQ ID NO: 42493 - DNA, 1166 bp, Artificial sequence
  DNA replication origin
tctccccttcaggagcactcaaacaggagctgccgcctaccgctggcgcggccgcgcatcctgtctattgaactggcccgccgccgccgccgccgccgccgccgccgccgcgacccccagccccgccttcagcgagcgctgccctcgccgccgggtctctcagaggctgggagctgggggtcgccgccgccgccgcccggtgattcccatagagaagacaactctgtgctgcctctccaagagctgccgctcggctcgcgctcaccactgccaccacaacgacagccgctcggtggtgactcccccaacaccccacttcctcgggtcccctccccgctccctgctctgtcaatatggcggcagcggcggcgttacctgtgcggcgcctggacccccccacggcggcggcacagcggcgtcacccaaacgtcaatggagattccccagcttggggtgaagggggcgggatagaggggcggggtggatgcgggggaccgcgtggtgggtggtgggatagaggggaggggggcgtgctgggctggggaggcgactgaacagtagtaaaagcccctgctagcgcctcggtaaacctgcccactccacggagcatgcgcagcgctcttcacacatgctcagcaggccctctcaagtccacggagcagcattgctggcgggcggcaggattctcaaaaaggatgctggaactgggggaccctccagagcacttgaggaatcagggtaagggtaggactccaagagtatctctttgcagggctcacgaagagcaggtgtcttatatgccaaaccacgcccatttcgatacttagtgacaaatactagggcagggattttagtacatcatacattatcctcctagaaggtaaaggcaggataacccccatttaaaaaaataaatatacctgtcctctctagcccccaccttacttgtccctctcaggatgctcctgctggttgccttcacactattgataacacacaatgtttctcttcacacatgcacacacacaggcaaacatatgccacttaatgaactccacttgtggcaacaaaggcatgattccgaagctagcccatcctccagccccctctgagaatgttgggtctgtagtgacaataatcatagtttttagtaccttcttcaaagc

SEQ ID NO: 42494 - DNA, 1093 bp, Artificial sequence
  DNA replication origin
gcctctcctcccctcagacaagaaacactgaacgcggtggatccacgtccctctagtttctcgtcaggagtctccttacctgctgctgcagctacagctgccgccgccgctgccgccgccgctgccgccgccgccgccgccgccgcctccgtgccgccagtcggactgtgaccgcgctctggatggctgcggggggcggcagctgtggatcccttaaggtcctcacattcgggtttccgaggttccgcagcccgagccaatcacaatctactctgcgtctgggaggcgcgccgcctcattctcctttatattgctgctgacatgctgaggttgcattacgtcacgctacccttgctgcagggtagggggccaaaggggggtctcgcgcacgcgcgcgcgcgggagatcgaggcgcccgcgctaggttagtgcgagaccccgccggcttgaggcgggggctgagcgccggccaagtccaagtgcgcaagcccagatctcggcgcgcccctgaggagtttctgtgggaagattttctgttttccaggtttcccaagggaaacgaagaaagggaggaggataatcaatgactgaacctctaatagatgttggacgacgttaaaaaaaaaatgtatcggccctaccctcgaggatttgacaaattagactgaccagagtaataagaggtatgcctcaccccaataaaacctgtgtgtgttgcagtttcccttcctccctcccttcatttcttttctattttgtaatggtagacaattcgatgaagaaagtgaaggagagtgaagaaaggtatagaaaggaaaaggtgaacaagggacctcaatgaagtggacactaaatatctcatgaatgtgtcactttcagcttctgtctgcaaaaagtgggaggacagtgagaaattcattgggtgagggatggggaaaagagtgatgagatgtgatgaaaggtaggtggggactagattgcgtaagcaaagagtcttatgttttgcctattttagctttaattctataagcatttggaatcaataacagtgtttaagcagggaaaggataggatcctaaagaaagtaactctt

SEQ ID NO: 42495 - DNA, 909 bp, Artificial sequence
  DNA replication origin
ttttcctcttcagccgcagccgggggctggaggaattgagggaagtaagggttttcccccttagccaacctcctctttccctaggccagagccccagggagctagagccgtcgttgagaccgtcggtggtttagggtgacggtaaaatggcggaaaacaaaacggtgaagtgaagaatgcagcgtccccctggcagtttctctcagctctccctccaccccatattcttttcactggcgccccagtcgcctcgcccccgccccctgaccgagctaatagtaacctttggaatgcgcgagggatggcggcgtgtgcgaggaagtggcaccgaatcggcattttaggggattgggagccgtcagagcctgggagttggggggagggggggggcgtgtgcgacaactgtcgcctacactaaaacaccaccattttggttcccaaccgtctcccacgtagcggggcagaggaagctggaggaggctgaggggctgggcagcacggcgtgggtagcagcggtggcgaccgctgcaccaagtgagaggagggaggaggggaaagggtattcttgtctcatcggtctcttcctttctgctgcgaaggttctcttgttaggtttaagatctagtcagatgggtaatacctcagagggcacgtgtgtgcattctgctcgaaatgattgaaacttggcatggtcgtgggaaaaggagacttatgcgggaagagggctgcgtccaaagctgcaatactgctacttgccagggctcctttgtctcccatctctgcaaatactactttcgcattctcttgttctgccgccttaccatttctcatctatccgtcaccctattgacatcactaagaagctaggtcctgaatgagctatgttagaagagacagattttctttttg

SEQ ID NO: 42496 - DNA, 758 bp, Artificial sequence
  DNA replication origin
ccgaattcttcctggaccgctggtcacaacactcctatgggtggtgccagccaccatactccgtagagtggtggcagtgtgatccaccctcgtttgcacatgtcaacagcagtggcagtatggtggggtgcacattcattggctgcaacatggagattgcaggtgcaggcgtgccggcctctgtggtggtgttcacagtggcagcggtggcagcatggtggtggcgggggaggtatcaggctccgccagtgtccctgcatgcgtttgcccggcagtggtgttagcacaggggtggggcactggtagcactggactgtgcgcgccctttgtgtgcggattcacacaggcggcagctactgctggggggtgggggcgggtccactggtctccccacatattttcacacaggcagcagtgtcagtgcaagtgcggggcgctggtgggtgctagactagtggtctctgagccggcgaatgctctgatgacaatggcggcacagcaggggattggggggcgggatgcacggacgctggcagctgtggcacaggaagatgcatgcgcacattcatgctagtgggaaaggggaggcaaggcccttctgcacacacgcactgtcaaaacgatgtgacgggttgggggtggccatgggagagtgcgtgcaagcaaagtggcacgagggaggctgttgtggggaggacacgggcagactggtgcatgcccacgggggctgcttcccctcccacttgagctcttcactg

SEQ ID NO: 42497 - DNA, 832 bp, Artificial sequence
  DNA replication origin
aagcgtttctgcccggccgcccatcgtctgagatgtggggagcgcctctgacccgctaccccgtctgggatgtgaggagcgcctctgcccggccgcgaccccgtctgggaggtgaggagcccctctgcccagcagccgccccgtctgagaagtgaggagcccctccgcccagcagccgccccgtctgagaagtgaggagcccttctgcccggcagccgccccatctgggaagtgaggagcatctccgcctggcagccgccccgtccgggagggaggcggggggcagcccctgcccggccagccaccccgtctgggagggaggtggggggcagcccccacccagccagcctccccgtccgggagggaggtagggggcgcctccgcccggggcgcctctgcccagccgccccttctgggaagtgaggagcccctctgcccggccaccaccccgtctgggaggtgtacccaacagctcattgagaacgggccatgatgacgatggcggttttgtcgagtagaaaagggggaaatgtggggaaaagatagagaaatcagactgttgctgtgtctgtgtagaaagaagtagacatgggagactccattttgttctgtgctgggaggaattcttctgccttgggatgctgttgatctgtgacctcgcccccagcccggtactctctgaaacatgtgctgtgtccactcagggttagatggattaagggcggtgcaagatgtgctttgttgaacagatgcttgagggcagcatgctcgttaagagtcatcaccactccctaatctcaagtacccagggacacaaacactgcagaaggtc

SEQ ID NO: 42498 - DNA, 1226 bp, Artificial sequence
  DNA replication origin
aatgtcgggagcagatcgggtaataaagtgtatattgagaataagatggccttttgaccttttagggtctagggctgtaaagtgtctcagggttgctgccgaacgagccatgaactgggctgggtttttatatttgataaaaaagagcctaaatgcttctgatttgggataaagaaaaaggagcattaaccttgactatgcctttggctccagccacctttttaagagtcaattgctgggcaggttggggagggctagtcagggaacgaaactgtaagccggcaaggtgtgaggaggggaggtgataaaaagattatagggtggaggagcagaggctgaggaagaattgggacctagctcggcctggagaggagaagcctggggaggaaggcagaggtcagatgggtctgtagaaaaggaagattagaaagactcagcgacgcttggggttggtactgaggggagaggcgggagggaaagaaggaagatttgggacgagttgcactgggcacagagactaggaagggactgatgtgtaaaagaatgcctggacatcaggcacctcagaccgtttgcctattttacgacaagaattatttagatcttgcaggatggaaaaattcaaagtgccattttctggctatttggaactactgtcgagtttgtattggggtcaagcagcattgcagaagaaaataaggcatttaggttttaggtcaggtgtgagttgaagaggttttaagtttttgagaacacaggccaagggagtagactgaggaatggagggtggaagtttcccatagtgaaggaagcaagcctagagaaaagagagagtagagaaatggagggaaggggtttgggggttcttaccttccagaaaaggggttggggtgcagagataagaggttggggcatggaaataagggattggggcacagagatacgaggttggggcatggaaataagggattggagtgcagagatacgaggttggggcgcagaaataagggattggggcacagagatataagaggttggggtgcagaaataagggattggggcacagagatatgaggttggggtacttgcccctcccccagaaaagcaggacttgctgctaagggtgaaggagaaggggttgatggttacttgcccctctcccagaaaagcagagaaggggtagagacaaggagagaaggggttggggtactcaccctgttcctgga

SEQ ID NO: 42499 - DNA, 1246 bp, Artificial sequence
  DNA replication origin
gctcctcggggaggaggttctggaggaatgcctggctgctgcggttcaggcgtttggaagttcttgtgtgctggagatgtggctggggtttgtctcacagtggaggcaaggaattgcaacttttttctattattgtacaccttgaaggcgaggttaattaaatcctgttgtggggtttgagggccagaatttaatttttggagttttatttaatgtcgggagcagattgggtaataaaatgtattttgagaataagatggccttttgaccttttagggtctagggctataaagtgtctcagggttgctgccaaatgagtcatgaactgggcaggatttttatatttgatgaaaaagagcctaaacgctatctgatttggaataaagaaaagggagcattaaccttgactatggctttagctccagccacctttttaagagtaaattgctgggcaggtgggggagggctagtcacggaatgaaactgtaagctggaccaggtgtgaggaggggaggtgataaaaggattattgggtggaggagcggaggctgaggaagaattgggacctagctcggcctggtgaggagcagtctggggaggaggggagaggtcagatgggtctgtagaaaaggaagattagaaagactcagcgatgctgggggttgggatggaggggacaggtgggagggaaagaaggaagatttgggatgagttgcactgggcacagagactaggaagggaccaatgtgtaaaataattcctggacatcaggcacctcagaccgtttgcctattttatgacaataattatttagaacttgcaggatggaaaaattgaaagtgctgttttctggctatttggaactactgtcaagtttgtattggggtcaggtggcattgcagaagaaaataacatgcttagattttagatcaggtgagagttgaagaggttttaagttcttaagaacacaggctaagggagaagaaggaggaatggagggtggaaggttgcccatagtgaaggaggcaagcccagagaaaagagagagtagagacacagagggaaggggtttgggagttcttaccctccagaaaagtgggaaaggggttgggacacagagatatgatgtcagggcatggaaataagggattggggcacagagatataagaggttggggtgtggaaataagggatcggggtgcagagatataaggggttggggtacttgcccctcccctagaaaagt

SEQ ID NO: 42500 - DNA, 1071 bp, Artificial sequence
  DNA replication origin
gagcagattgggtaataaaatgtattttgagaataagacggccttttgaccttttagggtctagggctgtaaagtgtctcagggttgctgccaaacaagttatgaactgggctggatttttatattgataaagagcctaaacgctatctgatttgggataaagaaaaaggagcaataaccttgactatgcctttagctccagccacctttttaagagtaaattgctggcaggtgggggagggctagtcacggaatgaaactgtaagccggaccggactgggtgtgaggagaggaggtgataaaaggattatagggtggaggagcggaggctgaggaagacttgggacctagctcggcctggtgaggagcagcctggggaggaggggagaggtcagatgggtctgtagaaaaggaagattagaaagactcagtgatgcttggggttgggactgaggggacaggtgggagggaaagaaggaagatttgggatgagttgcattgggcacagagactggggagggaccgatgtgtaaaagaatgcctggacgtcaggcacctcagaccgtttgcccattttacgacaagaattatttagatcttgcaggatggaaaaattgaaagtgctgttttccggctatttggaactactgttgagtttgtattggggtcaagcggcattgcagaagaaaataaggcatttaggttttaggtcaggtgtgagttgaagaggttttaagtttttgagaacacaggctaagagagaagaaggaggaatggagggtggaaggttgcctatagtgaaggaggcaagtttaaagaaaagggagagtagagacacggagggaagcggttcaggggttcttaccctccagaaaagcaggaaaggggtcggggtgcagagatacgaggtcagggcgtggagacataagatgtcggggcatggaaataagggattgtggtgcagagataagaggttggggcatggaaataagggattggggcacagagataataggttggggtgtggaaataagggattgaggtgcagagatatgaggttggggtactttc

SEQ ID NO: 42501 - DNA, 921 bp, Artificial sequence
  DNA replication origin
ccccgtctgagaagtgaggagcccctccgcccagcaaccaccccgtctgggaagtgaggagcgtctccgcccggcagccacccagtccgggagggaggtgggggggtcagccccccgcccggccagccaccccgtccgggagggaggtgggggggtcagccccctgcccagccagccgtcccgtccgggaggtgaggggcatctctgcccagccgcccctactgggaagtgaggagcccctctgcccggccagccgccccatccgggagagaggttggggggtcagccccacgcccggccagccaccccgtctgggagggaggtgggggggtcagccccccgcccggccagccgccccgtccgggaggtgaggggcgcctctgcccggccgcccctactaggaagtgaggagcccctctgcccggccgccaccccgtctgggaggtgtacccaacagctcattgagaacgggccatgatgacaatggcggttttgtggaatagaaaggggggaatgtggggaaaagattgagaaatcggatggttgccgtgtctgtctagaaagaagtagacatgggaaacttttcattttgttctgtactaagaaaaattcttcggccttgggatcctgttgatctgtgaccttacccccaaccctgtgctctctgaaacatgtgctgtgtccactcagggttaaatggattaagggcggtgtaagaggtgctttgttaaacagaagcttgaaggcagcatgctcgttaagaatcatcaccactccctaatctcaagtacccagggacacaaacactgcggaaggccgcagggtcctccgcctaggaaaaccagagacctttgttcacttgtttatctgctgaccttccctctactattgtcctatgaccctgccaaatccccctctgtg

SEQ ID NO: 42502 - DNA, 1069 bp, Artificial sequence
  DNA replication origin
tgcagagataagaggtcggggcatggaaataagggatcggggcacagagataagaggttgggccgtggaaataagggatcggggcacagagataagaggtcggggcatggaaataagggatcggggcacagagataagaggttggggcgtggaaataagggatcagggcacagagataaggggttggggcatggaaataagggattggggggggttcttgccccgcagaaaagagatagagacagagaagggttcggggttcttgaccctcccccagaaaagcgggacttgccgctaagggtgaaggaccaaggcaggtgtccccatgtggtcacacacctctgaaacgtgggtgaataatcagagaggtgtccctgcaatgattaaacaccaagggaaggctgccttcccgagtccgtgactggcgccagagttttgggtccacagataaaatgtgtctcctttgtctctaccagaaaatgaaaggaattgaaattaagagaagggagagattgaagggtggcgccaagattgaaaggagaaagtggttgagggatagtgagagaggttggagaagagagtaagaagaggccacttacctgatttaaaattggtgagatgttccttgggctggtgggtctgaggacccgaggtcgtaggtggatcttttcatggatcaaagagcaggagcacaggggattgatctgagtcacagcaccaaatttcatgcgcgtctgtgtgaagagaccaccaaacaggctttgtgtgagcaataaagcttttaatcacctgggtgcaggcagactgagtccgaagagtcagcagagggagatggggtggggccgttttacaggatttgggtaggtaaaggaaaattacagtcaaaggggttgttctctggtgggcaggagtgggggtcacaaggtgttcaataggggagcttttgagccaggatgagccaggagaaggaatttcacaagataatgtcatcagttaaggcaggaataggccattttcatttcttttgtggtagaatgtcatcagttaaggcaggaaccagtcatctgga

SEQ ID NO: 42503 - DNA, 858 bp, Artificial sequence
  DNA replication origin
ggaagattagaaagactcagcgacgcttgggtttgggactgaggggacaggtgggagggaaagaaggaagatttgggacgagttgcattgggaacagagactagggagtgactgatgtgtaaaagaatgcctggacgtcaggcacctcagaccatttgcccattttacaacaagaattatttagatcttataggatggaaaaaatgaaagtgccattttctggctatttggaaccactgtcgagtttgtattggggtcaagtggcattgtagaagaaaataaggcatttaggttttaggtcaggtgtgagttgaagaggttttaagttcttgagaacacagactaagggagaagagggaggaatggagggtggaatgttgcccatagtgaaggaggcaagccgagagaaaagagagagtagagacatggagtgaagaggttcaggcgttcttaccctctagaaaagcaggaaaggggtcggggcatggaaattaggggttggggtgcagagataagaggtcggggcatggaaataagggatcggggcacagagataagaggttgggccgtggaaataagggatcggggcacagagataagaggtcggggcatggaaataagggatcggggcacagagataagaggttggggcgtggaaataagggatcagggcacagagataaggggttggggcatggaaataagggattggggggggttcttgccccgcagaaaagagatagagacagagaagggttcggggttcttgaccctcccccagaaaagcgggacttgccgctaagggtgaaggaccaaggcaggtgtccccatgtggtcacacacctctgaaacgtgggt

SEQ ID NO: 42504 - DNA, 889 bp, Artificial sequence
  DNA replication origin
aggtgaggagcccctccgcccggccgccccgtctgagaagtgaggagcccctctgcccggcagccgccccgtctgagaagtgaggagcccctccgcccggcagccgccccgtctgagaagtgaggagcccctccgcccggcagccgccccatctgggaagtgaggagcgtctccgcccggcagccgccccgtctgggaggtgaagggggggcagcccccgcctggccagccgccccacccaggagggaggtggggggggcagcccccgcccggccagctgccccacccaggagggaggtgggcggggggacagcccccgccgggccagccgcccctcccgggagggaggttgggggggcagcccctgcccggccagccgccccgtctgggaggtggggggggcacctctgcccggccgccccttctgggaagtgaggagcccctctgcccggccgccaccccgtctgggaggtgtacccagcagctcattgagaacgggccatgatgacgatggcagttttgtcgagtagaaaagggggaaatgtggggaaaagatagagaaatcagattgttgctgtgtctgtgtagaaagaagtggacatgggagactccattttgttctgtactaagaaagattcttctgccttgggatgctgttgatctatgaccttacccccaacccggtgctctctgaaacatgtgctgtgtccactcagggttaattggattaagggcggtgcaagatgggctttgttaaacagatgcttgaaggcagcatgctcgttaagagtcatcaccactccctaatctcaagtacccagggacacaaacactgcggtaggccacagggtcctttgcctaggaaaaccagagacttttgttcacttgt

SEQ ID NO: 42505 - DNA, 1238 bp, Artificial sequence
  DNA replication origin
agcaacaatctgatttctctatcttttccccacatttcccccttttctactcgacaaaactgccatcgtcatcatggcccgttctcaatgagctgctgggtacacctcccagacggggtggcggccgggcagaggggctcctcacttcccagaaggggcggccgggcagaggtgccccccccacctcccagacggggcggctggccgggcaggggctgcccccccaacctccctcccgggaggggcggctggcccggcgggggctgtccccccgcccacctccctcctgggtggggcagctggccgggcgggggctgccccccccacctccctcctgggtggggcggctggccaggcgggggctgcccccccttcacctcccagacggggcggctgccgggcggagacgctcctcacttcccagatggggcggctgccgggcggaggggctcctcacttctcagacggggcggctgccgggcggaggggctcctcacttctcagacggggcggctgccgggcagaggggctcctcacttctcagacggggcggccgggcggaggggctcctcacctcccaaacggggttgcggccggacagaggcgctcctcacatcccagacggggcggcggggcagaggcactccccacatctcagacgatgggcggccgggcagagacgctcctcacttcctagacgggatggcggccgggaagaggcgctcctcacttcccagactgggcagccgggcagaggggctcctcacatctcagatgatgggcggccaggcagagacgctccttgcttcccagactgggtggcggccgggcagaggctgcaatctccgcactttgggaggccaaggcaggcggctgggaggtggaggttgtagctagccgagatcacgccactgcactcagcctgggcaacattgagcactgagtgaacgagactccgtctgcaatcccggcacctcgggaggccgaggctggcagatcactcgcggttaagagctggagaccagcccggccaacacagcgaaaccccgtctccaccaaaaaaatacgaaaaccagtcaggcgtggcggcgcgtgcctgcagtcgcaggcactcggcaggctgaggcaggagaatcaggcagggaggttgcagtgagccgagatggcagcagtacagtccagcttcggctcggcatctgagggagaccgtggggagagggacagggacagggacaggg

SEQ ID NO: 42506 - DNA, 965 bp, Artificial sequence
  DNA replication origin
actgctgcagccggtggaaatggcgggccactagggcgggatcagacagagggctggtgggtgtttctttcgccgcctggtacaggggcttagctaagaccccgaagtttgggatccagtgccggaagaaccctactagccctacgaaggagaggatcttatctgcgtcctggggaagttggaggtctttaatgaggctaactcggtctgtggtgaggcttttggtggtggcggtgagagaaatgcctaggtatgtgactgtcggggtgcagagctgaactttgtgaggggtaactcgatacccttgttttcctaagaaattaaggattgtggctgtatcttgctgcgagacagacagggaaggactgcaaaggagaaggtcatcaacatacaggagaagggtgctgtcggccaaagtgcatgtactgaggtctttagctagagcctgtccaaagaggtgagggctgtctcggaagccttgcgggagaacggtccaggcaaattgcgaggagacatgggtgtcagggtcttcccaggtgaaagcgaacaggaagtaacagtcagggtggagggggatagtgaagaaatcatctttgaggtcaaggaccgtgaaatgggtggtggtcggaggaatgcgggataggagagtgtatgggttaggcactacaggaaaaatggggacgacagcctcgttgatgatgcgaagatcttgcactaaacggtacgcaccagaggccttacggatgggcagaatgggcgtgttgcaacgggagtttaccgggataaggatgtgttgttgcaagagcctggtgatgataggttttaacccttggcggtgttcaactgagatggggaattgtggccgcgagggaaatttggtagggtccttgagtttgatcattattggggcatggtgtcgggcgatggagggggttgagatgtcccatactattggatcaacgggc

SEQ ID NO: 42507 - DNA, 2259 bp, Artificial sequence
  DNA replication origin
gggccaccggtacagtcgaccagtgactccactgacccaccgagaatcccatgggtctgggatggtcaggaagtaagttgtccttccatcagatgtcaggcgataggtgtgttggagtttcttggcggtatggagctgggtcacatgcatacgacaataggcataggggcatcctccgtttgtgtccacccaatagtcgcggcagttgctgtgtgtttgatcatagacaaagcagatggtgggattggaccagccccgcagaacacttttaaaggaagtgaagttaaaagttacttgggcctgacaaccgtgaggttggcagtccaccgttgccagtgtgacagtggagagccggttgccttgggtccaagtctcatgcaggtagaacctccatcggaacgggggttcagttaggagggagttactgggcactatgggggttaggagggtcaggaggagtaggaggcatagtggggaaggtctggccatgggtgatacgaagccgggttggggtgagttttgaggaccagtcgtgctgagtcggtgctttcttcaactgtgacaaatgataccaggatggtagacctagtaacttagtggccctcggagtggtgaggatcacggtgtaagggcctgaccaccgcggggtcaaggtcttggactgtagttccttaaggaggacactatcacctggagagagcacaacaggggcgtccggggaggagggggtaggttcggggaggcaggcgtccgcgtgcttgcggagaaggtcgcgaaggagggtcagataaggaagataggacgcgaggggagggggcgaaacagtggggggaagaccaggaagtaggaaggggcgtccgtagagaagttcgaaggggctgagccctgtggggcccctgggagctgcccggaggcgggtcagggccaatggtaggagggtgacccacgacagctttgtttcaagagtaagttttgtaaggtgttctttgaggaggctgttagccctttctactttaccagaggattgagggcggtaagggatatggagcttccatgtgacgcggagcgactcggatacttgctgagtgatttttgagacgaacgcggggccgttgtctgattgcagggatcggggaagtccaaagcgagggatgatatgttctagcaggacagagactgcgacttctcctgtctcacgtgcagtgggaaaggcctcaatccagcctgtgaaggtatctacaagagtaagaaggtagcggtaatgcttgtgccgcggcatgtgggtgaaatctagctgccagtcctctcctggctgatgcccgcggagctggtgatggggccctgggcgcctaagtcctccttgtgtgttgactgttgaacagacagcacaggtttggtgtacctggtgaatgagggactgtaggccggggcatagaaaaattggttctaagaactgatgtaagagttttgggcctatgagtagggtcttgtgcacatcggtaataatagcctgagcctgggattcggggagggcaatccggttatcgacccagattcaaccgtcttggtcggtcattccttttaagttggaaatgaggtggaaggtctcctgtggagaataggcaggggtgcgtgaaccggacaggaacattgcgggagctggggcaggggcagaagtaagagcaagagacttagcagtagagtcggctagattatttccttgagcaacagggtcttttgagtgctggtgacttttgcagtgtatgatcgccacctctcggggcgcctgtaaggcatttaagggtttatggataagaggcccgttgacgattgaagtccctttcatagtaaggaaacctcgctcctgccagagaacagaatgcgtgtgtgcaatgagaatacgcatacttggagtcagtgtaaatgttgacccgctgtccctgagagaggagtagagccctggtaagagcaaggagttcagccttctgcgaagtggtcccaaggggtagggctgccgcctccactgttttgtcgtgggtgactacggcgtaagctgcctgtcgcctaccgcaaggggtgaggactgagctgccatcgacaaacagagtgctgtcaggattagaaagcggtcgatcgaagaggccaagtcgggagttggggttagaggtaaggagttcgggacaagaatgcgacaggacaggagggggctcagaggcttctatgggaagaagtgtagcagggttaagaggtggtgaggcg

SEQ ID NO: 42508 - DNA, 1261 bp, Artificial sequence
  DNA replication origin
aattgcaacttttttctattactgtacaccttgaaggcgaggttaattaagtcctgttgtggggtttgaggaccggaatttaatttttggagctttatttaaagtcaggagcagattgggtaataaaatgtatattgagaataagacggccttttgaccttttggggtctagggctgtaaagcgtctcagggttgctgccaaatgaaccatgaactgggctggatttttatatttgatgaaaaaagagcctaaacgctaactaattttgggagaggtcagataaagaaaaaggagcattcaccttgactatgcctttagctccagccacctttttaagaggaaattgctgggcaggttggggaaggctagtcgaggaatgaaactgtaagctggaccaggtgtgaggaggggaggtgataaaaggattatagggtgggggagcagaggctgaggaagaattgggacctggcttggcctggcgaggaggggagaggtcagatgggtctgtagaaaaggaagattagaaagactcagcgacacttggggttgggactgaggggacaggcgggagggaaagaaggaggatttgggatgagtcccattgggaacagagacgagggagggaaaaatgtataaaagaatgcctggatgtcaggcacctcagaccatttgcccattttatgataagaattatctagatcttgtacgatggaaaaattgaaagtgccattttctggctatctggaactactgttgagtttgtattggggtcaagtggcattgtagaagaaaataaggcatttaggttttaggtcaggtgtgagctgaagaggttttaagttcttgagaacacaggctaagggagagtagggaggaatggagggtggaagcttgcccatagtgaaggaggaaagcccagagaaaagagagtagagagacggagggaaggggttcaggggttcttaccctccagaaaagtgggagagggttcagggcacagaaataaggggttggggcacagagataagaggtcagagcgcagaaataagggatcgggttgcagagataagaggtcggggcatgcaaataagggatcggggcacagagataagaggtcggggtgcagaaataagggattggggcacagagataagaggttggggcatggaaataagggatcaggccacaaagataaggggtcagggcatggaaataagggatcgaggggttcttgccccccagaaaagcagagaaggggta

SEQ ID NO: 42509 - DNA, 1403 bp, Artificial sequence
  DNA replication origin
ataaatattcttctgcctggtatagttagcagattatctgtatgaaagctatggaaatgaactagctaatctcttcagattttaactctggaattccaagaaatagaattaaggcccccataaaagaatagttctaatttacaactggggtgtctctaaagttgtttgacattgagatatatatatactttgaatgtatgtctcctccaaatctaatgttgaaatgtgatttccaatgatggtggtggggactagtgggagatgtttgggtcatgggagcagatctttcataaatggcttgatgttgtcctcatggtaatgagtgagttctcatcatgtgagttgacaagagatctggttgtttaaaagagcttggcacttcctccctctcactcttttcatctctctcttgccgtgtgacactgactccccttcccttccaccagtattataagcttcttgaagactcacctcaggaagaagattcctgtactatgctttatgtatagcctataaaaccatgagccaaataaacttttctttattaattacacaatcttaggtattcctttatagcaatgcaaacatactaacacaggtatgttggttagaatagtgccagtgtgtccggaattggtgggttcttggtctcactgacttcaacaatgaagccgcggaccctcgcggtgaatgttacagttcttaaaggcggcgtgtccggagttttttccttctgaccttcagctgtgttcggagtttcttccttctggtgggtttgtggtctcgctggatcaggagtgaagctgcagaccttcgtggtgagtgttacagctcataaaggcagctcttaaggcggcgcatctggagttgttcgttcctcccagtgggttcgtggtctcactggcttcaggagtgaagctgcagacctttgccgtgagtgttacagctcataaaggcagtgtggacccaaagagtgagcagcagcaagatttattgcaaagagtgaaagaacaaagtttccacggtgtggaaggtgaccggagggggtgccactgctggctcaggcagcctgcttttattctcttatctggccccacccacgccctgctgattagtccactttacagagagcccattggtctgttttcacagggtactgattggtgcatttacaatccctgagctagacacaaaaattctccaagtccccactagattagctagatacagagtgtccactggtgtatttacaaaccctgagctagacacagagtgctgattggtgcatttacaaaccttgagctagttacagagtgccgattggtgcattcacaatcccttagctagacataaagattctccaagtccccactagactcaggatcccagctggcttcactcag

SEQ ID NO: 42510 - DNA, 1977 bp, Artificial sequence
  DNA replication origin
caagtagattaggacgagagcagaggcagagagagatgtcttgccgtggtcgtgagccaccacgataagctcataggaggacttggagctctccccgaaggtgcgggtggttctgacttcgccattgacctggtctatttcaaagaagccgcggtcgccctcggtcatgtcgtaggtgactcggccattttcgccctcatcgtagtcttctgccttgacaacagtcaccaggtagcctatgccagagttgcggggtatgtagacctcggcagtgccgttaatcagaggtggggctgtgatgaccggggtgttgtcgttgacgtcgaggatgatgacccgcaccgtagcgttgctttgcagtgagggaaggccgccgtccttggccagcaccttgaattcgaacgccttggtctgctcgtggttaaaggatcgcagcgcgtagatgtcgcctgagttgggattgatggagacataggtgaagacaggcatgtcccgcacctgcgacggcacgatctggtaggagacactgccgttgagacccaggtcggggtcgcgagcagacacagagagcagataggcgccaggcgtgttgttctcctgcacaatgacctggtagtagggcttggaaaagtgcgggtggttgtcattttcgtcagtgatgagcacggtaaaggacttggcactctgcagcatgggcacgccgccgtcgcgtgcctgaattgtgaggttgtattggtcgtgctgctcgcggtccagccgtccgtccaccagaatagtggagaagctctcatattcctgcagtcgaaagggcacattgcccagcaaacggcactgcacacgtccattgaggcctgagtcgcgatcagacacccgcaccaaggcgatcacgtagcccgggggggcgctctcgctgacctccacaagctcactgttgactgacagcaggttgatgaccggcggattgtcattggtgtccagcacgctgacggtgaccttgcagtgtgccgggatggaattgggccccaagtccttagcctgcacgtccagttcgtacacgtgcccctcttcgtagtctaaagcgccagtgacagtgaccaggccactgtgcgggtcgatctgaaagagctcgcgcgtgcggtcgttgacgtagccatagaaggagtagaccacctggccgttggtgccctcgtctggatcgctggcgttgaggcggatgacgggtgtgttgggaggcgagttttctggcacgctcaccgcgtaggtggactcgctaaacaccgggttgttgtcattggagtcggtcaccttgatactaaggccaacggtgcccaggcgcggcgggtcgccaccgtctagcgcagtgattcggaagctgtagtgcgactgcgtctcgcggtccaggctcttttccaccacgagttcggcaaagcgggagccgtcgccgcgcgtcttgatctccaggccgaacagctcgttgggcgtgagctcgtaagtctgcacgccaaagcttcctgagtctggatcgtaagcgctgtccagcgggatgcgcgtgccagggctggctgcctccgagatctccagctcgatctgtgctgccgggaaactgggcgcattgtcgttcaggtccttgatctccacctttatcacgcagatttccattgagctggacatgacctcgagcgagatgatgcacttggggctctggcggcacagcagatcacggtcaatcttctgcttggtgaccagcaggccagagctgggattgatgtccactaggtgtggagccgagttggacaccacgcgaaaggctgaagcctgccgggggtccagcgcgaagcccgcctctcgcgcgtctttggccacgttggcaatcaccgtcccggcgcgctgctcctcttctaccgagtacttgagattaatgagggcggcagcctgcgtccacagtatggccagcagcagcagcaccggcagcaggag

SEQ ID NO: 42511 - DNA, 1078 bp, Artificial sequence
  DNA replication origin
acccctccgagaccgacgccgtcggcgctccagcttcccgccggctcgggccgcctgttgcgcgcgccccgtggccccggaggccgcgggagaagtcccgcccagggcggcccggcggcgcgcgggggacacccgcggcggctccaatgctgaggttgcggcggacgcggcgggggctcgcgggggccccgggggctccgaggggccaagggagcgccgcgcggccccgagccccctccctccagcccggctactcagttttaccccttcaaagttagccgggcgcgactgtcggcagccgcccagggctgcgggtcgggcggcgtctgcgcggcctggaggacgcaccgctgagtccggacagtacttgaggcgaaggtaaagagggcggaggaggcgcagcctttcaggcactgcccggcccgccgcggtgcaccggcactgaggctggcgaactcgctgtctgtgcacctggcatgcgcaaagacctccccccagcgctcccagttcactgcggagagagtacccgcttggaatgcgccctccggggtctgggggggccacactggcctcttcgaggcctgttcgggagaaagggggtgtcgcagacgggagtcagttactggcaagcgccgcgggcacccggttatagggttgagtcggatggcggtcccggggccagcagaggaagggggaggggagagaggctgccagagcttgagcgcgctccctcgcgctaaggctggcttcgaagggcttgggggcgcgtctgtccaggatccgaggtgggagcggagttccccccacagagcagttgagggtctgcgggcgttttcgtctaggaaatcaaagttaacaacgcagtccgaccctccacgtcaagtttgtggaaacggggagatggcaatttgtccaagaaaatcaaagccccggtctttctaatggccgggggtggcggggaatggggaagagggaaggggaggcaacaacagtaccggccaggagaggcggggccgccgccgtgggtaccgggtgcttctcttctctccgtttgggctggggtgtcgctccaaggtcc

SEQ ID NO: 42512 - DNA, 803 bp, Artificial sequence
  DNA replication origin
gaagggggaggggagagaggctgccagagcttgagcgcgctccctcgcgctaaggctggcttcgaagggcttgggggcgcgtctgtccaggatccgaggtgggagcggagttccccccacagagcagttgagggtctgcgggcgttttcgtctaggaaatcaaagttaacaacgcagtccgaccctccacgtcaagtttgtggaaacggggagatggcaatttgtccaagaaaatcaaagccccggtctttctaatggccgggggtggcggggaatggggaagagggaaggggaggcaacaacagtaccggccaggagaggcggggccgccgccgtgggtaccgggtgcttctcttctctccgtttgggctggggtgtcgctccaaggtccgccgccgccgccgccgccgccgccgccgcgggaggaagccctcctagctcagttgcacgtcgctggggtccgcctcagcagctgccacagtcgacgattttgtcgccgccgaagtttacttgcaggagcgtcttgatttcatcttcccggagaggcgctggccgcgctgcgttgggctcccttcctcccgggcgctcgcgcactcgggaggtctgtctcgctttctctgtctgtctcgggctgtgtgtgaatgtgtgagagagagaggaagagtgagtgtgtggtgtggggagtgtgagtgtggagtatgagcaagcaggaggcaatgggtttggggtaggaggtttaggatttcggatgaaatcgctcagccggaatgctgcggagcgcaacgcgccaagggccagcgccg

SEQ ID NO: 42513 - DNA, 979 bp, Artificial sequence
  DNA replication origin
ggccgcccctactgggaagtgaggagcccctctgcccggccagccgccccgtccgggagggaggtggggggggtcagccccccgcctggccagccaccccatctgggaggtgaggggcgcctctgcccggccgcccctactgggaagtgaggagcccctctgcccggccagccaccccgtccgggagggaggtgggggggtcagccccccgcccggccagccgccccatccgggagggaggtggggaggtcagccccccgcccggccagccgccccatccgggaggtgaggggcgcctctgcccggctgcccctactgggaagtgaggagcccctctgcccggccagccgccccgtccgggagggaggtgggggggtcagcgccccgcccggccagccgccccgtccgggaggtgaggggcgcctctgcccggccgcccctactgggaagtgaggagcccctctgcccggccaccaccccatctgggaggtgtacccagcagctcattgagagcgggccatgatgacaatggcggttttgtggaatggaaaggcgggaaaggtggggaaaagattgagaaatcggatggttgccatgtctgtgtagagggaggtagacgtgggagacttttcattttgttctgtactaagaaaaattcttctgccttgggatcctgttgatctgtgaccttgcccccaaccctgtgctctctgaaacatgtgctgtgtccactcagggttaaatggattaagggcggtgcaagatgtgctttgttaaacagacgcttgaaggcagcatgctcgttaagagtcatcatcactccctaatctcaagtacccagggacacaaacactgcggaaggccgtggggtcctctgcctaggaaaaccagagacctttgttcacttgtttatctgctgaccttccctccactattgtcctgtgaccctgccaaatccccctctgcgagaaacacccaa

SEQ ID NO: 42514 - DNA, 1134 bp, Artificial sequence
  DNA replication origin
cgggcggggcgctgaccccccccacctccctcctggacggggcggctggccgggcgggggagctgatgacccccccacctccctcccggacggggcggctggccgtgtggggggctgaccccccccacctccctcccggacggggcggctggccgggcagaggggctcctcacttcccagcaggggcggccgggcagaggcgcccctcacctcccggacggggcggctggctgggcggggggctgaccccccccacctccctcccggacggggcggctggccgggcggggggctgacccccccacctccctccctgacggggcggctggcctggcgggggctgaccccccacctccctcccggacagggtggctggcctggcgggggctgacccccacctccctcccggacggggtggctgccaggcggagacgctcctcacttcccagacggggtggctgccgggcggagggactcctcacttctcagacggtgcggctgccgggcggaggggctcctcacttctcagacggggcggccgggcagagacgctcctcacatcccagacggggcggcagggcagaggcgctccccacatctcagacgatgggcggccgggcagagacgctcctcactgcctagatgggatggcggccgggatgaggcgctcctcacttcctagatgggatggcggccaggcagagacactcctcacttcccagatggggtggcggccgggcagaggctgcaatctcggcactttgggaggccaagggaggcggctgggaggtggaggttgtagtgagccgagatcacgctactgcactccagcctgggcactattgagcactgagtgaacgacactccgtctgcaatcccagcacctcgggaagccaaggctggcggatcactcgtggttaggagctggagaccagcccggccaacacagcgaaatcccatctccaccaaaaaaatacgaaaaccagtcaggcgtggcggcgcgcgcctgcgatcgcaggcactcggcaggctgaggcaggagaatcaggcagggaggttgcagtgagccgagatggcagcagtacagtccagcttcacctctgcatcagagggagaccgtaccttcttcttttt

SEQ ID NO: 42515 - DNA, 925 bp, Artificial sequence
  DNA replication origin
gaggtggggggtcagcccccgccaggccagccgccccgtcagggagggaggtgggggggtcagccccccgcccggccagccgccccgtccgggagggaggtggggggggtcagccccccgcccagccagccgccccgtccgggaggtgaggggcgcctctgcccggccgcccctgctgggaagtgaggagcccctctgcccggccagccgccccgtccgggagggaggtggggggggtcagccccccacacggccagccgccccgtccgggagggaggtgggggggtcatcagctcccccgcccggccagccgccccgtccaggagggaggtggggggggtcagcgccccgcccggccagccgccccatccgggaggtgaggggcgcctctgcccggccgcccctactgggaagtgaggagcccctctgcccggccaccaccccgtctgggaggtgtacccaacagctcattgagaacgggccatgatgacaatggcggttttgtggaatagaaaggggggaaaggtggggaaaagattgagaaatcggatggttgccatgtctgtgtagaaagaggtagacatgggagacttttcattttgtgctgtactaagaaaaattcttcttccttgggatcctgttgatctgtgaccttgcccccaaccctgtgctctctgaaacatgtgctgtgtccactcagggttgaatggattaagggtggtgcaagaggtgctttgttaaacagatgcttgaaggcagcatgctcgttaagagtcatcaccactccctaatctcaagtacccagggacacaaacactgcggaaggccgcagggtcctctggcctaggaaaaccagaggcctctgttcacttgtttatctgctgaccttccctccactattgtcctgtgaccctgccaaatcccc

SEQ ID NO: 42516 - DNA, 935 bp, Artificial sequence
  DNA replication origin
agccgccccgtccgggagggaggtgggggggtcagccccccgcccggccagccgccccgtccgggagggaggtgggtgggggtcagcccccccgcccggccagccgccccgtccgggaggtgaggggcgcctctgcccggccacccctactgggaagtgaggagcccctctgcccggccagccgccccgtccgggagggaggtgggggtgtcagtcccccgcccggccagccgccccgtccgggagggaggtggggggggtcagcccccctgcccggccagccgccccgtctgggaggtgaggggcgcctctgcccagccgcccctactgggaagtgaggagcccctctgcccggccagccgccccgtccgggagggaggttggggggtcagccccccgcccggccagccgccccgtccgggaggtgaggggcgcctctgcccggccccccctactgggaagtgaggagcccctctgcccggccaccaccccgtctgggaggtgagcccaacagctcattgagaacgggccaggatgacaatggcggctttgtggaatagaaaggcgggaaaggtggggaaaagattgagaaatcggatggttgccgtgtctgtgtagaaagaagtagacatgggagacttttcattttgttctgcactaagaaaaattcctctgccttgggatcctgttgatctgtgaccttacccccaaccctgtgctctctgaaacatgtgctgtgtccactcagggttaaatggattaagggcggtgcaagatgtgctttgttaaacagatgcttgaaggcagcatgctcgttaagagtcatcaccaatccctaatctcaagtaatcagggacacaaacactgcggaaggccgcagggtcctctgcctaggaaaaccagagacctttgttcacttgtttatctgctgacct

SEQ ID NO: 42517 - DNA, 1058 bp, Artificial sequence
  DNA replication origin
gccgggcggggggctgaccccccaacctccctcccggacggggcggctggccgggcagaggggctcctcacttcccagtaggggcggctgggcagaggcgcccctcacctcccagacggggcggctggccgggcaggggggctgaccccccccacctccctcccggacggggcggctggccgggcgggggactgacacccccacctccctcccggacggggcggctggccgggcagaggggctcctcacttcccagtaggggtggccgggcagaggcgcccctcacctcccggacggggcggctggccgggcgggggggctgacccccacccacctccctcccggacggggcggctggccgggcggggggctgacccccccacctccctcccggacggggcggctggccgggcagaggggctcctcacttcccagtaggggcggccgggcagaggcgcccctcacctcctggacggggcggctggccgggacggggtggctgccgggcggagacgctcctcacttcccagatggggtggctgccgggcggagaggctcctcacttctcagacggggcagctgccgggcggaggggctcctcacttctcagacggagtggttgccaggcagagggtctcctcacttctcagacggggcggccgggcagagatgctcctcacctcccagacggggtctcggccgggcagaggcactcctcacatcccagatggggcggcggggcagaggcgctccccacatctcagacgatgggcggccaggcagagacgctcctcacttcctagatgtgatggcggctgggaagaggcgctcctcacttcctagatgggatggcggccgggtggagacgctcctcactttccagactgggcagccaggcagaggggctcctcacatcccagacgatgggcggccaggcagagacactcctcacttcccagacggggtggcggccgggcagaggctgcaatctcggtactttgggaggccaaggcaggcggctgctccttgccctcgggccccgcggggcccgtccgctc

SEQ ID NO: 42518 - DNA, 1410 bp, Artificial sequence
  DNA replication origin
cctttacacaggggcaaccttcagggcgccagaagatttttaccaggggacagtgatactcctaagaggcgagttgggccgggcgcggtggctcacgcctgtaatcccagcactttgggaggccgagtcgggtggatcacctgaggtcaggagttcgagatcagcctggccaacatgttgaaaccccgtctctactaaaaatacaaaaaattagccgggcgtagtggcgggcgcctgtagtcccagctactcgggaggctgaggcaggagaatggcgtgaacccgggaggcggagcttgcagtgagccgagatcccgccactgcactccagcctgggcgacagagcgagactccgtctcaaaaaaaaaaaaataaataaaaaaaataaataaaaataataataataataattagccaggcatgatggcaggcgcctgtaatctcagctacttgggcagctgaggcaggagaatctcttgaacccaggaggtggaggttatagtgagccgagatcgtgccactgcactccagcctgggcaacaagagcgaaactccgtcaaaaaaaaaaaaaaaaaaaaaaagcgagttgctcgcttttggttgctcctcgactccattaggtcggacggtttgtccctaggcacggtgacctcgcctagtgacaaacacgccaccgtgcaaacccactgaacaactagaatctgtgcccaaagccctctaacacgatcggttgctcccctctcctcaacagagtcaacattttacatcctctggagagggacacaggttacgtcgcccattgctcctcaagggggccgcaattcaaacaaattttgaatcgaactaaaagcagtttgtttctccgaaagaaggtcctcggctgggggaacaagcttaaaaaaccacctacctttcccttcctggaagttttctggggcctgggcagcagcctgggcgctgctgtccgcatccgtttgagtgtcctcgtcggcaggaatctgggtgccttcgtcgccagcaatgtcggcgctgctttcataggtggtttcagacccacggtcgacaagaatttggggttcttgttggctagttacttccgatgttgaaactgttggtgttgaatcattttctgaagaaatggggagctgtccctcggggcactccatggcccacctcgttggggttgtaaaatggcttcctgtgtagtcatgtgacctggagggttccagaaccttcgtaaatgtaaaaggtttcttttatgtctttaagacgtaatactgttaacgacattgccggtgccggttcaagattgtagcagccacgtctccactgcctaacactcacccaaacttaatcgcagggaataaatattttcggaagactattctacaatcattttcttttgggaca

SEQ ID NO: 42519 - DNA, 2166 bp, Artificial sequence
  DNA replication origin
ggccagagaagatacaatgggctctgcccagcctcaggttgtggccaactcccagcgtgagaccttgcctggtgccaggaataaggtcaagggcaattccaatgctatttctaaggcagaggctggggcaggcataatgggctctgtccaggtccaggttgtggccagttttcagggtgaggtcttgcctggggccaaaaataaggtcaggggcaattccaatgctgtgcctaaggcagaggctggggcagatacagtgggctctgcccagccccaagctgtcgctaattcccagagtgagaccttgcttggtgccaggaataaggtcaagggcaataccattgctgtgcctaaagcagggactggggcaggcacaaggcactctgcccagcctcagattgtggccggttcccagggtgagaccttgcctggggcaagggacaagtctatgtccacttctgaggcagaagccacagcagaagatgaggcctatgcaaagcctgaggctgaggccatgcccacttctgagagtgagggtgggtcaggcactcaagcctgcagaaagactcagcctaacatccatgactactactggaatgggattggtgttgaagactggattgctgctgagcggtggatcaaatttaggtttcagaccatggatggagactgggaaaatagcgtgtcctgggctgatgatgagaatgaagccagtattgggtcctggagtggggctagtgataaggctgggattattcggtcttgggctgtggcttgtgatgagaccagtgttaagtcctgggctggggccagggctgagaatgtggttggtattgggacttgggctagagctggggagcaggccagtggagggctctgggctgggggtcagactagtgaggggacctgggctggggacaaggccagtggaggagcctggactggggctgagaaccaggccagtggggggtcttgggctctcgctgggaatcaggccattggagagctttgggctgcgggtcaggccagtgatgggtcctggcctgggggacaggccagtggggtgtcctgggttggggaagaggccattggagggtcctggactggggctgagaaccaagccagtgaagggtcttgggctggagctggggctgggaatatgagtagtgtttcatactgggctggggttgtggatcaggccggtggagggtcctgggctgggactagtgatcaatctggtggtgggtccaagcctagatttgaggatcaagccagtggagaagggtcctgggctggggctggtggccaggctagtggagggtcaatgttggggcctgaggaccagtccagtggaaggtcttgggctgacactgcagaccaagccagtggagggtctaggctgggccacgtagatcagtccagtggtggggcctgggctgggacacttgatcagtctggtggtgggtccaagcctagatttgaaaatcagaccacagaagaagggtcttgggctggggctggtggccaggctggtggagggtccaaggtggggcctgaagaccagtccagtggaaggtcatgggctaactctggggaccaaatcagtggaggattcttagttgggattgtggaccaggccaatggagggtcctggactggggctgggcatccagctagtgttgggccaaagcctatatttgaggatcaggtcagtggcagagggtcctgggctgatgccagggagcaggttgttggagattctaggctggggcttagggaccagtctagtggagattcctgggctggcactggggaccaggccagtggatggttctgtgtttgccctgggagtcagacgaatggagggtcttggggtggggctagtggccaggatgttggagggtctaggccagggcccacgaaccagtccagtgctgggtcctgggatagccctgggagtcaggtcagtggaagctgctggactggggctggggctgtggatcaggctggtggttgttccaaacctggatttgaggatcaggccattggaggggggttctggcctggtgctggggaccagactggtggaggctccaggccagggtctgaggatcagtccagtggaataggttcctggggtgtggctggtggccaggtccttggggg

SEQ ID NO: 42520 - DNA, 1833 bp, Artificial sequence
  DNA replication origin
tagggaccagtctagtggagattcctgggctggcactggggaccaggccagtggatggttctgtgtttgccctgggagtcagacgaatggagggtcttggggtggggctagtggccaggatgttggagggtctaggccagggcccacgaaccagtccagtgctgggtcctgggatagccctgggagtcaggtcagtggaagctgctggactggggctggggctgtggatcaggctggtggttgttccaaacctggatttgaggatcaggccattggaggggggttctggcctggtgctggggaccagactggtggaggctccaggccagggtctgaggatcagtccagtggaataggttcctggggtgtggctggtggccaggtccttgggggagctaggccggggcctgcagaccagtccagtggtgggtcctgggctggcactgggaatcagtccagtggaaggtcctggattgggcctggggatcaggctgttgactgttccaagcctgaatttgaggatcaggcttgtggaggaggctcctgggctggtgctgggagccaagccagtggagaatcctgggctggatctaggcctgggaatgaggccattggaggatctaggatgggatctgaggaccaggccactggaggatcctgggctagatctgaggaccaggccagtggaaggttccaggtcagttttgaggtggaggccaatgaaggattctggtttgggcctggagctgaggccgttatagggtcttggtgctggacagaggaaaaagctgatattgtgtccaggcctgatgataaagatgaggccactactgcatccagatcaggggctggggaagaggccatgatttgttctaggattgaggctgagaacaaggctagtagtggctcctggattagatctgaggaggtggcttatatgggctcctgtgtaggggctgaggctggggctggggctgaggctggggctggggctgaggctggggctggggctggggctgaggctggggctgaggctggggctggggctggggctgggcctgggactgagtctggggctgggatttggtcctgggatggagatgcaaccactgtagagtctaggcttggggctggggaagaggctggtgtagagtcctggaccttggctaggaatgtgggagaggatgagctaagtagagagtccagccctgatattgaggagatcagtttaaggtctttgttttgggctgagagtgagaacagtaatacgttcagatctaagagtgggaaagatgccagttttgagtctggagctggggataacaccagcatcaaggataagtttgaggctgctggtggagttgatatagggtcttggttctgtgctggtaatgaaaacacaagtgaggacaaatctgcacctaaggctaaagccaaaaagtcatctgagtcaagaggcatatatccgtacatggtccctggggcaggaatggggtcatgggatggagccatgatctggtcggaaactaagtttgcacaccaaagtgaggccagcttcccagttgaagatgagtccagaaaacaaaccaggactggggaaaaaactcggccctggtcttgccgctgtaaacacgaagctaatatggatccacgagatcttgaaaaactcatttgcatgattgagatgactgaagatccttctgttcatgaaatagccaataatgctttatataacagtgctgattattcttattctcatgaagttgttcgtaatgtaggtggaatttcagttattgaaagcttgctcaataatccctaccccagtgttaggca

SEQ ID NO: 42521 - DNA, 1210 bp, Artificial sequence
  DNA replication origin
gatcttggggccggaggccagtccaacccttggagcaggaagaaacgcaaagttgtcaagaaccaagtaggtcataataagggtgatggcattatttgggggtggagcatggtggcgactgcaactcgaatgggcccgtggaccccttccatatccccctccttccctcttatctacaccatttcggagcttgcaaaagaaattgttctgcaagtacaagacagggaagaaaatagctgagaaggggtgggcgtcaagagagtccaggggttgggaggacgttactccaaattactgtttggggtacagggtccttggtgttggtccgtcgaccaagcactcacttctgaagtttgtcagtcttgaaggtttagtggaagcggaaaccgaggtgagggaggtaagaaattgctccggagcagaggtagttggtataatgacacggggtggggggggggggcggcggtgtcctggtacatttgagatggaggagttggcggaggcaagggcggagttggagacctttaggcatttcacgccagtacggcttttagatattctcacttcattttgttacaaggaaaatgttaacgatgaaaatgtgtggcgacatcttcggaggatgccaatgatgggagtaggggtggaggtggaatggagggttagaggaatcatcgaaggaggaagagggagggagataatgaattccaaagccgcagctctgtgaggagaggagggtaaccgaaggcgggaaacattgggcaaggcagttgtaaagggctaggaattcagaagagggatgtgtgccccgtcccgggtgagatctatatgtacccagagctctcagtacccctctccccgcgcccttggtctgcaggtttgcacgaagcagtgcacttggaagcaagaaagagaaggaaaaaaaactgcctggacctctgtgggtgcatgtgagggcgccactgttcacaggacatctggaagggcaggggtggcagggaactttaacgttctagggtggggtggtggaacgtgaggttggagagtctttaagcggggaaaatttccaaacttagcttccgggtggaagaaaggaatcagtgatctagatatcaagccccgagtctctgccagtatctctgtatttttgtacgtttgtttgttttgttgttgtttcagtctgtttgcgttcaaagacacaaaaaggagc

SEQ ID NO: 42522 - DNA, 927 bp, Artificial sequence
  DNA replication origin
agcaagaaagagaaggaaaaaaaactgcctggacctctgtgggtgcatgtgagggcgccactgttcacaggacatctggaagggcaggggtggcagggaactttaacgttctagggtggggtggtggaacgtgaggttggagagtctttaagcggggaaaatttccaaacttagcttccgggtggaagaaaggaatcagtgatctagatatcaagccccgagtctctgccagtatctctgtatttttgtacgtttgtttgttttgttgttgtttcagtctgtttgcgttcaaagacacaaaaaggagcctgaaatctgaaatgcatcctttattcctaggtcgagctgcctcagagccggcccgcagtagctgcagactccgcccgcgacgtgtgcgcgcttctctgggccagagcgagcctgttttgtgctcgggttaagagatttgtcccagctataccatgggccgcactcgggaagctggctgcgtggccgctggtgtggttatcggggctggtgcctgctactgtgtatacagactggcttggggaagagacgagaacgagaaaatctgggacgaagacgaggagtctacggacacctcagagattggggttgagactgtgaaaggagctaaaactaacgctggggcagggtctggggccaaacttcagggtgattcagaggtcaagcctgaggtgagtttgggactcgaggattgtccgggtgtaaaagagaaggcccattcaggatcccacagcggaggtggcctagaggccaaggccaaggcccttttcaacacgctgaaggaacaggcaagtgcaaaggcaggcaaaggggctagggtgggtaccatctctgggaacaggacccttgcaccgagtttaccctgcccaggaggcaggggtggaggctgccaccccacca

SEQ ID NO: 42523 - DNA, 847 bp, Artificial sequence
  DNA replication origin
ggtgagctgcggggtgtttggggaagagctcagagactgggaaatgggaatctgctgggagcctagggccgcaatccggaaagggagctgtggcctgggtgttggcccctagtccaccaggacagtgccggaggggaatggctggatatgggggcgggggtggtgagatgcaacgcgatatgtcagcagaaccccaagagaggtaataggggtgggaaacctctgacaaccaggcctccgaattagaaaagagttttgtgttctggggactagtccgtccaccaagcgctcagtggcggcagtttcccgtctttctgcctgtggctgtgtcttactgaccatggctctgtgtctagtgggtccaagcctctcccgggtggccagtctttctgtaggttgcggcacaacgccaggcaaaagaagaggaaggaatttaatcctaatcggtggaggtcgatttgagggtaagaccatctggggaccctaggagggacgggggtggcggcgggggtggggagaaggcagagaaggtaataatctaggtacatgtctgagtccgaatgtgtttcttgcactccccggactgtggcgaaatggcgtgctttgtgtgtctgtggttggggggaagtgggggaaatgacagcagggaaacctatcggatagtttgttcgtaatcctcctctctcaacagcacttactctccatgttttcgatctgtcatcctgcaggtctgctgtagcaggtggctccgcttgaagcgagggaggaagtttcctccgatcagtagaggtcggtgtgggcgtgggggctgcctggaatgggggaggggttagaaatcgccggcact

SEQ ID NO: 42524 - DNA, 1051 bp, Artificial sequence
  DNA replication origin
cggctttccagacctgaggtgctcaaacgcggctcattttggtgggcggtggggaaagggggagggggaaacgaaaagacttttgatagactttacgaagaatccgcttacttcctttccagccagtgttttttggttttgtttataatattcaggcccgcaccccacattccgtcctgttttgagaggaggagggaagagaaataaacgtggcagcgcatagaaggccagcagggaggttgggaaagggtaaccaggaggcgggggtggggcatgcaatttggtaacaatctgggcggcacactcccaccctgactttccccaccaccgccccggcaccctcccatcccccagccgaccctctgtgatttgggagtgctgggaaatgggtgtaccagctgctgttggagaggtggcgggtttggcgctgtctgggcttcacgggaggtgggggggagggggcggaccctgagagaatctggtattaaaccgccttgttaactcgcagactgctttccagacacctccggcccacacagccgttcaccccccgtcttttcagtcctggaaaaggaattcgggtatgcaggcgggagaaatggcggttgttggggggatttgtgggaagtgggaggtagagcccatagcagagaaatcgtggaaaatctcgaccctgaacccgaaaaggcagacgttgaggcccctcttctgcaggctaacgctaggcctaggggctggggagcgaaagatgggtgatcctgggaggggaacactgaattgtttggcaggagtcccccataccgcgtcccatccagcttttgctgcaccctcgccccgctcccctcccgcttcgttgcaggagaaggggtgtggcggtgtgtcctggagaaatggcggacgggggcggggcaaagcggaaggagggattgagtgcctggggagcctgcgcaggaggaggattgaggtgggaggggtggggtgagaagagttgaaggaattgagaggtagaatcatttgacattctgatgtgcaaacacgaaaaggcagttac

SEQ ID NO: 42525 - DNA, 1066 bp, Artificial sequence
  DNA replication origin
gagacgcaagtgcaattgtccgcgcgcctcgctgcgatggcggcggcgccgagcacagtcaccccgctggcggcggagtcttcccctcaggaagctaccgtctctgccgcctcctcctcctcctacaccgcctgcgcggcagcggcggcggcggcggcggcggcggcagtaattgttcctgcctcctccgccacctccgcccctgcctgcccgcctgccggtggctgtggcgacggcggcggcggcggctttggcggctccactatggcggcggcggggagggggggcagtagttttaaagtagacacccgcccttgcctcagagaaggtgagttcccgtcccggggtgcgggggcggccccatctccttcgctgcctctcttcagcccgtccgagattgggctgggcgcggttcgccactgccccacccccacctgccgtggcgcagtaaaggccaagctcgccccgccccgccccgccgtattagccccgagtgtgcaagatggactgaagcagagagggccttccctacctctcccacctgtaaaggatgggggcccccaggcaaaagaattgcaggtactcatgaggcaggagtttgaagggaaaaaaaaataccacataatttctctcccagccaggacaccttagtgtgctgtaggaagctgaggtgtgatttggaagagagaggaggcaagatagaagtgctgtgggccaagagggtcaaggataagggaacggggaccgatggagaaaggggcggagataaaagaggaaataccgaagaaataagggggagtaaaccccctttggtgttcaacgtcctgcagtgtagaaactagaagtagaatatttacagagagatggcgttagaaatttgggcaggttacaagtgtatacttgagctttaaagtaggatctgtcggattttaggaaggtaaggtctggtggaggggactctactagggaaagagaggaagagagtgtggcagaagtacagatttcaggaatcactttggagagttttctttggctatttgaggatgtgacctagtaaagcaagatt

SEQ ID NO: 42526 - DNA, 1430 bp, Artificial sequence
  DNA replication origin
gagaggtagggaaggccctctctgcttcagtccatcttgcacactcggggctaatacggcggggcggggcggggcgagcttggcctttactgcgccacggcaggtgggggtggggcagtggcgaaccgcgcccagcccaatctcggacgggctgaagagaggcagcgaaggagatggggccgcccccgcaccccgggacgggaactcaccttctctgaggcaagggcgggtgtctactttaaaactactgccccccctccccgccgccgccatagtggagccgccaaagccgccgccgccgccgtcgccacagccaccggcaggcgggcaggcaggggcggaggtggcggaggaggcaggaacaattactgccgccgccgccgccgccgccgccgctgccgcgcaggcggtgtaggaggaggaggaggcggcagagacggtagcttcctgaggggaagactccgccgccagcggggtgactgtgctcggcgccgccgccatcgcagcgaggcgcgcggacaattgcacttgcgtctcgattccgttaagctcctttagccccgccttccgttagccccaccccctttgttcctctttttaacgcttcagctcgagcctcgttctcgctcctcagtccaccaatcggagagctttaagcccgccggccgtttccccctcccccactgccttgcgtcaccccacctccctttggaggggaagcaacgacggccaagggcaaagggcaaaaagcgcgggatgtgaaagcacgtgggcctcgcacagtgaggcttctttggagatctaatctaaaaccaatttaagaggaaaaaatgtctggaaactattgatctcacctccaaaatatctctgaaatatatcttcacctggctttttttttctctttctttttttttttttttttttttttttttgagggagagtctcgccctgtagcccaggctggagtgcagtggtgcgatctcactcactgctacctctgcctcccgggtcctggttcaagcaattttgcctcagtgtcccgagtagctgggattacaggcatgtgccaccatgcccagctaatttttgtatttttagtagagatggggtttcactatgttagccaggctagtcttgaattcctgacctcatgatccacctgtctcggcctcccaaagtgctgggattacaggcgtgagccaccacgcccggcccctggctttcttaaagcacttagtacagagaatagaacagaagctttcattctgacacattgtttccgtggcctcttaaaggactgcctatctatcgatctgcccatcttaattacaataacttcctgtgaattcagcacccaatagaagtactagaatattactgatcacttaaatctcatcttgtccccccaacctctcctctcaaagagacca

SEQ ID NO: 42527 - DNA, 1897 bp, Artificial sequence
  DNA replication origin
ccactttgctacacaaacgcaccgagactccgaccgtccccagcctccggtccctcagggatggaaggtgaggtatgtcaggaaagagaggggggcccagctccaaggtgaggtgtgtcaggcaagagcgggggcagagctccggtgacgcggtgctcacgtgacccgcccggcgcctacgtgggcaccagcccccgcgcccgcccgccagcccgcccagcggtcgggtccgggcgcccgcgcagaatcagctgtctgagctgcccaggcggcgggggagcagcgagcgggcttcagcgagccgcaggaggcacaggcctgtcctgggtccccgcaggtcagtgtgaaggcgtgcgctgccggcggaccctgggacaggggtggagggggctggcagtaggattggggagggggcggagaagggatccggtagattggggaggagggggatgcggagtcgcgggggcgggggcagtggagggagaacccccgaagcaagcctggctcgccttctcgacgcccccttgcactgagtcctccatccattttagtgctggaaatggggggtgggggtagcgaccccgcagtgcgacagtgaaacgtagacatattctggaaataaccccttctcacaatctacacccatggaaacacttgatctccgcaaaaatgaggtggcgctggggcaggttgcctccggggaagggggacacagagacaaacgcagtttggaaagcatcctggtttggtgcccgaggcctggaaagaaatggcggctggggtgcgggggaggtaggggaggaaaacggtgggtaagcagggcctggactcaggaaagggaaccgagtccctgtgagcccgctaagcgcgcagcccctgcccctgtctcctgtctgtccgcaggtctgcgcgtctgttgttcccagcgctctgagaggcctgaaaaggaagagcaacctgtccagaatccccgcaggtccgtgaaagcagggggctgcatggacaggggcccacaagggttgagagtgtggagggcacagtcagggccgaattggggcccctgcccatccccttacctacatgaacacacaccttaccaggctgaaccagtgcagagaaggtggcagggcctgccagggaacagctggctcacgtgtgtgggaggagtggtgggctacgtggtgggcagaaggccctcttggaggcccagtcagcttaggggaaccctcaccaggggtgagatgcaagtagtatccagacctgcattccaccccatgccctcagtctcccatgtctcctctttgtctcctcttccctccacacccatcccccaggaaaggaaaaggaggggaaatctcgacatggaaaaactcttcaatgaaaatgaaggaatgccttcgaatcaaggaaagatagacaatgaagaacagccaccgcacgagggaaagccagaagtagcttgtattctggaagacaagaagttagaaaacgagggaaacacagaaaacacgggcaagagagttgaggaaccgttaaaggataaagaaaagccagagagtgcgggaaaggcaaaaggagaaggaaagtcagagaggaagggaaagtcagagatgcagggaggatcaaagacagagggaaagccagagagagggggaagggcagagggtgaaggagagccagacagtgaaagagagccagagagtgagggagagccagaaagtgaaacaagggctgcaggaaagcgcccagctgaggatgatatacccaggaaagccaaaagaaaaaccaacaaggggctggctcagtacctcaagcaatataaggaagccatacatgatatgaatttcagcaatgaggacatgataagagaatttgacaacatggctagggtggagga

SEQ ID NO: 42528 - DNA, 1707 bp, Artificial sequence
  DNA replication origin
ggcaaagtcgggtaccctctctgatcagctgtcacacctggcgataatgggcatcagagagagatgccttgcgaggatgctgtgagctgcgtcaggtaaagcacctgagatcagaaagccaccccctcctcctcttcttcttgatgacccccactcctttgttacacacaccctctcccaccttccgcaacctcctggtccctcggggatggatggtgaggtgggcgggaagggggtggtggtggcctagctcccgtgacgcggtgctcacgtgagtgaccaggcgcctacgtgggcaccagcccccgcgcccgcccgcccgcccagcggtccggtccaggcgcccgcgcagaatcagctgtctgagctgcccaggcggcgggggagcagcgagcgggcttcagcgagccgcaggaggcacaggcctgtcctgggtccccgcaggtcagtgtgaaggcgtgcgctgccggcggaccctgggacaggggtggagggggctggcagtaggattggggagggggcggagaagggatccggtagattggggaggagggggatgctgagcgggccggggcgggggcaggggagggagcaccccgaagcgaacctggctcgccttctcgacgccccttgcactgagccctccatccattttagtgctggaaatggggggctgggggtagcgaccccgcagtgcgacagtgaaacacagacttattctggaaataaccccctctcacaatccgctcccatggaaacatctgacctccgcaaaaacggggtggcgctgagacaggttgcctccgggggaaggggcacaaagaggcaaacgcagtttggaagcatcctggtttggtgcccgaggcctggaaagaaatggcggctggggtgcgggggaggtaggggaggaaaacattgggtgagcagggcctagactcagaaaagggaacggagtccctgtgagcccgctgagcgcgcagcccctacccctgtctcctgtctgtccgcaggtctgcgcgtctgttgttcccagcgctcttggaggcctgcaaaggaagagcaacctgtccagactccccgcaggtccgtgaaagcagggggctgcatggacaggggcccacaagggttgagagtgtggagggcccggccaaggccaaattgggacccctgcacataaccccacccacgtgaacacacaccttaccaggctgaatcagttcagagaaggtggcagggcctgccagggtatggctggctcacgtgtgtgggaggagtggtgggctacgtgctgggcagaaggccctcttggaggcccggccagcttaggggaaccctcaccaggggtgagatgcaagtagtatccagacctgcattccaccccatgccctcagtctcccatgtctcttatttgtctcctcttccctccactgtcatcccccaggacaggaaaaagagaaatctcgacatggaaaaaccctacaataaaaatgaaggaaacctggaaaacgagggaaagccagaagatgaagtagagcctgatgatgaaggaaagtcagacgaggaagaaaagccagacgcggaggggaagacagaatgcgagggaaagcgaaaggctgagggagagccaggtgatgagggacaactggaagataagggaagccaggaaaagcagggcaagtccgaaggtgagggcaagccacaaggcga

SEQ ID NO: 42529 - DNA, 1407 bp, Artificial sequence
  DNA replication origin
gattgtgagagggggttatttccagaataagtctgtgtttcactgtcgcactgcggggtcgctacccccagccccccatttccagcactaaaatggatggagggctcagtgcaaggggcgtcgagaaggcgagccaggttcgcttcggggtgctccctcccctgcccccgccccggcccgctcagcatccccctcctccccaatctaccggatcccttctccgccccctccccaatcctactgccagccccctccacccctgtcccagggtccgccggcagcgcacgccttcacactgacctgcggggacccaggacaggcctgtgcctcctgcggctcgctgaagcccgctcgctgctcccccgccgcctgggcagctcagacagctgattctgcgcgggcgcctggaccggaccgctgggcgggcgggcgggcgcgggggctggtgcccacgtaggcgcctggtcactcacgtgagcaccgcgtcacgggagctaggccaccaccacccccttcccgcccacctcaccatccatccccgagggaccaggaggttgcggaaggtgggagagggtgtgtgtaacaaaggagtgggggtcatcaagaagaagaggaggagggggtggctttctgatctcaggtgctttacctgacgcagctcacagcatcctcgcaaggcatctctctctgatgcccattatcgccaggtgtgacagctgatcagagagggtacccgactttgccaagagcgcttagccccagaactccacagcccactttcaataccggctctgcctgactccagagcccggggggtagtggtgcctgccaggaagctgagctgccaccttgagtggcggtgttcctggggttctgtcctgggcctcctctctcctcagtcctcaagttgtctctccctgtgtgatctcattcatttccagtaaacaccgatgactcccagatctacagctccaggctgttcccttctccgtgtctcatatcagctttgccaactgtttattggacatcaccgcctgagtatccctgagggacacggtatgtaaaaaccctgtaccacaaattgatttcaaaagcccatgtaccccaaattgatttaccaacttccttcttataatctccattggcctttctccacacttgaaagttaccttccaacagttgaccagttttcatagaaagagaatgtcagacagctagaaaggaaagcattcaaacgtttttaatatgaactgcagatccacaaattcatcataacccttggttcacaacatgctcttctcattgactactcttctctcccctgctttcccttcttttcccccactgtttactttcgttccattgtttttctctttcacatttgtgaaaccaccactaaacccaaag

SEQ ID NO: 42530 - DNA, 1294 bp, Artificial sequence
  DNA replication origin
tgtgtgtgtgggcagccaagtggctcctgtcatctcgtggcaggcaaagcctttgcggtcctgtgagcaccgcagctaaccaatggctgttgtacatgtggctcttatggtcacgtgagattccgcaccctcccattcacgtgaagattgagtgctccgaatcctgtcagagaggtgcttccggctccacaccctgactcaggcggaagttttattggacttcggctcagatctgaagccttccggcaactttcatatcctgacgcgctggaaggaagtctggtacgagtggaaccagccggtactagaagtttactgagaattgggctttaaggcgtggctgagcaatctccaaatagcagaggctctgagggggtggggtggggtggggtgggtggggggtgccgggggtgcgggagggtggggggtgcgggaggtgcgggagggtgggggggtggggagggtggggggtgcgggagggtcggggtgtatggggggtttgggtggaggtagcggaggacttccctaatgtggccgaacttgtgaacacctggcagagaaactgtgtgtgcgtgcgtgtgtgtgtgtgcgtgcgcacccatgcatctatgtctgccatccgccttgatcctggactcacaggagctgttgttggaggagaaggcactggggcagaatgtggggctgggggataggggtagggttggtagtggggcggcagggattcatgaactcgtaagtcgtttctcaggggcagggctgtggaagcctgatgggattccccccccttcccgcccccacactaaaagccctacccttgcctgtcactctgcccgattcaccgtctgtgccaggtgattctgtcctctgcccctcctcagaccatgttgttattaaggacactcgagactgcctagatcccagtttgtatagacgattccagacccaatcttaatttctgtctcttatttgattatgtaaagattctctttgtttccatgatttatttttctactaaaccttctaaacatgggctcaggggggtgggcgaaagggagagaggggaatcgggaatttttttaaaaagagaatttgatatttcaataaaagtgtccaagtcgtcatgatgtgaagattcagaatttacttgttatactttatttgaactccattggctttaaaaagtacatttgggagtgggtgacattttttttgtgtgtgtgtgcgcttaggatctctcagtagcttatagtagtatagcttcacactcttttgtttctgattctccccccat

SEQ ID NO: 42531 - DNA, 1286 bp, Artificial sequence
  DNA replication origin
tgtgtgtgggcagccaagtggctcctgtcatctcgtggcaggcaaagcctttgcggtcctgtgagcaccgcagctaaccaatggctgttgtacatgtggctcttatggtcacgtgagattccgcaccctcccattcacgtgaagattgagtgctccgaatcctgtcagagaggtgcttccggctccacaccctgactcaggcggaagttttattggacttcggctcagatctgaagccttccggcaactttcatatcctgacgcgctggaaggaagtctggtacgagtggaaccagccggtactagaagtttactgagaattgggctttaaggcgtggctgagcaatctccaaatagcagaggctctgagggggtggggtggggtggggtgggtggggggtgccgggggtgcgggagggtggggggtgcgggaggtgcgggagggtgggggggtggggagggtggggggtgcgggagggtcggggtgtatggggggtttgggtggaggtagcggaggacttccctaatgtggccgaacttgtgaacacctggcagagaaactgtgtgtgcgtgcgtgtgtgtgtgtgcgtgcgcacccatgcatctatgtctgccatccgccttgatcctggactcacaggagctgttgttggaggagaaggcactggggcagaatgtggggctgggggataggggtagggttggtagtggggcggcagggattcatgaactcgtaagtcgtttctcaggggcagggctgtggaagcctgatgggattccccccccttcccgcccccacactaaaagccctacccttgcctgtcactctgcccgattcaccgtctgtgccaggtgattctgtcctctgcccctcctcagaccatgttgttattaaggacactcgagactgcctagatcccagtttgtatagacgattccagacccaatcttaatttctgtctcttatttgattatgtaaagattctctttgtttccatgatttatttttctactaaaccttctaaacatgggctcaggggggtgggcgaaagggagagaggggaatcgggaatttttttaaaaagagaatttgatatttcaataaaagtgtccaagtcgtcatgatgtgaagattcagaatttacttgttatactttatttgaactccattggctttaaaaagtacatttgggagtgggtgacattttttttgtgtgtgtgtgcgcttaggatctctcagtagcttatagtagtatagcttcacactcttttgtttctgattctcc

SEQ ID NO: 42532 - DNA, 913 bp, Artificial sequence
  DNA replication origin
aggagccagaggaccatggggatgggaaggcgtcagggttgcgaggcgggggatgccgcgccttcgggagccagaggagccgaggttggggctggcgcttcgcgtctgcaccgccgcccgggcgagcgagtccgcgcctttgtcttccagggggccgccttctgcgctcgatgccgagccctcctgggggccggtccctggaaacaaggccccggggttgggaggcggggagcgcggacccttaaagggacctgtccgcagtagctgcaggtcggaggcttagaggatgaggagtttggaggccgcccggaatgggccccctggggcttggtcctcattccttctcctcccgtggccgttaggctgggcgccagaaaaagctaatagttatttttaaaagtatgcaaactgctcttgacagactggcctacgcacccggccctgctattatttatttgttagttccagttttccagctctgagcttggcgtctaatggcttggcagaggagggtcttagggtaaactcgacggaatggaggcatgttcggcacttctggctgcttgggggcctctccattctaccccaagcactagacatagtatcttactgcacgagggtggggctgggcttgcgaatgagaactctgccctccgatttctgggatatcctattgtctcttctggacaaactcgggacgcttacagggcaccaggcatttcgtcaggtccacagccatgcacctctaagcctcatctctttacctctctctttgcagagaaaacatggtgaaacaagactcgcttttatttggtttatcccattctgctgaagtcctgggtttgatcctagttagctgtcccttcttacaacgtttatacaccaatgccacaaggagctattatgagacgtg

SEQ ID NO: 42533 - DNA, 1828 bp, Artificial sequence
  DNA replication origin
ggctctgggcctctgaaggcaagtaggggtgcgtgaggtggggggccgtggtgtgggggtggtccgccagggtggaccggctggcaacctgccccccggaccctgacagcctggcaacgaggagacgatccgttcggagccgggcgctagagagaggtgcgcagtgcccgagatccctggctatggggaggcggtgactggtgcgggccaggccggaccaagggctgaggggctggctccagaggcaccgtcagatcgtctggaggagaaccgcgctgaccgcttcccagccagctttgcaggcgcccgcgcgcagccctcgacggtttcggtaccgagagacggctgtgggggaggctcctgcgggagaaatggccaaacgggagccgtgttggggggcgcccgggaggcagttggggggcgcctgggggggccctcgtgggccagcgtcccagctctgtgcctagcccgtgggaggtgggtcgcgttcgctgctccgggccctgattccggaaaggggcctgtggggccccgtgtcctgggtgctgtcccttcccacagactccaggttgatgtcaaagtctgtctgcgcggtaggtctggcgtattctgacaggacacagtgagcatctgtagaggagaggcttgaaataaaggaggagcacgaatattccctggatttctggaggtgtgtggggatgtggggtgggtgccaaacactggagaaccgaatcggggtgggggactgcgaccagagcaggtcaggcatccaggagcacctcttaatcttcccctctctaatggtgttccaggcgcttcccccaccttccatccccatctgcctcccccaccgtcctaaactgggggcttgaaagggtgagctttggaggtaggggtgatgagggagacatactgacaagtaccaattcacgacctgttttctagaatatgtggcgcccttcccccattttctgctgcgcagagcaaggggatgtggcgcacctagtggtgaatcctcagaattggagaagggagtaatgagaagagtatgacgtcaagagaaggagttgttatctctagaaccttgaagcagggcctaaacaaaacgagaatattccaccagcaaaaccccgaatgttgaaagacagatatcaataatatggggattcttatccttagcgttggtctctctaccaagggctttactgccacccctcatttcctgtcttactttttcatctgtttgtccataggcctgctttaaggctggccagttctgcaagaaaggcaaggaggaggagactggctcacacctctggaggttggtgagaagggggagggggcaattcaggggacagttggagaaagagagcatggcaggtggctttgagaccagtgggtgcagacccacttctactctgctggatttgcacagtgccagcatcctttttatttcttgcaggggacatgagataggtgtaggttgtgttgtgactcagaaagacctgagagcagggaccaggacacaggaaaccatagatacattgaacccttgaatgggaagacagatatttgtcacaggagccagagtgcttgcctatctaccattctccattctctcctgtatgtttacttgtctgtaggacccccttctgtcagctgtggggcttgacactacttgaacaagaaaaggagggggaaactgcaccacataagtgaaggttggtatgagagtgggtatacttttgggcggggtagtggagaccagcatgggtccgggagtgcttagggtccaatctggggacttcttggcccctcccattgccga

SEQ ID NO: 42534 - DNA, 1660 bp, Artificial sequence
  DNA replication origin
gagaggagggggaggccgacgacctgggccctgggcctctgaaggcaagtgcgggtgcatgaggtgggggtccgggttgcgggggtggtctggcagggtggaccagcaggcagcctgccccgcggaccctgacagcctggcaacgaggagacgatccggtcggagccaggcgcttgagagaggtgcgcagtgcccgagacccctggcgatggggaggcggtgaccggagcgggcctggccaagggctgaggggctggctcgggaggcaccgccagatcgtttggaggagaaccgcgctgaccgcttcccagccagctttgcaggcgcccgcgccccgccctcgacggtgtctgtgcccggagagggctgtgggggaggctcctgcgggagaaatggcggagcgggagccgctgtgggggcgcccgggaaggccgttggggggcgcccggcgaggccggcgggggtcggcgtcccggctctgtacccagtccgccggaggtgagccgcgtttgctactccgggtcccgattcccgaaaggggcctgtggggccccatgtcctcggtgccttcccttcccacaggctccaggttgatgtcaaagtcttgtgtctgtgcggtaggtctggcgtattctgacaggacacagtgagcgtctgtagaggagaggcttgaaataaaggagcacgaatattgcctggatttctggaggtgtgtggggatgggggttgggcgctaaacactgattggggacccgaatcggggtaggggactgtgaccagagcaagtcaggcatccaggagcacctcctaatcttcacctctctaatggcgctccccccaccttccatccccacctgtctcccccaccgtcctaaactgggggcatgaaagggtgggctttggaggtgggggtgatgagggagacatactgacaagtactaattcacaacctgttttctagaatatgcggcgcccttcccccattttatgctgcgcagagcaaggggatgtggcgcacctagtggtgaatcctcagaattggagaagggagtaatgggaagaatatgacgtcaagagaaggagttgttatctctggaaccttgaagcagggcccaaataaaacgagaatattccaccagcaaaaccccgaatgttgaaagacagataccaataatatggggactcttatccttggcgttggcctgtctaccaagtgctcttctgccaccactcatatcctgactgtcttactttttcatgtgtttgtccataggcctactttaaggctggccaattctgcaagaaaggcaaggaggaggagactggctcacagctctggaggttagtgagaagggggagaggacaatgcaggggacagttggagagagcatggcaggtggcagatccacttccacctgtagtagaagtggcagacccacttctattctgccggatttgcacagtgccagcatcctttttatttcttgcaggagacacgagataggtgtaggttgggttgtgactcagaaaagacctgagagcagggactaggacacaggaaaccatagatacattgaactcttgaatgggaagacagatatttgtcacaggggccagagtgcccacctacctaccaagcactcacactccattctctcct

SEQ ID NO: 42535 - DNA, 1559 bp, Artificial sequence
  DNA replication origin
agaaaaggccaaggccagaggaagggggtttggggtgggggaaaggaagggtacagaccctcccaaataaccgaagatgggtaaactccaaccgcaaagcgatgatgccacttgtgggccctcagattggagaggacggagatgagtgacggggctgtgcgcactggggcaccgcgcacagacgggaggaggggggtgtctgtgtgttccaaaggggggagtaccagttaactggccgccggcccgtgggggttggtgagaaggagggtgagcttggcggtgacgcacggccctcacgtgaccgggagctgcagagctacgcagccttcggtgcagtcgtcactcgtgtctcgctaccagctccccgctgccctgcgctcggcgggctggcatccggcccgggggaaagcggaccaggtaagggccccggggcccgcgcgccctggctaggccagcagaggctcaccgacccccccgacgagcgcagaacagcgcaggggatccccgccagctttctccacaccccaacattcttgggaacatagtggtcccctggggtggggaagcagtggcggctggggctccaggggcagcagagcaaccaagagcgatggaaaaccattcccgagtccttgcaggaaaacggtgaacaccacggggggcgaggcggccgagggtgggagcggggggcgggagacgcggggcgctggcagtgaggagggccctaggcggagaaggagctagcgttccgctgcagcagccccccctccccacaccccagcccttctgcaggtctgcggggccaagtgtcccggcggcgcacctcgtggcgagaatcgggagaaggaggagactacaaggataggcccaggtcagtgcgagggacggtggtgggggcgggtgcagagtccagtctgaggtcccctcccaactcccccatctcccgtcctccattttggtgcctgccgagatctagggatggatctgtagggaaaatggtgggtttgggggcaggtaggggaagacacgagaggtgggggggggggcgggctcgaatgggggccccctagtgggcgcacgaaacctctctggtgggaaacgtgaaattaaacaaaacaaaacatgttgatagccatgacgcggaatcctgaaaaatgagtagccgtgcctctgtcctcggtactgaagcgttcaccagctgttcagccccttctctctccttttgtctcctaggagtaatggagtccaaagagaaacgagcagtaaacagtctcagcatggaaaatgccaaccaagaaaatgaagaaaaggagcaagttgctaataaaggggagcccttggccctccctttggatgctggtgaatactgtgtgcctagaggaaatcgtaggcggttccgcgttaggcagcccatcctgcagtatagatgggatatgatgcataggcttggagaaccacaggcaaggatgagagaagagaatatggaaaggattggggaggaggtgagacagctgatggaaaagctgagggaaaagcagttgagtcatagtctgcgggca

SEQ ID NO: 42536 - DNA, 1085 bp, Artificial sequence
  DNA replication origin
atagatcaacaggatcccaaggcagaagaatttttcttagtacagaacaaaatgaaaagtctcccatgtctacttctttctacacagacacagcaaccatgcgatttctcaatcttttccccacctttcccccttttctattccacaaaaccgccattgtcgtcatggcccgttctcaatgagctgttgggtacacctcccagacagggtggtggccgggcagaggggctcctcacttcccagtaggggtggccgggcagaggtgcccctcacctcccggatggggcggctggccgggcgggggctgacccccccacctccctcccggacggggcggctggccgggcagggggctgaccccctacctccctcccggatggggcggctggccgggcgaggggctgaccccccacctccctcctggacggggtggctgccgggcagagacgctcctcacttcccagacagggtggctgccgggcggagggtctcctcacttctcagacggggcagctgccaggcggaggggctcctcacttctcagacggggcggccgggcagagatgctcctcacttcctatatgggatggcgggcgggcagagacgcttctcactttccagactgggcagccaggcagaggggctcctcacatcccagaggatgggtggccaggcagagatgctcctcacttcccagacggggtggcggccgggcagaggctgcaatctcggcactttgggaggccaaggcaggcggctgggaggtggaggttgtagcgagccgagatcacgccactgcactccagcctgggcaccattgagcactgagtgaacgagactccgtctgcaatcccggcacctcaggaggccgaggctggcggatcactcacggttaggagctggagaccagcccggccaacacagcgaaaccccgtctccaccaaaaaaatatgaaaaccagttaggcgtggcggcgcacacctgcaatcgcaggcacttggcaggctgaggcaggagaatcaggcagggagtttgcagtgagccgagatggcagcagtacaggccagcttcggctcggcatcaga

SEQ ID NO: 42537 - DNA, 1449 bp, Artificial sequence
  DNA replication origin
atctgaagccgacgtgtgcagaagtccctctcctccaggtaccagatccctgtttccgtggaggaaggcagacttcagactgaaggacagagaaggcaactgccctacagccctgcaggtcggtacaagccggggacccctgaggtagggatggtaatgcacataggctacagaggatcggatctgctttctagataccgccctgttccacccccattcattttggcgcagaaatttttttgtgttgggcaagaggtatgggtaccagcttttatttccctggagaagtgcaggcttctggcagaaggaaatgtgagaaagagtcatttccccgagatggctacgaacccatccacagcctgtggatccctgtggttgggatggcagagggcaaagaccagagcgggtccaggactggattctctccactcctttcccgatgctcactcatttggtgcaagaaatggagggcttggtgcggggcggggaggggggaggggggcggaactcgagagaggtcaagggttgagaattgggtaccagttgggaactcctaggaagccggcgaccgggtgatgtctgatggaggaggaggaggaccagggaagagaacagcgacgaaacggcgagaaaacggcctgatccctgcaaggcagcgggaggcgggcacagtcagtgaccccaggctgctgagggcggaccctgcaacgggtccaggcctgagttccctgtgtcttttctccaacctccctccattttggagccggaaacggtgggctaagggggtcaggggaaggaggtgctgtagaaaaagggagacagaggtttgatctggggatcagctccctatccaggaggagtggcttctgaagtaggaggattgagatgaggtagcagcaagaccaaaaatgttaccgggtttggaaataatttgtctcttgcattgcagaaaaatgtgggctttctgtgtatgtggggagggaggaggtggcaggagtgttttggacatttctgccctgccccctatctctgtcatcaccattttcagagaagtggtgggctctgctatttggctaccctagggtgagggatttggaatgtagagatctgagtgcatcagaacactctgtcttcagaacatccttgtctctaaccctactcattttcgtgccagaaaagtgagataaaaatttgggaggaagattcagaaacatagaaacgctttggaaataatctttctcgcctatttcccacaagtagaacaatggaggctcttaagaaagagctgcgcgcggagggggaatcagagaatgcaagggaaaaggcgaggaggtgataggagctcggaaagttttgacaaatacggtcccaaagaaccagtgtccaagttaccagtcattcactttctcaatttctcattcacccacctgtttcttgtctttctgcagg

SEQ ID NO: 42538 - DNA, 876 bp, Artificial sequence
  DNA replication origin
cgctcccttctcggcagtggtacctgttcccggtgtccctgaggacgtgcgggccaggtacggccccgaaagtaggaagcggagggggagcaggtaagggacccggagggggtccctggggttggtgtgggggagcagccccggcctgcggatgccccatccccgggcagcagcgcggagacgcagccggtccacgatgcagccccggggccccgccgcgggaccgcgagccttgtgtgagcggaggggtgcccggccccgcgggagccggcgatcctgaggctacgacctttcggaagcacctgcctccgtcaccagcgcaagcttttccaacacccctgctccgcccttcttgatgcagaaaatggtggtcagcttggggggctgggcggctgaggcggggggcgagagcggctaggagggcccgggcccggcgtggggaaggggccgggtggcggcgggtcctctctagcgttccgctgcagcagcccccactcttcccaccccggccgtctgcaggtttgcggggccaagtgttgcggcgacgcacctcacgtcgagaatcgggaggaggagactgcaaggataggcccaggtcagtgcgagggacggtggtggggagggggtcagaacatgaggaaagcccagtctgagaccccaatccgtgccttcacccccacacttagcaatcccccacccccaccccttcttcgtcctccattttggtgcctgcagaggcctggagatggatctgcagagaagatggtgggctttgcgggagagaagggcacagactggctcccctcgcccccccgagggtacatggggcctctctggtggaaaaaaaatgaaatttaaaaaaggcctttgaaatcc

SEQ ID NO: 42539 - DNA, 1427 bp, Artificial sequence
  DNA replication origin
ttcggtgcagtcgtcactcgcgtctggctaccagctccccgctgccctgagctcggcgggctggcattcggcccggggaaaagcggagcaggtaagggctccggggcccgtgagccccggccatgccagcagcggctgaccgacctcggcgacaggcgcagaacagcgcagggggtccccgccagctttctccacaccccaacatgcttgggaacacagaggcccccagggatggggaagcaggggcggctgggtttccaggggcggcagagccaccaagagcgatggaaacccacccccgagtccctgcaggaaaacagcgaacaccgcggggggctgggcgttcgagggtggggtgggggtggggggcgggagacgcggggcgctggcagcgaggggagcccgggctcggagcacggaaagggccgggcggcggcgggtcttcgctagcgttccgctgcagcagcccccaccccccacaacccccaccccggctcgactgcaggtctgcgaggctaagtgtctccgcggcgcacctcgcggcgagaatccggaggagaaggagactgcaaggataggcccaggtcggtgcgagggacggtggtggggcgggggtcggaacgtaaggaaagcccagtctgagaccccaaccccctccaccccatcccccactcctataccggtcctccattttggtgcctgcaaagctctgggaaagaatcccgggaaacgaaaaatggtgggtttgggggaagggaggtaaggggagaaagctggagggaggggctttaattggaggccccgtagaggacgcgcggaacttctaaggtgggaaaaaacgaaattaaaaaatcctttgatatcagggctctgaatcctgctggtcagagcaccaagcattcagtctctctccttgcctttgtcttacttgtgttcaaagaaaaacaaccagaaaaaaaaaatctcatcatggcaaatattcaccaggaaaacgaagagatggagcagcctatgcagaatggagaggaagaccgccctttgggaggaggtgaaggccaccagcctgcaggaaatcgacggggacaggctcgccgacttgcccctaattttcgatgggccatacccaataggcagatcaatgatgggatgggtggagatggagatgatatggaaatattcatggaggagatgagagaaatcagaagaaaacttagggagctgcagttgaggaattgtctgcgtatccttatgggggagctctctaatcaccatgaccatcatgatgaattttgccttatgccttgactcctgccatttatcatgagattaatactgtgattcccgctgttttctttttccttgcattttcctaatatgcctttactgatccgtttgctgtgaaccctatgttatttccatgtgtcaag

SEQ ID NO: 42540 - DNA, 983 bp, Artificial sequence
  DNA replication origin
cggttatttccagaatatgtctacgtttcactgttgcactgcggggttgcccccccgtactccatttccagtactaaaatggatggacggctcagtgcagggggtcgtcgagaaggcgggccaggctcccccgcccttgcctccgaccgctccgcttccccctcctcaccagtctcccggatcctttctccgcccctccctactcctactgccagccacctccaccccttccgtggttccgccggcagcgcccaccttcacactgacctgccgggacccgggacaggcctgtgccttctccggctcgcggaagcccgctcgctgctcccccgctgcccgggcagctcagacagctggttctgcgcgggcgccaggaccggaccgcagggcgggcgggcgggcgcgggggctggtgcccacgtaggcgcccggcgggtcacgtgagcgccgcgtcacccgagctcggccccccttgcctgacccacctcaccatccaaccccgaaggaccgggaggctggggacggtcggggtcggggtgtgtttgtgtagcaaaggggggtcacggagaagaggaggagggggtggctttctgaccccaggtgctttacctggcgcatctcacggcatcctcgcagggtatctctctctgatgccattatcgccaggtgtgacagctgatcaaagagggtacccgactttgccaagagcgctcagccccagaactccagagcccgctttcaagactgtctctgcctgactccagagcccagggtggtgctgcctgccaggaagctgagctgccaccttgagtggcagtgttcctagggttctgtcctgggcctcctctctcctcagtcctcaagttctgtctccctgtttgatctcattcatttccagtaaagaccaatgacttccagatttacatctccaggctattccctccccagaatctcagacctatttttgcattcccatcagaaat

SEQ ID NO: 42541 - DNA, 1714 bp, Artificial sequence
  DNA replication origin
ctggggctgagcgctcttggcaaagtcgggtaccctctttgatcagctgtcacacctggcgataatggcatcagagagagataccctgcgaggatgccgtgagatgcgccaggtaaagcacctggggtcagaaagccaccccctcctcctcttctccgtgacccccctttgctacacaaacacaccccgaccccgaccgtccccagcctcccggtccttcggggttggatggtgaggtgggtcaggcaaggggggccgagctcgggtgacgcggcgctcacgtgacccgccgggcgcctacgtgggcaccagcccccgcgcccgcccgcccgccctgcggtccggtcctggcgcccgcgcagaaccagctgtctgagctgcccgggcagcgggggagcagcgagcgggcttccgcgagccggagaaggcacaggcctgtcccgggtcccggcaggtcagtgtgaaggtgggcgctgccggcggaaccacggaaggggtggaggtggctggcagtaggagtagggaggggcggagaaaggatccgggagactggtgaggagggggaagcggagcggtcggaggcaagggcgggggagcctggcccgccttctcgacgaccccctgcactgagccgtccatccattttagtactggaaatggagtacgggggggcaaccccgcagtgcaacagtgaaacgtagacatattctggaaataaccgcctctcacaatctgctcccatggaaacatctgacctccgcaaaaacggggtggcgctgggacaggttgcctccaggggaaggggacacagagacaaacgcagtttggaaagcatcctggtttggtgcccgaggcctggaaagaaatggcggctggggtgcgggggatgtaggggaggaaaacgttgggtaagcagggcctggactcaggaaagggaaccgagtccctgtgagaccgctgactgcgcagcccctacccctgtctcctgtctgtccgcaggtctgcgcgtctgttcccagcgctctgcgaggcctaaaaaggaggagcaacctgtccagaatccctgcaggtctgtgaaggtggttgtgggggagctcaatggacagggccctataagggttgagagtgtggagggcccggccagggccgaactggggcccctgcccatcccccactcacatgaacacacaccttaccaggctgaaccagtgcagagaaggtggcagggactgccagggaatggctggctcacgtgtgtgggaggagtggcaggctacgtggtgggcagaaggccctcttgggggccctgccagcttaggggaaccctcaccaggggtgagatgcaagtactatccagacctgcattccaccccatgccctcagtctcccatgtctcttatttgtctcctcttccctccattcccatcccccaggacaggaaaaggaggggaaatctcgacatggaaaaaccctacaataaaaatgaaggaaacctggaaaacgagggaaagccagaagatgaagtagagcctgatgatgaaggaaagtcagacgaggaagaaaagccagacgtggaggggaagacagaatgcgagggaaagagagaggatgagggagagccaggtgatgagggacaactggaagatgagggaagccaggaaaagcagggcaggtccgaaggtgagggcaagccacaaggcgagggcaagccagc

SEQ ID NO: 42542 - DNA, 1392 bp, Artificial sequence
  DNA replication origin
ccattgtgttgggtaaggtgcctgtgcgtgggcaggaacaggggctaggggctggaggacccggaaggccgggaggtggggggcctgtgagaagagggagaaaggaaagtctagttgatccccaggaccactcgtagcttgagaaaagggactgagccgctcccgaggtcggagtcgggggcaggtgacagtgcaggggggcgttgctgagtaatcccgagctgctgccagagccgagcagagaggcgcagggctccgtggggagcgggtgtggctcagtgcgcatgcgccacagccgactagctctaagagctgggggtgaggtgagaggacctgggtcggaggtagttgggactatgtgtgacatctcactttctaggtccgtaatgctaacagtgcccctgtcgtagagatgccagcattcttgtctcccaaggaagctttttttccttgtgttcagctcgcttgatgtcatccaaaccttatctacctatctgtccctgggcagtctactgaggaagaagtgtcctggggacgatgccagattgctatctagtgtgcctttgggcttatagccctagagctgtcgttgtgagcagtgaaaggttagatgtgggactccacattggaccctttgagttgcatataggatataaatgtgggcatgaatgtaggaatagcgtttcagtggcatgacagctgtggcatttggagtcggcatggatgtagctgataacttgttagctctgcaaaatgaatccagtgcgtcagagggtttccgcgctacgaagcacccaccaccagcaccaacgccaagtattgggttgtattggaaacacactcaaacattcaatcatttctcatccgtgttgaattttacataaatatagccgcgcccaattcttcagtgcaatatttccaattattgtgccagcattcaacagtgagttgagtagcccttaccagtgtgtcgccacaagatgggctttccccacaggtccaaccatggctcctcccctgtacagacttccaacagtgccactctcatccagtgcctagccctccccagttgctcttcccctatcgatccctgcagtacacatccctttcaagacttgcctccgagcaatctgcactactgattttgagcatcattccactccatggcaactgaactgatgcgaatttgcttttctgcctctcttctctccatcatcatactaaaatgtactattttcaaaggttcaacttctttttcttcattgtactgcctcctcccccacctccactcccacctctaagcattcccaactaaatacaataatttgaataaggctttgtgggtactgcagattcagaaggtttcaagtgtgttaaagaacaaagagctgg

SEQ ID NO: 42543 - DNA, 883 bp, Artificial sequence
  DNA replication origin
gaaagcaaccgcggctgcccggaggtccgaactggagggtggccgcagccgtgacttccttgggaaccgcgctgcctcgactcggctacctctctgcgaagcactcgctaagccgggcagccccggggtcgcttagcggcccaggaggcgccagcgatcctgttcccctgcagagctatggggaccggaaggcgaaacagagctgtcgacgcgggagcatacgctgcccaccagtggagcgcaggtaaagaaagagcgcgcgatttcccggcgcggagaggggtgggggaagccccaccaggactgggcggcgcccggcttggagaatcagtaactgcgaggcaggggatggagcactcccatggcctggttgcgctgagaaaggagttgtggctcatctggatgctgccgactgggtaggatttatgatttgcctggattgaagtgggcgggggtgttgtcgggcgtcgggggcgggtgttcggggaggtggcaaggggcgggagaagacgatcgcaagctgtcttgaaccccttttgcatctcctcatctcttcctgggaaggaatatgggggtgggaggtcatccaacttctagtccctttctctccggcaggtcatcaaagccgaatccgaatttgaattctgtgcggctgattgcagagctggtaggccgacggtttcccgcaggaaatgtacggggggcgggagtgcaggaggcactttggcttgtgttcagaagatgggagagggaattttccgcctggcgacagaggaggcggtggaggggaggtatcaggttttcagaagaggctgctcccaacccttcctttccttccttcgcggcacagtcttgaggccctgaggactgggatctgcgaccc

SEQ ID NO: 42544 - DNA, 1098 bp, Artificial sequence
  DNA replication origin
gcagaggcagtattcagtctcgggtctgtctgccctttccaaagcctggcatcttaatagaaaatactttggagaaacttgatcttcactcccataaaatggaaaggattggatttatacaatggattacatatttaaggtgagatgtttctcaattattgttcacttttggtcccccaaaatgatttacaaaaatggcagaaggagttggggattgaaaagtacaatttctctatcaactactggcctgaatgcccccatgtcaaccccctctgacagatatagtatggagatgactacaaattattttgccctttctgctccttttacagctcaggtgggtaaggctccaagatgtcattgaatttctaaaggtcacacatcaagttaataacaaaactcacttagaatgctggtatctcatactaccccacttgcttcctggcctttctggggttggtacaatagttgggagtccttgcactgccaaatcctagcccagttttctttctgctaaatcatcctgccttatggcatcagtgaacacatgtttataaatggcagggaggaagtggaacattattgcgctctgaggtagaagagggaacaaacatttacctcactacctgtacttatttaggtgcaggtaagatttgggaaagaagacctttggtaggagagctgaggactgttgggggctcctgtggatttagtggcctgggtatctgggaggagtcccctttggctctggagaaatggaagtggggctgccaggggctagaggtgccccagagggatgcaaatagtgggcctcttgagcttttactcctgctcagttctcagctaaagggtaagaggcagagggaccctcccagtgtactggccatgagcgttaaggaagctgaggcttaaggccatcatggaatgcggaggagggggaggtggtgatgggctgagtacaggaggctgagcctccatgtctctccaccaagaggtgagtgtggctccaggggaggggagtggtggtacagtgagactgtgggaaaatggatggagcagggtggtatgaatgagactgtggggatatggatggagtgg

SEQ ID NO: 42545 - DNA, 1162 bp, Artificial sequence
  DNA replication origin
ggacaaatatttacttcaccacctgtccttatttaggtgaaggtaagactttggaaagaagatctttgataggagagctgaggactgttgggggcttctgtagatttagcagcctgggtatctgggaggagtcccctttggctctggagaaatggaagtggggcttccaggggccagaggtggcccaaagggatgcaaagagtgggcctcttgagtttttactcctgctcagttctcagctaaagggtcagaggcagaggggtcctcccagtgtactggctatgagggtaaaggaggctgaggctcaaggccatcatggaatgtgggggtagggggaggtggttatgggcagagtacaggaggctgagcctccatctgcctccaccaagaggtgagtgtggctccaggggaggggcgtggtggtaaagtgagattgtgagaaaatggatggagcaaaggggatagaaatgagaatgtggggatatagatggaacagggtggggttatgaatgagattgtggggatgtggatggagcagggtggtatgaatgagactgtgggatatggatggagcaggggggatagaatgagatcgtggggatatggatggggcagggagataggaatgagattgtggggatatggatggagcagggggtatagaatgagattgtggggatatggatggagcaatggggataggaatgggattgcggggagattgatggagcaatgagattgtggggatatggatggagcagtggggataggaatgagattgtggggatatggatgcagcagtggggataggaatgggattgtggggagatggatggagcagggagaaggggctagggaagagcagagctgatgggagtgattttggaaggagtagtacaccaaggcggattcttggcctggcagcctcgggaaggctgcattgggcttcttgcagtgtgtggcttctactcctccctggggacctcagcttggactctctggttccccattggcctgctagcttaattagagtcccaaccttcatgcccccatcacatagcccagggttctgtgtgaaacttgtgggtctgcagttcctgccaagctttgtgtccctgtcactgtagatggaagccctccgtcctggccatcatgcccctcc

SEQ ID NO: 42546 - DNA, 1562 bp, Artificial sequence
  DNA replication origin
cgcctgtctgccgcagcccccgcccgccggcccgccggccagccggcccgctcccccttcttgctagcagtagcttcggggccggaggctgtgcggcgaggccgccccctcgccccgctgattggccgcgtcgcccggcccgtcacgctcttttgtctcagtcgccagagactgaaagcaaccgcggctgcccggagggccgaactggagggtgggcgcagccttggctgccttgggaaccgtgctgcctcgactcggctacccctcgctgggcggtcgtgcgcactcgctaggtcgggcagccccgggtcgcttagcggccgaggaggcggcagagatcccgttcccctgcagagctacggggaccggaaggcgaaacagagctgtggacgcgggagcacatgctgcccaccagtggagcacaagtaaagaaagaacgcgcgattgcccggcgcggagaggggtgggggaagccccgccaggactgggcggcgcccggcttggagaatcagtaactgcgaggcaggggatggagcactcccttggcctggttgcgctgaggaaggagttgtggttcatctggatgctgccgactggataggatttaggatttgcctggattaaggtgggtgggggtgttgtcgtaggtcgggggtgttgttgggtgtcgggggcggggtgtgttcggggaggtggcaaggggcgggaggagacgatcgcaagctgtcttgaaccccttttgcatctcctcatctcttcctgggaaggaatatgagggtgggaggttatccaacttctagtctctttctccctggcaggtcatcaaagccgaatccgaacttgaattctgtgcggcggattgcagagctggtagggcgagggtctcccggaggaaatgtaagggggatgcgcgggagggcaggaggcactttggcttgcgttcagaagatgggagagggaattttccgcctggcgacagtggaggcggtggaggggaggtatcaggttttcagatgaagctgcttccaacccttcctttccctccttcgcggcacagtcttgaggccctgaggactgggatctgcgacacccagtggacaaaagtcggccgtaccccagaggctaattttctcacggcaggcacctgttgcagaggctgcacgtaaaataaaggcgaacgctagtttccgagctcatgtaagaatctgagaaataacgggggaaacgttgacaagggggtgtgattgagacctgaggccatgaggttaatggtttcttattatcataaatctgtgacacacaaccattgagttccgttttgagggcccagtatcagctcccaacactatgtcatctagaattagaagcaacagttgtcgcccctcctggagtacaggcaggaggggatggatgtggctctgaaaaactacctactagcccagggacacctgctagctctggaatgttgtaattgccagtctcctgcagggtattgttaaggcactgggcagatataaaatgcactgcaaggctattcaggaagatagagaatgctactgcag

SEQ ID NO: 42547 - DNA, 1308 bp, Artificial sequence
  DNA replication origin
gggtttcaaagtaatgatcttgaacctccaagctaactccagtgaaaaggaggatgggggtaggtgtagcatttattcctcttttcactctacctggtttcagaaagaaattatgacagcatatctaggtaaatcattcaatagcatttatagagtgaatttgagaaaaggtgagcagcaaggggaactatattctaatcttggagagatgagtgggcaaatcccctccaaggatagactttgggagaggtagggaggaatagggggctgtaagagccaggtagtgttgggggaccctgtggctttgggggcttgatgaagctgcctcctgcgtgggtggtggggtcctctttgcctgtggtgagatggaggtggctgccaggagccagaggtgccccagagggatgcaaaaagtgggtctcttggacctttactcctgctcagttctcagctaaaaggtcagaggcagaggggccctcccagtctactggccatgagcattaaggaggctgaggcttaaggccatcatggaatgcggaggagggggaggtggtgatgggcagagcacatgaagctgagcctccatctccctccaccaagaggtgagtgtggctccagggaaggggagtggtggtaaagtgagactgtgataaaatggatggagcaagggggataggaatgagattgcggggatatggatgaagcaggggggatctgaatgagattgtggggatatggatggagcaggggggatatgaatgagattgtggggatatggatggggcagtggggatctgaatgagattgtggggatatggatggagcagggcggataggaatgagactgaggatacagatggagcaggaaggatctgaatgagattgtggggatgtgcatggagcaggggggaactgaatgggattgtggggatatggatggagcaggggggtatgaatgagactgtgaggatatagattgagcagaggggataggaatgtaattgtaggtatatggatggagcaggggtgataggaatgagattgtggggatatggatggagcagtggggataggaatgggattatggggatgtggatgaagcaagggaaagggcccagggaagagcagagttggaggtgattctggaaggagagcactccaaggtggattctgggcctggcagccccgggaaggctgcattgggctccttgcagtgtgtggcttctactcctccctgggggcctcagcctagacccttttgtccccatcagcctgctagcctaattagagtcctaacctccactcccc

SEQ ID NO: 42548 - DNA, 1103 bp, Artificial sequence
  DNA replication origin
tggctcgggctccctctctggccctgggctgctcccgcgcccgcccctgcccccactctaacctgtccgcagtcgccgacgctccggggtgtgcccgtcgcagctcactggcaggctgggcgtcgcggcccgctgctgcttgccggggtgcggggccgcgcgaagaggctgctcgaggccacagcggcccaccggccacccagttagcgccccggtggcctctgcagcttccgccgccgccagactcagcccgtcagcgcagcgccgccgcccggcccggccaggcccgccccgcccactgcgctcgccgcttgcgactgcagcagtctgcccggcgcccgcaaggaggggaagggcggcgggaagccactccccgtgccccctgctggaccggaggaggaactgaacctccgcccgccgcggccccaagcggcccgccccgccctctacgcatcgaatcagggattcaggccgctagaaaggctaggcgcctctggccaacctcctcctccgctttctcactcgtactcgactactaagcaggaaccgcagtcccagaaaagggacttggccaaggtcacactgcgggtgcgtgagaaaacatccagatgccctggttcccagcgcactctttcattctgtcccaattcaacaagtatttattgagctcctgcagtgtgtgcccagcaccgtgcaatgaggtgtaggagaaatcgtccaagcagggaaaatagtcccttcctcacccttgatcacctaactccaagaaccctacgctgcagccactcgcctactcagagctgctggacacgtcgtactcttttgtgctttgcgccttttgctcataggcaccctgcttggaatgccctgccatttctcccctgctaatccttcaaactccagctcaaacgttatctcctcagtgaagccttccctgactcccaaaggagactaaggcacacctgctaatttgccccctccctcccgtagaaaatatattatggagcttaacttgttcaacttgaatcaacttgttaggtgttatatagtgtactttgctgtttatctcatctctcttctctatattctgggcaagtgattcc

SEQ ID NO: 42549 - DNA, 1181 bp, Artificial sequence
  DNA replication origin
ccttaaccacacacccccccagccctttgtatatgtatctcaaatatccacctatgttaaaacttgaggctgtatctagaacgtcttcaacccaccccccaagatttgatctaacacgtaaatgcttgcatgagagaagtctccagaacactaccttctactgaaatcagttaggaggagatacaccctctgaataaatttgtgtaagtcagtccatcctaagccttactctgtctcttcaaaggggaaggaaaccaagggatatgtcatatgaaggaatcctccagatttaagcttaccaattttggcagagcctaaagcgctaaggcaaacagttaataaaggaggaggaaaaaaagagagaatcgactagtttcctagcgctcaactaaaaaaaaaaatggggtaggggtggtggcggcggggggaacaggactgtgagacagattaaaaatagggaaaatgaagcttctagctttaaatgttccacctttcaacgccacttttcaaaagatctatggattgatcttgagccatccaaattcctctacagcgtaccggaaatggaaggggttaaacttttgcagatggatgcaaacaggggcgtatctaaaaatcaagggtgggggtttgggattcgtagggtacagatggggggagggaagggaagcaagggagggagaaggtagggaagggaggagtcgctatagccagaatatgaatgaggaaaagagagtaaaacgccggtcgaaaggaaaataggagggcaggggtgaaaatagggagggggggcagggaaggaggccgggaatgagcgctggtcgaaagcaggtgggggagggggcgactggaagcgcagcccgggacgaaggatcaggagcggggggcgaccagaagtggaaaatccacccctgccctcaggtgcagttcgtacctgttggtgtggaagcggtggagcgggtcggtgcgatggcaggaggacagctggcagccgaagtcgctgatgtccaggcagcccggctcctcgctcgggcaggtgcccaccccgcgaggaggtcccaggagtgggaagggctcctcgggggttagaaacttctcgtaggaagtgatggccgaggcctcgtcggacatggttggagatggcctggctcgggctccctctctggccctgggctgctccc

SEQ ID NO: 42550 - DNA, 1362 bp, Artificial sequence
  DNA replication origin
gaggccagggctgcctccatggagaccacagagaagctggagagaatcctcctgcagctccttggagatgctgatcaggaaaagtacacctattgggggcagaaggagggagatctccggtcggtcgaaacagccacatcttatttctctggaaccacgaacccctggtccagagcctcatcagaacctcttcctgtccagctccctgcctcatactcatactcatactcaagccctttttcctccttctcagacatacccactatatcccctccacaagcaacagtcacagcaccagttccgcctcagctgccttccgactgggaggcctttgatactagcctgtggtctgatggggggccccacagaatagaccatcaggagcacccaagagacaggagatactccgaacctcatcagcaaagacctccagtatatcgcaggccaggggactgggactgcccttggtgtaacgctgtgaatttttcacggagggatacttgcttcgactgtgggaagggaatctggctgcaaaaacctcattgagtgcagaaatgcaaaatagaaccgaagcatgtatatctcgatggcgaattaattttcagagggcaggcttgtggtggcgggggccggggtggtaggggaagaaggctgggaagagtgggggaaggaggtgagacaatggtacctttacgaataacttcagagataggggtggtgactggaggagggggaggaaagtaggggttgtgaaagaggtgtagaagtggggtggtggccaggggaggtatagattggggtggggagagagagacacatggagacagacatgttttggtgaccccctttgtattccagagcacttgcactcaataccccagaagtgctgcagcttttatttgtgtatgtctcgctcgctctctccctgccctagtgtctggtaaaagaggcaaccatgtgtataacaccccaccctctactcgcatctaggccttagatgattggagcaggagtggatatttggcccatccagagccaaatggatttttcatgctagacactctgaacagagaggccgattccatgatgttgagcaatgaagctgtaggccacttggagttggggccaggaccggagccatggttgctgaggccactgctgaggcttggccctggctgtggaggaatagaactgggtgctttccagaggcaagtgtctttgggagtcactagtacgtggttccagggagcagacaggcacagaggaatcatcctgtgactccagagagatggagagagcagcagcacaaccacttttcacttcctacagttgtgctacatgaaaatcccctttacacagaac

SEQ ID NO: 42551 - DNA, 949 bp, Artificial sequence
  DNA replication origin
ccatgttggccaggctggtcttgaactcctgacctcaagtgatccacccgcctcagcctcccaaagtgctgggattacaggcgtgagccacagcacccagcctagtcctttataattgaaaaaatgtatttattgaaaaactttcctagtaaagtttttctcattttgctgtgaaaacattgctgtataataccagcctgttctgtggactgtaattgaagaactactgattcaaggaatgggcagaggaagagaggccagcaaaagagaccatgaggaatggttccagaggcaggaggaaaaccaagaaagcgtgatcatggaggccaaaagaggggagagtttcggaaatgaggacttggccaatagtgtcttttgccacccagagttcaaagaagtgatcaaatttggcaattaggaggtcattggtgacctttggcagagccctttcactgagataatgtggctggagccaagctgctcttggttgaggtgtgaatgggagccaggaaaagcggaagtctagcatgtagactactttcaacaaatttgagagtgagggaaagaaaatagagagaggaaagaagggagggagagaaagagatcaagagagaaagagcaagttaggggagcaagagaacatacagtggagggggagttcttgttttttgggataacagagacaggcattttataatcaggagagaaagagctggtgtagagaagctgaactttcccgaagacaagaagcataacaaatggctggaggaagggcccaggaaggaggtggatgaggccaaggcccaggcaaagggattagcctttaaccagaggggcaccttgtcccctgagaagagagggctggaggggaaggaagttggaaaggcaggccaagtttgaggggggagtggggcatggcactgaggtaattcacgcttgaaggcctctg

SEQ ID NO: 42552 - DNA, 1710 bp, Artificial sequence
  DNA replication origin
gaagtgagcgagggctagtcccggaccgccgggccaggggtccggcggcagcagacgggtaccgtggcggccaaaaaaatgctcctgtaccgaggggcccccgccggccctggcgcgccgggctgcgggctggcccggcccggcggcggcccgcaggccttcgggatccgcctgagcacggtaggtccggggcccgagggggcggacgcgcgcgcgggcccctgggctgcggggggcgcgcggggagggcccggcgggccgaggcctcacgcgggtcgggaccttctctcgcccccagatgagcccccgctacctccagagcaactccagcagccacacgcgacccttcagtgccatcgcggagctgctaggtgagtggcgagggcgggcccggccgtgttcgcccgaggcagtggtgccagcgtggtgccgcggacgcgagaggaatgcgcagagccgcgcggggcgggccggggctggggtgggggcctcggaaccggccccggctccgcaggcggaggagggggatggctctctcgccaggaactaggttccgctcataaaacggaggaaacgaggtgtgtctgaagcgttaaagacaccagtgtggtttttctctcgcgctcgtgacgttcgggcactttaggatagcttagttagtaatcaaaaggagatgcataaaaacctcgggccctgaggcagctgggtccgcaggggctggcgaccgacggaggatgcctagctagcaaaggggcgtagaggaccgaggcgggtcctggggaaaggtctggaaagcggagttccttaacttttgagacaagaaaagttaggaatgatgggacatctcttaagagatgacacgagtgcatttggctccctgctactgcggagggctgggtccgtggtccacgagcgccctcacaccgctggaatgaatattgaggacttaacctctcgctccaccggtgtttgcttttaaagtgttttcagttgatcccttcaagccaattacaccagtttttgcagtagtgtgctactgtgtggaaagcaaagaagaaacgcagtcctgcacaaaacgcagcagcatacagggcgcattatacatgctttgaaaatcgaaagaaggaagaagtgtttatgggcaaggttgcacagaacaaactcttgaaaatgttttcaaagctccccaaatgaaccccggtctctacttaagcagtcgctgtggccatgccatgagagttatcttgggtaagaagtcaatgggtagcaggggacttacttggaagggtgataagaatgatagagacctttgatgattaaccataacacggaatgctttacaatatgtgtaatttaattagaaggtgaaaggcaaaaagtggaattgatacgtttggaaccctagagcagagggactgtatctttgaggtttggtactgtgccttggggctgtgcactgaacctctgcagaatggaatacaatccaagttaagtatgtaatttacaagaaagactacaagggagcaaaaagtagtgatttacatagtgggggatgggaaagcgaaatgtattgttctctcatggttggcacggtgcagaacgtgatatacctgtgctgtgcttactgtactttccaggtgatttaatgagtttccaatttgtaattttggatatttgtgattttggccataagcattaccttaaagaacc

SEQ ID NO: 42553 - DNA, 991 bp, Artificial sequence
  DNA replication origin
cggggcgcctccgggagcagatcgcggccacaggccctgggcctcggccctggctgtcgggactgtcaggctcgacagtcactcggatgctgggcggaccctggggaggcagtcccaggtggcctcgcccagagcctcctcccagggcacaggaacctggcaccctcggcaaggtgggcacagtggctgcaccactggctgggtccccaaagcgggcactgctcctacttccagccccgggccccgaagtacggtcccagctctgcacccctcctgcctctcgtgctccatgtgcaagcgcagcaccaccctgggcccagctccgcctcggggcccctctctgctagaccacatagctccgtcgctgacgggtgacctggcccagctccactgaggcagcccccagggcggcaggctgcgggggaggtagggagggtgggcgggggcgggttgcctgcgtcttccccacaccctctccacagccgtggcgtaatggcagcagccgctctggacagcacaccgctgtcatcaacatctttccaggtggggctgatgttggtctgggaccacacttggagaaccagtgctttaggggttgtgcagagtaggcgtgaaggtcaggggtctctggtcctgcgaggccttgtgcagaggcagggactgtgccacatgacctggaggaggttctagttctgataggcagggctctgggcggagctccacaacctgctcctgaggttcctacagttgtcaaagagcacgggccacctccaggcctcctggcaaaagttcaacctcttctagagttctctagctgctactgtcatgcctccctcttctcgggtggggagagggtggtggagggaaccctggggcacatggcccaagaggagccctgagccctagagcagtgatggttctcaaacttgagcaagcatcacaatcaccctgggtaacacgcagattaccgggcccattcccagagtttctg

SEQ ID NO: 42554 - DNA, 1085 bp, Artificial sequence
  DNA replication origin
gcccagcgaggacctgaagcccctgcctcaggctgcgagggggcacagccggtgttgcacactccaaggacccggcaggagctaggagcaggcagcagccccacccaacccctctgggtgcagcagcaggcgcccaagtcagggctgtggacccagacctctctgccctcttgagggcctgggaaggctgcccctccacccttgcaggcttggaagtgcctgctcctgctgcctggcttttccccgctgttggcacccactccaatctccgagcaatgtgggggccaagccttggtgttctcgcagcctggccaggggtgcatgtactggggccagcgctgacatgccagcgccctgctgcctcagacttctccagaatttgggtgcagacgcgcacaggaggggacgccaaggtgggggctgagagcagctccgcgctggcctgcaggagccccttggcataagcaggctgggcaccatggacagcggcaggaggccgaccggcttctgggctgaagggggcgggtcctcagtgaggccccatcttcaggacagggtgtgcctgaaggctgggggccgggctgccaggccggcagaccagagtagggacttgtggtgccttctccgggcccgcctatggtcacccatggaccaatcggtgtgcacttcctcccctctgaggcccatgaaagccctgggatcagccagagcagagcagaggaaggagagacgatgggacaaccagctgccgagaagagctaccctctctgctgggagctgaacacttgtggggacgacctgcttgcagagaggagctaccctctctgctaggagctaaatacttgatgggacaccctggctgcggaaaggagctgccccctgcaggtcttctctgagcagttctattgctcaataaagcacctcttcattttgcccacctttcacttgtctgtgtacctcattcttcctgcaggacaaaaactcgggacctgctgaatagcgaggctaacacaaacagggctgaggcatgtcccttgctcactatgctgcggaagaagagaaagaaagaagagctacagcctttc

SEQ ID NO: 42555 - DNA, 1333 bp, Artificial sequence
  DNA replication origin
ttgggctgagacagcgggcgcgcccccctgaaggcagcgcgcctcttaccttcctccccctcctcttcctcctcctcttcctcctcctcctcctcctcctccgcctcctcagcggcgcggcagcggcggcgcagcggcggcggcggcggcggcggcagcgggactagggcacccgtgcccccgagcccggcatgggcttggggctcagtggcgccgggcggcggggcgggcagaggttggcagggcggcagcagctggcccgggacgcggggagctggcgcgcaggcggcgggctgcgggcaggatggcaggagcgcgcgcgggctcctcgggcgggcttcatggctgcgccgcgggcggcaccatcgccgtggctcgctcgtcgctctctcgctccaggagtgcggcaggctgcgaggtgacggatggcggcgaggcggccggacggccgaggaggggaggggagaaggggcggggggagggggagggggaggaaagaggggagtgcagaatgaggggcctctccggcgcctcccgaccctcgagtgctggcgtcgatttccccgaatgggaaagcggcttaaaggcgcagttcctggctcgggtcactactaaaaataagcaaaaaattgacaattggggaaagaatctcccaagaacaacccagcaacccagccacccagcctggcgctgcctcacttcttgaatctgaccgttacggccggactctgccgggaactgctggctgccgagagggcaagccaatttccaaagtgaacccgggaaaggggggcggggagtgaactgcggagaaggggcagcaggaacgcttgcttcggagactccgttccctggcccctgaccttgcttctcgccccttgtttgctcgccttctgctggggatgccctccctgcagctcccctcctggtcaccatcgcaaacatccacacgcaccttgagtttcggctcgggctcctgctctcagcgcctctccccagcactggagtgtgagcggcttcgagcccaggcccaacgccaggagcccacctcagtaagggagcgatctgccagctggcaaaggtctgcttagaaaatgcgattggtttggtgaaaagggaaaaaggttaaggtgtgtgtgcatgtgtgttcaccagcagatggagggagggtcctggccacacacacacacccggaaggagagcagctaggcacacagcacagtgcctgatgaatgatctcaggacgttttttagagacatgctgtgaatactaaacatgcagcagccgagattcaagagaagctcttggtctcccagcgggctccagacccct

SEQ ID NO: 42556 - DNA, 1414 bp, Artificial sequence
  DNA replication origin
ggagcccgcgcgcgctcctgccatcctgcccgcagcccgccgcctgcgcgccagctccccgcgtcccgggccagctgctgccgccctgccaacctctgcccgccccgccgcccggcgccactgagccccaagcccatgccgggctcgggggcacgggtgccctagtcccgctgccgccgccgccgccgccgccgctgcgccgccgctgccgcgccgctgaggaggcggaggaggaggaggaggaggaggaagaggaggaggaagaggagggggaggaaggtaagaggcgcgctgccttcaggggggcgcgcccgctgtctcagcccaaccgggggtgggtcgcggcgggagcgttccgccccgggccggctggggggcgactggcgcttgggcgcccccgggagccgggggcagggcggggggcgccgaacgtctggccgcccggagtttgggcgggcggggtaacggcccgttgcgtgcccactgccccggcgagtctctggcttggcgggctcgtttggcctccgcgggtgcggggtgaggagtcgagcgcaggggagtgcagcgcgttcattatggagcctttgtgtgcgcgcctgggctgtgggcacagttgggagagctggcgagacgcggggcctggctgctaggaggtggccacttagccggggtgcccggcgaagcccgagcccaggggctgccagaaacagctgtctgaagcatgtgcgtggttcccggggccatgttcacaagcggacacggaggcgcacacacacgcacacacagccgcacaacatacccggcgctcagccacacagtcagccccatgcaaagaccacacacacacacacacacacacacacacacacacacacagagagagagagagagagcgcgagctacacttgccccctcccaccaagatgctaataaagctcaaacacatatacagatacatgcacctccccctagcgctgctaaaacatgcacacacaaacacactcctctactccccagcctagtgctttggaggttggagagtgtgtgtgtgtatgtgagtgtgtgtgtgttttctcagagtggtcttgagaaactacatgacaactgcacattactgcagatccagtacctgctgcttccccccaatacacacccagcaaccccccgtcacacgcagctactgtagacacctccaccagagcccttaagaaccccattctggcaaaaagcgtgcccaactctggtagtcataccctccacgctcgagctgttgggtttcctgcacacacacaccacagccccatacacacacactgaaaccactgcaggggcaaatgtttgacaccttcccccagaagcaggtggcacctccacccttgcagctgcaactaaagagccccagatgacagcaaac

SEQ ID NO: 42557 - DNA, 1600 bp, Artificial sequence
  DNA replication origin
gcgagctgtgtgccgccggtccctgttccccgcggtgcagcatcctgggaaggggcgggggggaggggacgcaggaaggggggggtcaccgccgctctgggatccgtcatcgaagcgtccctgcggccgctgcgccgtgaaaaccagctgctgcagccgcagaggcagccggaggcagaggggcggcgggcaggaccagacagggctgggcagggggctggccgagcgccgtgcgccgcttgggagaaggccggaagcttaccagccgagaaggaattcctagctagcttcagagccgggtaggtttgcctgggaccttgtaggccggctgtgggggactccccgggtcgcacagccccattgtttgcatattgcccgagcaggccacggtggcctgcgcgccccaggactcgcaagcagctccgatcggttggaactcggggcggcggcagcagcgctgagccggcctggatgaggagatgcagcttcctgcaggggccaaggaaggatctggggacaaactgtccggaactctgggccagggaggcgagaaggagagagagaggaagagccgaggcagatggaggactttggccacaactgccatgtactcaagagtagaaccgagtgggtaatgggtcgctttgctttttgtcttggcagtgcctccggagccagcgtggtggccatagacaacaagatcgaacaggccatggtgagtggcatcactgcgtcattctcatcccctgacttagctgctgcttatgtaactctgggcaggattgagggaatgggtgaaaaagcccttagccaaaaccctgaggaagccgacagcctgcctcctatccgcactggaggtggagtctgattagagtggcaccttttagggcatttccagtcttcccttcctgggctccctcctttcttcctccctcctccatctcaggtctttgccgcaggctctgactctctcctgggcctgttgttgggcagggagctcagactcttgcatttgtgtgcatcgtgcagctggcaaggggctgagctcattggatgcaacagcactgcagtgcctctgcagagcctggactggggtcaggagttgggtggaaacaggaagcgaagcaccccacccctgtccctctccttaccaggtagaggtcatactccaaggagcagccacaatggctgcagagggttagggcttcagcggttgggagccacttaattgtgccctggagcttaaggacaccttccctgcccccagtgcagtcatcaaattcagagaggatgcggcagttctgtacctttccccaaggccaatgtcctgtgtgctaactggccggctgcaggacagctgcaattcaatgtgctgggtcatatggaggggaggagactctaaaatagccaattttattctcttggttaagatttgtacagcagacaaacagtatgggatgcattgcaggtctacccttcccccagatctggatcggcagcagtaggggcttatgtaaaaagggggacatagcaaaccactggcaaacagcagaagtgtcaccccaaaggcccctcagcagccagctttgaaagtcattag

SEQ ID NO: 42558 - DNA, 1026 bp, Artificial sequence
  DNA replication origin
aactgttgtatatgtggtggaacccaatgttctcctttggtcctgagttggtgtaaataatattcccggttgcatcacctgtccctgcccctcttgctccttctggtggaaattctgcttttgtccaccaggtggcctcacttaggaaggagcagaagaaaaggacctcaagtctctggtgcctttattttttttccctcagcttgaggctgaatataaataagatatattttaatggaaacgtgtaacttttattatggaacaatcacctcatcttgtttatggtttggagtctgtttttcctgaagtacctctaatgctgtgcatggctgggcccatcacagggcaggtgttttcctgggatcgtttatataaatgtatacctttggtttggagtgttattgtcattcgctgttttaaagaaaagtaacaaagttgtgtttttaaaaaatagagacacgggatcctggataatgttgaatgtattttcttcaaagagtagaatgtggagactaaagagaaaagggctggcatcttgtggtcactccagtgctcactccaataccctgtctcctcctcacctcctctgtcacccacctagctgctctcccatacatgttcacccactcacctcagctcccggacaccctctcctccatacatatgcatctgtagattagcatggacctgtgcatgcattacatgcatgtcacagatctgtacatgtgccggtccacagacaagtactcccacacctgaacattcagaggaaggggcaagtggatgagtgctggggttcagggcaggtcggcaggccagctggctggtgaggggaaagctgagttgattagagagtgaatgtgcaggtgacaaagtatgtgtgcaggggagagactgagagggcagtgactgggaagagggtgaggccgtgatggtgagggcgcgtgtccagggagtatgacatgggagagcatgcaaagccatgggggcatgctggctgccacctgaagaagagcttttcaaact

SEQ ID NO: 42559 - DNA, 1398 bp, Artificial sequence
  DNA replication origin
ttccccaagttgcagggcacatataggacccacagggccttgggaataagagttacaatagttggccgctctttgctcttaatcacaggcctgatgcttgtggtacccggaggaagtttcaaatctatggaagtccaatccgcagggactcaggccaagtgaagctccactagaaaaaagggcggctctggccctaattggtgttcctgcctattagctggagctctcttagtgtaggagcgtgttcctgcctattagcttggccacagaactctcttagtgtagcagctccgcctcctacacttcttccctgctactcttggaaccaacgcactgtggattccaccaggaggtacctctggtgcctctccgagcttctgtgacgcaggcagagaacgttcaacgtcttggacactagatggcagtatatgctgctctatttcaaaggccagacttgtgaatgaaggagccgatgcgggggtggggagtactgactgaaatgtaagtcagttttacgtgaaaactgaacgtcatgaaaagtttagttttttcagacactaatcgttatttaatcctacacatttaaagtattccaagtctctgagtcctgagaaaccctggaaacccaccacttgcccacccagaacatccctccatcttacagagctggggcacgcccctcaggcctgtgaacatgcaatcgctacatctattgaaagggtaacgacagacggagatcaactaaggtggcaggtaaggttcagaaaaggagaaggacaacaaatttggagaaataggagaaggtaagtgaagtgaggaaaaagagggggtgctgaagtaagaaatgaggggaaaataagggaaatggcgggggtaggggagagaaaaatgagagaaaagaggaaaggggagaaaggggaaatgaggaaatagagaaaaggagaaaagaaataaggaaagaaaggtaaaagaatggaaatgggggagaaagtagaggaaatgggtaaagaaaagagaaaaaataagggaaatagtggaatgagtggaagcagaagagcagagagaaggaaggggaggactgaggagagacggcgaaggggcagagggaaaccgggacagagactgcctctgaggggttcagggaagagaggacacagcgagctggggaaaggaggtgacgatatcgttaagtaagcagaaagagacagaaactgaggagagtttgagcgtgcttctctgagttttgcttacggcatttattgggtactcctaatgtgtgcctggcactctctgactctctgcagaggcaaccgctctccttgcacgccccccccccagaaaaaggggggctttggagggcggcagtttaaggctacaacacttggggctctcgagggc

SEQ ID NO: 42560 - DNA, 1212 bp, Artificial sequence
  DNA replication origin
gccgagccggagagccctcggccaacgccgggccccggcggcacctgaaaagcggccggagccggagactagccctgcgagggctacgacgctcgacctccagggccgcggcgagggggcgcgttttacccatagcgttcccaggtgccagccatctcctccgctcgctcgagggcgctgggctctcgtctgcctccgcagcgggttggctcgggctccggcgcgagctcccgggccccggtcgccgccgccgccgctaccactgtaggccgccgcccgccttcgccgccgctgccgctaccgtcgccgacgccgcgcagcagccgggatccgccagcccgcgcgccccgcaggggacagcacggcggccgcgatgctaccgcagctgggcctcccgagctaaacttaagagttttcgcccctcagtccaggggcagcaccatgacaccacggcagcaccacactgtcatttccgccgccgcagaggaaaaaaaaggcaatcccttccaaaagggaggcggagtgggggcaaacggggctggggctgacaccccaagggagcactgggaagggcccaagaagaaggggtgctcggccaccttcccaggctcaccttccgccgcccccgccactcccagctcccccagcccttcctctggaggcacgtttacatgtcttctcccctggcaggagtgaccggagaaacctgagcaagcaaaggcagccggtgggtggggctcgggttactactgtacctaccagctgattccagcagccttttctccagcgccctgtcatcttgaaggaagacacaccgagagggacccggacgggtgtgcgtgtgtgtgtgtatggtgtgtatgtgcgtgtgtgtgtgtgtgacagagcgacagagatagctaaatgtgtgtgaaatgcagaaggaaggctatggctaaactcttctcccactccccaatccccctgtcccccaaccccacaaacccccaggttagaacaagaaagaggcctttgcaacgggtaataagaagagagagccgggtccaccgcagagatcctccctatgaagctgctctatgcaaagttaactacagagtaaaacaaaaatagtggaggagatagaaaagggcagacaattgaaggaaaccgaacctctctttctttttacaaaaaaagaatggctgtgttttattggcctcgggcagaagttgt

SEQ ID NO: 42561 - DNA, 1195 bp, Artificial sequence
  DNA replication origin
gattctcacacggtgtgagcagaagcaagggagaaagagagctggggggaagtgccacacacttttaaacgaccagatctcaggagagattactcactatcacaaggactcacagtcaaccaaggtgatggtgctaaaccattcatgagaaatctgttcccatgacgcagtcacctcccatcaggccccacctccaacactggggattacatttgtacataagatttgggcagggataaatatccaaactataacaaacacataaatcaagttgtgaggagcaaccaggaaaaatctaattcacattacatatccatgttaagttcattgattgggcaagaatatataaaaatagcaaagacagtttctccctcagtacagtcatgagaggagacagacagggggatgtgagggtcgggggtgggcagggggaagctaaccatctggggtacaatgaaaccactccccaaacagaagaaaagtaggggaggagaactccctattcagcaactcccttctattggaatattgccagagaactgattagagtactgggacggagcagaatggggttaaaggcagcccttctggcccaacttgagaatcagagggatcaacccacacacagtacttctctatttagtttccaatatattcctttataagggctcatcctcagagacacacaaccatcaccatctatccgccccacactcagaaatcctcaaaaaggcaaagtggttgagaagtaagatgctgcatggctgggaggctgggagtgcacacgttgatggggaaaggctggggtccaaggggctctgctgggggatttgggtaggcaagtaagcgttgtgacataggaaggtgagtgatcctgaaaacgggtaggggaccgtggaagagagaaagtaaagagtacaacgactgcaggatttcaatttcctgctctaagaagaaacacctctgaaaaataatgtgcaacacacgaagtgctaagtaacctaaaccttatcatcaccagtaatgtttctgtaaatctactccgccgttatttacttaattcttacaaggcaggaatggaaaatccccactctccctggttgcgtcgcagtctgtcctgtggacatatgtaagttttccctctcccccacagagctgatttcacagctaggccagaaataaggaaccatccaga

SEQ ID NO: 42562 - DNA, 2022 bp, Artificial sequence
  DNA replication origin
ctgcaaacgcggctacctgcggaaacagaagcatgggcacaggcgctacttcgtgctcaaactcgagactgctgacgccccagctcggctggaatactacgaaaatgccaggaagttccggcacagtgtccgcgccgcggcggctgcagcagcggcggccgcctctggcgccgcgatccccccgctcattccaccgcggcgcgtgatcaccctataccagtgcttttccgtgagccagcgagcagatgcaaggtaccgacacctcattgctcttttcacccaagacgaatacttcgcgatggtggccgagaacgagtcggagcaggaaagctggtacttgctgctcagccgcctcatcctcgagagcaagcgccgccgctgcggcacgctcggcgcgcagccggacggagagccggccgcgctggcggcggcagcggcggcggagccacccttctataaagatgtgtggcaggtaatagtcaaacccagggggctggggcacagaaaagagctgagcggcgtgttccggctgtgtctaaccgacgaggaggtcgtgtttgtgaggctgaacaccgaagtggccagcgtggtcgtccagctcctgagcatccgtcgctgtggacactcggagcagtatttcttcttggaagtaggcaggtccactgtcatcggtccgggagagctctggatgcaggtcgatgactgtgtggttgcccaaaacatgcatgagctgtttttggagaagatgagagccttgtgtgcagacgaatacagagcccgctgccgcagctacagcatcagcatcggcgcccacctgttaaccctgctgtccgctaggaggcacctgggcttggtgccgctcgagccgggaggctggctcagaaggtcccgctttgagcagttttgccacctcagggccatcggcgacggggaagacgagatgcttttcaccaggcgcttcgtaacacccagcgagcctgtggcccactccaggcgaggaagactgcacctgcccagagggcgcaggtcaaggagagcggtttcagtgccggccagcttttttcgccgcttagcacccagcccagcacgtccccggcaccctgcagaagccccgaacaatggagctcgcctgtcttctgaagtgtctggttctggctctggcaactttggggaggaaggcaatccccagggcaaagaagatcaggaaggaagcggaggtgactacatgcctatgaacaattggggctcaggaaatggccggggctcaggaggtggccagggctcaaatggccaaggctccagtagccatagctcgggaggaaaccagtgttcaggcgagggacagggatcccgaggtggtcagggctcaaatggccagggctcaggaggaaaccagtgctctagagatggccagggcaccgcaggtgggcacggttcaggtggtggccagagacctggaggtgggcatggctcaggtggtggccagggacctggagatggccatggctcaggtggtggcaagaactctggggggggcaaaggctcaggaagtgggaaaggatccgatggtgatggtgaacgtggaaaatctctgaagaaaagatcctattttggcaaattaactcaaagcaagcaacagcaaatgccaccacctccaccacctcctcctccacccccaccagctggaggaactggtggaaaagggaagtctgggggaagattcagactttatttttgtgttgacagaggagccacgaaagaatgcaaagaagccaaagaagtgaaagatgcagagatcccagaaggtgcagctcgaggtccccacagagccagagcttttgatgaagatgaggatgacccatacgtgccaatgaggccaggggtggccacccctcttgtaagctccagtgattatatgccaatggctcctcaaaatgtctctgcttcaaaaaagcgccactctcgatccccttttgaagattcaagagggtacatgatgatgtttcccagagtgagcccacc

SEQ ID NO: 42563 - DNA, 1306 bp, Artificial sequence
  DNA replication origin
ccgcgtttgcagacttcctccccgacgggcaggtcctcctcttcggactcggagtctgaccgggagccagtggccgtggagagccacatggctcccggacaagacgacccggtcccaatgagtgcggtcggggttcccgaggaaagaagcggggtggtcaccactgctgctagagctgccgctgccgccgctgctgcacctcttagtcttcttgtcgcttggtcgcgagtgaaggagcaactcgccatggtgatgcacgatggttttaaggtgagcgaggaggagggggaattcaggaaagggagggttgggggaagaggctgtctaccctcgtctgcccgccccagccccctcctgccttggcccgcgcccccgcccactccactctgagcgcacgacagcgggcaaaacaacacgtgaccacagcctcacgcggcggccgctgcggatcctgctaccggcgcaatggaggggcgcgagcggccaccagtagaggtgagcaagggaggagacggcgggctcgggaggcggagccacctccggctgtgccaaatcctcccggtcaatctccaggcctgtgggccaagggaggaccgagaggaggaggcgggctctctggccaagctgattctaacagggagtccaggaaggcatgagggggcgggagaaggcctggaggggcggaggagaaagcggccggctatcagggtcgggagagggcgccacagtcggggccccattggtgggaggtggtgggagggggcgtagcgcaagcagtgcctgcctgcggcgccagggtgcagagcgggcacagtcgcgggacagtttgtttgtttatttgggaagcgggagccaggtgaaactgttgcaaggctctgattggttgggataggagccaatgggagggtccggcaagaaggcagccccgaaatcattagtttggcgggagggaggggtgagaggggagaggggagagggggcgtggctggggtcccaaagtggcttcgctgtcggcttgtggcgctctcaggcggtaaacaaccttacgcaaatagctgttaatggtggtggtaaactcgtgcaaatcccagagccgtggtgacccgggatggagtcgggtgccctggtactccctgtcaatcacataaattctctgttcctgtcacagtctggttcattctttccagccgcacaaggcggcggatcgagcttcttgggagaaagtgtcggcaccccctgaaaacgggttgacgaccagggcgctcagaactgcttcccaccgctctgcaggcactcccgagcccgc

SEQ ID NO: 42564 - DNA, 1233 bp, Artificial sequence
  DNA replication origin
agtggaggcaaggaattgcaactcagaaatacattgctacttggctgcctctactctattactgtacaccttgaaggtgaggttaattaagtcctgttgtgggtttgagggccagaatttaatttttggagctttatttaatgtcgggagcaaattgggtaataaaatgcatattgagaataagatggccttctgacctttcagggtttagggctgtaaagcatctcagggttgctgccaaatgagccatgaactgggctgggtttttatatttgatgaaaaagagcctaaacgctaactgattttgggagaggtcagataaagaaaaaggagcattaaccttgactatacctttagctccagccacctttttaggaggaaatttctgggcaggtgggggaaggctagtagcggaatgtaactgtaagctggaccgggtgtgaggaggggaggtgataaaaggattatagggtgggggagcagaggctgaggaagaattgggactggcttggcctggtgaggaggggagaagtcagatgggtctgtagaaaaggaagattagaaagactcagcgatgcttggggttgggactgaggggacaggtgggagggaaagaaggaggatctgggatgagtcacattgggaacagagactagggagggaacaatgtataaaagaatgcctggatgtcaggcacctcagaccatttgcccattttatgacaagaattatttagatcttgtaggatggaaaaattgaaagtgccattttctggctatttggaaccactgtcaagtttgtactggggtcaagcagcattgtagaagaaaataaggcatttaggatttaggtcaggtaagagttgaagaggttttatgttcttaagaacacaggctaagggagaagaaggaggaatggagggtggaaagttgcctatagttaaggaggcaagtttaaagaaaagggagagtagagacatggagggaagcggttcgggggttcttaccctccagaaaagcaggaaaggggttggggcacagagatacaaggtcagggcatggaaataagggatcagggtgcagagatataagaggttggggcatggaaataagggatcggggtgcagagatataagaggttggggtatggaaataagggatcggggcacagagatataagaggttggggtgcagagatacaaggttggggtacttgcccctccaccagaaaagt

SEQ ID NO: 42565 - DNA, 851 bp, Artificial sequence
  DNA replication origin
attacctgcctctgacattccccagggttacagagcagggggcatctgagcctcaagttccacggatgaagcagacactgcaataacaactgaatcaatagaggagaggcatttggaagtactggggtgatacacccagtaatggtaatcctcagcagaagatggcatagctaccaaaaatcaggcgttaccactgggatgaaaactggggaggcaagaaaatcatacggttggagtcatagatcatttccctccccgttgagcactcctcccccttccgtcccccattaagttcattctatcccacagactggtcctagtgtcctgctagctccctgctgaaagagagagggagggaaaagatgtctgaggtctcttcatttcctttgtctctgtccctaaggcaactggaagctggagctgctgcagtcggcctggcaagcccgttggctctgcagagtgagcagtccctggcagcccctggagcagctgccagttagacggcccagagttctgatagaatgcattgcttcagttcagtgccaagtgttggacgtgttggattcagttcccagagggctggagcgtgctgtcagggctgtctgaagacaagagagcagaggcagtttagtgcagttggatgtgcggggtaggggtggaggcgcaggggtgaagagggagaaactggcccgaatgggtaaggtggtgcttctccttccagggccttccagacaaggtctcctggcctctcaccattatctgggcctcagatgaggcgaaccctggaagggagttgggggtggaaggtgggaggcgcgcccagggatgagcgagatgaggagggcgcgaac

SEQ ID NO: 42566 - DNA, 1232 bp, Artificial sequence
  DNA replication origin
tggggttgggggtaaggttatagactaacagcatcccaaggcagaagaatttttcttagtacagaacaaaacggagtctcctatgtctacttctctctacacagacacagaaacaatctgatctctctttcttttccccacatttcccccttttctatttgacaaaaccgccatcgtcatcatggcccgttctcaatgagctattgggtacacctcccagatggggtggcgacctggcagaggggctcctcacctcccagacggggcggccaggcagaggcgcccgcctgccacctcccggacggggtggctggtcgggcgggggctgccccccacctcccggatggggtggctggccaggcgggggctgccccccagctcccgggcggggcggctggccgggcggaggggctcctcacttctcagacggggaggccggtcagagacgctcctcatctcccagacggggcggcggcggggcagagacactcctcagttcccagacggggtcgcggctgggcagaggcgctcttcacatctcagatggggcggcagggcagaggtgctccccacatcccagaggatgggcggctgggcagagacactcctcacttcctagacaggatgacggccgggaagaggcgctcctcacttcccagactgggcggccgggcagaggggctcctcacatcccagacgatgggcggccaggcagagacgctcctcacttcctagacggggtggcggccgagcagaggctgcaatctcggcactttgggaggccaaggcaggcggctgggaggtggaggttgtagccagccgagatcacgccactgcactccagcctgggcaacattgagcactgagtgagtgagactccgtctgcaatcccagcacctcgggaggccgaggctggcagatcactcacggtcaggagctggagaccagcctggccagcatggcgaaaccccgtctccaccaaaaaatacgaaaaccagtcaggcgtggcggcacgcgcctgcaatcccaggcactcggcaggctgaggcaggagaatcaggcagggaggttgcagtgagtcgagatggcggcagtacagtccagcctccgctcggcatcagagggagaccgtgcaaaggggaagggagagggagagggagaggagggagaggagggagagggagagctttttttttttttttgagacggagtcttgctctgtcacccaggct

SEQ ID NO: 42567 - DNA, 1257 bp, Artificial sequence
  DNA replication origin
gcgagcggatagatagccctggctcaaggaaaaaagcgagccgactccaggagctggaatgcccacccaacctcctcccggctcaggtgaggtacgccagtccccctctggaaatggggccctggtaccgacagggcaggggtgccggggccgcaacctccccatccagggatactcaccggaggggcggcccaccgcgtcttcgcagccggccggcgcctggcactcggaaagctcgcaaaaaggaaccgcgtgcccgctagcgctgggacgaggaggagcgcgcggcggaggccagagaaaaagccgcagcggcgcgcgcgcacccggacagccggcggaggcgggactcagcgcgagcccggaaaagacgcgcccggaggggcgggcggagcgggggcgcgcggtggtgtggcagagccagccgaatcgctggctgcagacggctcggcccacccacgcgcccgcccccgctcgcccgggacgtcagtcgaaaaggcggagccgaacgggcttcccggggcgcgggaggggcgctgcgaggaaggcgaggcggctaacggctcgcctcaagttgttgctcccgctggcgatccgcttctgtcagtctcgctgctggtgtcgttgagtgtgtttcgggatgtccttgcgcctaacagcagtgaggcgcagaattggcccacgccctcacctgcggcttgcttcgcaggactccaccccaggataaaagttcccctcgggtcatcttccagctgccctcaaaagacactcatttttgggtttcactgctcctctttaagagagctatcttgaacactttgactaaaagcatcttgctcctgtaagcctgaactaatgcctctcatccgtttatcttgcctcttactgcgttaagatccccgctcactcccactgatgaaatatcacaaggacgcaggattttcacgttgtctttcatttccacgatggtatcatggcaaaaaaacccccaactgataaggaaaagtcaccgcagctttgtgacatcttactagccctgatcattgcttataagccggtcatacgaatgctgttccaacagatgcaagaaattgctattaaaattaaaatgccagcgaactatctgagggcttcaaaagggacagaccataattgcaaatgaggcctgataaactgccaagaatatatcacccaaaaaaataaatctcaagaattcttccagttccctgatgcgtaatggtgaactagcttcctgtt

SEQ ID NO: 42568 - DNA, 2139 bp, Artificial sequence
  DNA replication origin
ctgaagccattggctaagtgctatatcctaattcttgcttccttgaagatagcaacttgaggttttgggatgctgtattccattgctaggtgctccccagctttgtccttaatgttccttggttatgttgctgaggatttaacaaaacacttaaggagaatgaactagtgagcctctgaatcaagccttgtttgttgttgtttattaattggcacttgtattactggaaagtggtctggatgcagaccccaagagagggttcttggacctctagcaagaattcggggcaagaaagaatttggagtaaagtcaaagcaagtctattaagaaagtaaaggaataaagaatggctactccataggcagagtagcagcttgggctgctcaactgataattcttatggttatttcttgattatatgctaaacaaggggtggattattcatgagttttctgggaaaggggtgggcaattctcagaactgagggttcctccccctttcagaccatatagggtaacttctggacgctggtgggagtgacttttagcatgctaatgcgttataatttgcatataatgagcagtggggacgaccagaggtaactgtcatcacctttttggttttagtggggtttggccggcttctttactgcatcctgttttatcagcaaggtctttgtgacctataatcttgtgccgacctcctatctcatcccgtgacttggaatgcctaactttttgggaatgcagctcagtaggtctcagcgtcattttatccaggccctgttcaagatggagtcgctctggttctaacgcctctgacacttggagaacatcaggcctatggtagatgttgtacaaaacttggagtcagacaaggctacctggctgtacttgttcggaaaaccagacttggaaaaaacgggagggcgatggcctgataatacagtagattgcattttatgttttgagcctggcttgcagccaacatccaaaagtgtttcctaggcaaggtgcctaactgtgtttttctggatattcttctaactcatcgtgagtcttcaataaatattaaataaacatgaggaaggtcctgagaaggtccttttactgacccttgtctcaagaaaagcaaatagccgatcggtaaaaagcagcaggtaggaagaggggattttatttccgtcagttgcccttatccaggttttgggcttagtgctgctcctccacactcatatagtcctggctggcttttccacgcataggttaggaagcaactgctctggggagggggaaggggggaagagggggagggaaagaggtcacgggaagcctcccttcctcccactggcctaccattgaaggcctgtcaggagaaaggagagaagtgggagagggagagggtgtggcaggggtggtctgtgtggcaagaggtagagagaaaatagtggatcagagcaggagggggaggagcagggaaatgaagctcctgtcctaggcactgaagtgtggagtggggctgtggctagaaaggggagagaagatgcctttctggccttgcatgagtcgtggcagaaaggaggaatcgcgaagaggagccggccatacccagcacacaccccgaagccaagctgctcattactagaaaggcttattcccccacaagaagttagtgcgggccagctaagtgcctactatgtgtgcagtatagaaagaagtgccctggagaaccaggtcgcgggaggcggagccagtcaacagggcttcaccgagggggcgaattctgtacacggttgtgaaggagggtggctgtgcacgcgtgcaggctccgagtgcagaagacgaggcaggccagggaggaggcggaaggaggcggagcctgagccggaggagggaggaggagggaggaggaggagggagagccgaagccgcggagggtgggaggtgtgaatggtggacgggtgaggggagtgccagaggcagaaaagggaaggaggcgaggaggagtagtcgtggcccgagggcgtgtggtggggcgagagctgaactggacgggaggagggaggcagtggcggtggcagcggggagggggaggagagagggaggggaagaaggaggaagcgagcgcggctgctgcagg

SEQ ID NO: 42569 - DNA, 1949 bp, Artificial sequence
  DNA replication origin
gagagctgaactggacgggaggagggaggcagtggcggtggcagcggggagggggaggagagagggaggggaagaaggaggaagcgagcgcggctgctgcagggggaggaagacggggaggaggagccgtgcgccgcggcggcggccgccaggggaaccgagcgcccggcgcggagagcgcgggagcggagcagtagcccgatccggggccgcgggccgagctgccggtgagtgaagccccgaggggcgcggcggccggtccccggggctgggcgggaggcgcgggaggttgcggcgccggggaggagggaggggggccggctttagtccaggggccggctttagtccagcccccggctggcccggcctcccgccttccctctggcttcctccctccgctgcctgcgcgaggggggcaggtcccgggcgggccgcgggctgggggtggtgctgcccggagggcgggcgtctagggccggagggtggagctgggggttcgggggtgtacccgggggcgggaggctggacaaggacggctctaaattggctggaggggcccgtcggcggcgaagttgctagctgggggcagagacggccacgcggttgcaggagtaagagatccctctgtggcgagtgcgtgagacgaggagtccggcgtccctgccatccccgtcgccctccccgcctgctcggccccgctagctcctctccttgcctccgcgtgtcccctagctctgaccccttttggctcccggttcgctgccgcagcactgccgggtctccttggcccccgccctgaccctttcggcctccggcttcccctgacccctgcttgcttcgccactgccccgttcccgttttcttccctcgctagttacccctcccgcttcctaattcccggtgcaattgcctctttgagacctcttttttttttttttcctctccttccttttagattggccaacggctcctttcaaccctgcctcgttggtggccactggagaagcgcggggggctcccccagacagccgtggggacaagttagagccagcactttaccccgggccttgcgtgtagcttcccctcccctactctcggtgccctggtgtctggaggggggttgtgggggtgtgcccgccttacatggtccaccacccgggcaaccctctgggcttgtgttccatctcactcttgcttcctgtactgtggtcaaggggaaccactgcatcatgtcccggtatagctaccagagtctcctggactggctctatgggggcgtggaccccagttttgcaggcaatgggggccccgactgtgctgccttcctctcttggcagcagcggctgctggaaagtgtggtggtcctgaccctggctctgttggagatcctggtggccctgcggcacatcctgaggcagacgaaggaggacggtaggggtagccctggcagccagccagagcaggtgacccagcggccagaggaaggcaaggagagcctgagcaagaatctgctcttagtagccctgtgcctgaccttcggggtggaggtgggctttaagttcgccaccaagaccgtcatctacctgctcaacccctgtcacctggtcaccatgatgcatgtgagtctgttgactttttcctgggcatcctaagtgataagagtcatttatgtgctcaggacactccatagtgtacagcacctcatcccggcgggcagggggacctttaaaaatgattttccaacgagtggctgcctttgtgccgatttcaggtttggctttctttcacctttgcacagtgcgtcagccccacagtggaggtgaggaaccttgtgcctgaaccctaggaacgactggcactcaccctggctgcccctcccttccagcccagcccaaccctgccgtgccctgggctttcacaagcaggaattccagccccagccaggtgcc

SEQ ID NO: 42570 - DNA, 929 bp, Artificial sequence
  DNA replication origin
gccgccgccgccgcagccctgggggggagagagggtacagccgctgccgctacctcctccggttagacctcccagcccgttgagccgcgtaccggcgcctcctagtcccagctccccagctcggcactggctctctccgctgcagtgggaggaggaggaggcgccaccaccgccacccgagccagaggggggcgaactggacagtttctgcttcttcaccccgcagcaacccgccgccatcttggaacagtctcccccacgcagcgtttccgacccataagtgaggcgagctggcggcgggggcgagcacgctgcggctcaggccgccgggggcgcgccagaggctggcggggcgcgcgcgcgccgctcccggccccgtctgcctagccacgcggctgccccgcgcgcgcccccgcctcggtgcgcgctcctcgctttcgcggctgggcgcctcgcgcctgtcccgcccgactcgtgcctcttctgagccgcagccccagccccagccccaatctcaatctctccggccggcagaggttggaagacaggaagccgattagaaaggaaggtgaaggaaacaagagtcagacagcggaaagtgggagcaaagggagaaggtgggcacgcccgggaaggaaggagggaaagggaaactagtgggggtaggggggaagaaaggagaaagtccgaagtaagcatccaggtcccaaagcacagctcagtaaccccccgccgcaagcagtattaatgacacttaagcccagttacgtggaacctgagccacccggcctcaaatacacgggtttctgaactgttggagtgtgagcgagcaggtgcccagagctccatacctgagaccgcccctgtaaagtgtgtacaaagcaatccaggaaatggccacgctgctgtctttttaattccagcctaag

SEQ ID NO: 42571 - DNA, 1537 bp, Artificial sequence
  DNA replication origin
aaaaggagtattaaccttgactatgcctttagctccagccacctttttaagagtaaattgctgggcaggagggggagggctagtcatggtacgaaactgtaagccggaccagatgtgaagaggggaggtgataaaaagattatagggtggaggagcggaggctgaggaagaattgggacctagctcggcctggcgaggagcagcctggggaggaagggagaggtcagatgggtctgtagaaaaggaagattagaaagactcagcaacgcttggggttggtacagaggggacaggcgggagggaaagaaggaagatttcggatgagttgcactgggcacagagactaggaagggactgatgtgtaaaagaatgcctggacgtcaggcacctcagaccatttgcctattttatgacaagaattatttagattttgcaggatggaaaaattcaaagtgccattttctggctatttggaactactgtcgagttggtattggggtgaagcggcattgcagaagaaaataaggcatttaggttttaggtcaggtatgagttgaagaggttttaagtttttgagaacacaggccaagggagtagaaggaggaatggagggtggaaggttgcctatagtgaaggaagcaagcctagagaaaagagagagtagggaaaggagggaaggggttcgggggttcttaccttccagaaaagtgggaaaaggggttggggcgcagagataagaggtcggggcacagaaataagggatggggcacagagataaggggttggggcatggaaataaggggtaggtgcatggaaataaggggtcagggcacagaaataagggctcggggcatggaaataagggattggggtgcagagatataagaggttggggcacggaaataagggattggggcacagagatacgaggttggggtacttgcccctcctctagaaaagcaggacttgctgctcagagtgaaggagaaggggttgaggggtacttgcccctcccccagaaaagcagagaaggggtagagacaaggagagaaggggttggggtacttgcccctttcccagaaaagtgggacttgccgctaagggtgaaggaccaaggcaggcgtccctgcgtggtctgacacctttgaatcgtgggtgaataatcagagaagtgtccctgtaatgattaaacaccaagggaagtctgccttcccagtccgtgactggcaccggagttttgggtccacggataaaacgtgtctcctttgtctctcccagaaaatgaaaggaattgaaattaagagaagggagagattgaagagtggaaaggagaaagtggttgagggacagtgagagaggttggagaagagagtaagaagaggccgcttacctgatttaaaattggtgagatgttccttgggctggttggtcttaggacctgaggtcataggtggatctttctcatggagcaaagaacaggaggacaggggattgatctcccaagggaggtcccccgatctgagtcacggcaccaaat

SEQ ID NO: 42572 - DNA, 1305 bp, Artificial sequence
  DNA replication origin
atgctgggctaaatgtagatttcagcttccctcgggtctttagctcctcaatgtgattaattacctagagacccacaagaaccccaggaggtaaagaagtaaaagtaccatctagtagtggtacccactagcatctcctcaccgaagtaggacgggaaagcagcgcacactctaaccgatttaacttgctgcacatccaaaaaaactcatggcgagctgcaaagaaagtagaacacacgggcattcccacacgcgcctagatcgattcactcacgccgagggcacgaccaagttcatgccaccatggattcctgccccagttccccgcgaaaagtaaccacgcgtctcctacccctgaaggcaaagaagacaaggtgacgactctctgctcgctcaagtggcttcggtcccgggccagcggccagggatgggcaggggggaagccccaactcccggctgctcccctcctcgctgctccgtccgggctctccttggtggcagcggacaggcaggataccgggccagagggtggagcagcggatagccggaggcgagactgactggaggtggtggtagttgagggggaggcggagagaactaagagaagaggaggcgaaagagagcggagatggaggagtaattcagggggtctaccagtttaggcagccagaaagctcctcggaaggaaggggcgtgactgccaaggcagctcctgggcaaaggatgggaggtaggggagggggacgaacgggtggcttttcttcttgcggtgagcggctaggaccgccccggagcagggcggcgggaggggtggacgagggaggaaggcggagtagagggcggggaaagaagggcgggagcctgcctggaccctggaagtgaggagtgaggggagcgcggaagagaggcggggccggggggcgtggaagtttcaaacaattgaaccgcggggtccgggagctcgggcgaaagcaagggaccctcgctctcgccttcccactagaggggcacgactcggttgccgtagccgtgagagtctgcgcggggactggctgggaagaaggaaagggttttgcaaaagactacaataataatctgcggcaacagcgcggcatagacgcgtgggagagccagtgcagctccccgccccactgcgggaggaagaaaaacaaataatagaaatgctgaaaagcagcttccaccaaagcctgcttaaaataatgcaggaaggagaagcgctccttcgttttccttcccctcttgcttcctattaccagcaggcccccacccaggtcacagctctgc

SEQ ID NO: 42573 - DNA, 1167 bp, Artificial sequence
  DNA replication origin
agagttcagataggtctgtagaaaaggaagattagaaagacttaacgacgcttggggttggtactgaggggacaggcgggagggaaagaaggaagatttgggataagttgtattgggaacagagactagggagggcctgatgtgtaaaagaatgcctggacgtcaggcacctcaaaccatttgcctattttacgacaagaattatttagatattgtaggatggaaaaattgaaagtgccgttttctggctatttggaactactgttgagtttgtattggggtcaagcggcatttcagaagaaaataagacgcatagattttaggtcaggtgagagttgaagaggttttaagttcttaagaacataggctaagggagaagaaggaggaatggaggtggaagcttgcctatagtgaaggaggcaagcccagagaaaagagagtagagacacggagaaggggtcggggggcggcggggggggttcttgccttccagaaaagcagagaaggggttggggtgcagagataagaggtcggggcgtggaaataagggatcagggcgcagagataagaggtccgggcgcagaaataagggatcggggcatagggataagaggtcagggttcttgcctctcctccagaaaagcgggacttgccgctaagggtgaaggagaaggggttgaggggttcttgcctttcctttataaaagcgggacttgccgctaagggtgaagtaccaaggcaggcatccttgcgtggtctgacacctctgaaacctgagtaaataatcagagaggcgttcctgtaatgattaaacaccaagggaaggctgccttccctagtccgtgaccagtgccagagttttgagtccatggataaaacgtgtctcctttgtctctactagaaaatgaaaggaattgaaattaagagaagggagagattgaagggtggcaccaagattgaaaggagaaagaggttgagggatagtgagggaggttggagaagggagtaaaaagaggccgcttactggatttgaaattggtgagatgtttcttgggctggtcggtctgaggacctgaggtcgtaggtggatctttctcacggagcaaagagcaggaggacaggggattgatctcctaagggaggtcccccgattcgagtcacggcacc

SEQ ID NO: 42574 - DNA, 1128 bp, Artificial sequence
  DNA replication origin
tttagctccagccacctttttaagagtaaattgctgggcaggagggggagggctagtcacagaatgaaagtgtaagccagacctggtgtgaggaggggaggtgataaaaagattatagggtggaggagcagaggctgaagaagaattgggacctatctccgcctggcgaggagcagcctggggaggaagggagaggtcagatgggtctgtagaaaaggaagattagaaagactcagcaatgcttggggttggtactgaggggacaggcgggagggaaagaaggaagatttgggatgagttgcactgggcacagagactaggaagggactgatgtgtaaaagaatgcctggacgtcaggcacctcagactgtttacctattttacgacaagaattatttagattttgcaggatggaaaaattcaaagtgccattttctggctatttggaactactgtcgagttggtattggggtgaagcggcattgcagaaggaaataaggcatttaggttttaggtcaggtgtgagttgaagaggttttaagtttttgagaacacaggccaagggagtagaaggaggaatggagggtggaaggttgcccatagtgaaggaagcaagcctagagaaaagagagagtagagaaacagagggaaggggttcgggggttcttaccttccagaaaagtgggaaaaggggttggggcgcagagataagaggttggggcatggaaataagggatggggtgcagaaataaggggtcggggcacggaaataagaggtcggggtgtggaaataagggattggggcacagagatataagaggttggcggcggaaataagggattggggcacagagatatgaggttggggtgcagaaataagggattggggcgcagagatataagaggctggggtgcagaaataagggattggggcacagagatacgaggttggggtacttgcccctcctctagaaaagtgggacttgccgctaagagtgaaggagaaggggttgagggatatttgcccctcccccagaaaagtgggacttgccgctaagggtgaaggaccaaggcaggcatccctgcgtggtctgacacctctgaaacctgggtgaataatcagagagg

SEQ ID NO: 42575 - DNA, 1676 bp, Artificial sequence
  DNA replication origin
atggccttcgtccgtttagagtagtgtagttagttaggggccaacgaagaagaaagaagacgcgattagtgcagagatgctggaggtggtcagttactaagctagagtaagatagcggagcgaaaagagccaaacctagccggggggcgcacggtcacccaaaggaggtcgactcgccggcgcttcctatcgcgccgagctccctccattcctctccctccgccgaggcgcgaggttgcggcgcgcagcgcagcgcagctcagcgcaccgactgccgcgggctccgctgggcgattgcagccgagtccgtttctcgtctagctgccgccgcggcgaccgctgcctggtcttcctcccggacgctagtggtaagttggagccccgggcggcattgctagccgagaccccaacgatttaggcgggggatggggtggggagcggggacaggtcccggatggctgcagcctgcaggaccgcactggccctagcggaggttggggggagggactctgaacgcgcaaatcgcgaggagactgagtctctggaagaagagaggagcttaggttccacggaaggagcatagaagtctctaaggggattgggagcgggggctcgagatgaagacgctgggcggaggcgggggtctagagaacctggcgcgggggaagccgagacagaaacggaaggcgggggtggggtctcaagaagtgaggagtgggaggagagaaaggagggaaactgaacgcaatgtcgctgagtagagggtcgggctgcggaagatgcaactgagttgcaggaccgactacaattttaagaaatccgacagcaggcaagtgggagggggcgcaaggtttgggacagtgtgtgcagagggggaaccaaggatcctttattatgttctcattgaaaagcgaccctaatttttctggcgggtctcagcgaacatccgtaactctggggagataacacactgcggatctgtgtttggtctaacagctgttagctgaatttgaacagcgctgctggtgatcacgtaagcttaagaggagaggataaaggcatccagtgaacctttttttaaataattaattagcttatctaagtcatttggttactgttctatattttgaaaaggattgcgaaaaagtctccagcgctgcctcttattcctgtactcagttttacctgacaagcagtctttacagcgttcctcggaattgctaaacatgagaacaggttgccgttcctgatgtcacataaagttcgtcattgcaaaacgtgtctgtgtgtctgtttcttttctgcgccatgccctttgccttttgcttcctgttgggtagtatgcgacttgaggtgacaaacacttgcattgtgtttgagaaccctgtattttaagcaacagagctccccaactcataattcagcgagtgacattcggcagttaaaagatttggtctggaatcactgccagtaccgcgcagcttcttcattaatattaccagtataagtcccatccaaggaagcctctgattgctgagccactaagtgcatatgccccttacctcataccttttaggcaggctaaccgagggacgctcatatatggttgagctaagatgatttggggggcggggggtgaggaaatgcggcgcactgagtaacctctgagctcccca

SEQ ID NO: 42576 - DNA, 1132 bp, Artificial sequence
  DNA replication origin
aaaaggagcattaaccttgactatgcctttagctccagccacctttttaagagtaaattgctgggcaggagggggagggctagtcatggaacgaaactgtaagccggaccaggtgtgaggaggggaggtgataaaaagattatagggtggaggagcagaggctgaggaagaattgggacctagctcggcatggcgaggagcagcctggggaggaagggagaggtcagatgggtctgtagaaaaggaagattagacagactcagcaatgcttggggttggtactgaggggacaggcgggagggaaagaaggaagatttgggacgagttgcactgggcacagagactaggaagggactgacgtgtaaaagaatgcctggacgtcaggcacctcagaccatttgcctattttatgacaagaattatttagattttgcaggatggaaaaattcaaagtgccattttctggctatttggaactactgtcgagttggtattggggtgaagcggcattgcagaagaaaataaggcatttaggttttaggtcaggtgtgagttgaagaggttttaagtttttgagaacacaggccaagggagtagaaggaggaatggagggtggaaggttgcccatagtgaaggaagcaagcctagagaaaagagagtagagaaatggaggaaaggggttcaggggttcttaccttccagaaaagtgggaaaaggggttggggcacagagataagaggttggggggcagaaataagggattggggcgcagagaaataagaggttggggcacggaaataagggactggggcacagagatacgaggttggggtgcagaaataagggattggggcacagtgataagaggtcagggtgcagaaataagggattggggcacagagataagaggttggggcacagaaataagggattggggtgcagagataagaggttggggcatggaagtaagggattgggggttcttgccccatagaaaagcgggacttgccactaagggtgaaggagaaggggttggggtacttaaccctctcccagaaaagcgggacttgccgctaagggtgaaggagaagggcttgaggggtacttgcccctctcccagaaaagcagagaa

SEQ ID NO: 42577 - DNA, 874 bp, Artificial sequence
  DNA replication origin
agggattggggcacagtgataagaggtcagggtgcagaaataagggattggggcacagagataagaggttggggcacagaaataagggattggggtgcagagataagaggttggggcatggaagtaagggattgggggttcttgccccatagaaaagcgggacttgccactaagggtgaaggagaaggggttggggtacttaaccctctcccagaaaagcgggacttgccgctaagggtgaaggagaagggcttgaggggtacttgcccctctcccagaaaagcagagaaggggtagagacaaggagagaaggggttgagctacttgccccttccccagaaaagcgggacttgccgcttaaggtgaaggatcaaggcaggcgtccctgcgtggtctgacacccttgaaacgtgggtgtataatcagagaggcgtccctgcaacgattaaacaccaagggaaggctgccttcccagtccgtgaccggcgccggagttttgggtccacggataaaacatgtctcctttgtctctcccagaaaatgaaaggaattgaaattaagagaagggagagattgaagagtggaaaggagaaagtggttgatggacagtgagagaggttggagaagagagtaagaagaggccgtttacctgatttaaaattggtgagatgttccttgggctggtcggtctgaggacatgaggtcataggtggatctttctcacggagcaaagagcaggaggacaggggattgatctcccaagggaggtaccccgatccaagtcacagcaccaaatttcatgtgtgtccgtgtgaagagaccactaaacaggcttcgtgtgagcaacatggctgttatttcacctgggtgcaag

SEQ ID NO: 42578 - DNA, 1272 bp, Artificial sequence
  DNA replication origin
tctcaagggacggtagtccgggacactggagtggccataatagcggcggctgtagtctctgagcgcagggacaaaatccccagggtcgcggcacgggggcagtggctcccggacccgcgggcctgagtagccatcttgcccccacacggccggggccttcccaggcattccactgccgccaatgcgagccaggcttgaccggggcacagccctcttgtggggtgggccggcccagcgccgtggctgcaagcctgagtagccatcttgccccgacacagtcggtgccttcccgcgcattccacagccaacgctgtgagccaggctcgacggcgtggccctcttgtggggtgggctggcccagtgccgcggtggcggcccgcgcttcctgggcatcggggccctgtagggccacaggtcgaaataccccgcgtagccgcggccgtcatcaggcctgccctgagaggggggtcgctgtgggctgctgccacccccacgggttctgtgtgagaaccttgagcgactgccgctgccgggggttggcgggacccatcggctgctcttgaatgccggtttgatggtctgggccaccatgatggccttaccatccaggtacttgccgttcatatctctggcggcagccttggcgtctgcagggctttcgaaggtgacgaacgcgaagcccctcgacttgttggtttttcggtctttcatcaggaacaccttgatgatgtggccatacttgccaaactcggctttgagggctttctcgtcggttttgaggttgaggcccccaatgaaaagcttctctgggcgatccgcttccatcatgtctccctgccgaatggtgggtcagaggaagtgggaagtgatgacgcggcagttcagtcgcggccttcgagcgctctcgtggagggcggctcctaccggttgggggggtggatgtctcaagaaggaaaagagtaccttacgtcatagttcttgggaacaccaacgtctatgatacaggtagaggaaatcctaggaatagaaaataagaagtagccagagaggtaggaagagatcccagaagtgtagtcttctaagccagaggaaaataatctttccagacatatggaatggttattgatatggtggttgttggttacattggtggatgtgagagtggatagaaaccaaattgcagtgggttaagaagtccatggtaagtaagaaatttagttgtgttgtgggtttatgtgagtttggctgtaaaagaagaggcagatggagggg

SEQ ID NO: 42579 - DNA, 1875 bp, Artificial sequence
  DNA replication origin
ggctcctaccgagagcccctcaagagctacggaggcccatgcggcgctgcccctgtgtgggggacaccgccatcttatggaggaggatgccgctacgaggagtaccagggcaactcgcccgatgcctgcagtgaaggccgctcgtccgaggccttgccagtcgtcttgccagacgcctacagcagggaccactcgcccaaagcctatagtgggggccgcagcagttccagtaacggttacagccggagtgaccgctacggagaagaaggctgctacgaggagtacagaggccgctcgcccgacgcccacagcgggggccgcaacagttccagcaacagttacggccagagccaccactatggaggagaaggccgctatgaggagtaccgaggccgctcacacgaggcccgcagcgggggccgctccactgatgcccacagcaggggccggtccgacgacgcctacagtgggggccatgacagttccagctggagcgactgctgcggaggaggaggccgttatgaggagtaccaaggccgctcgctggatgccaacagtggaggctgctcgcccgaggcctacagtgggggccacgacaattccagctggagcgaccgctacggagtaggaggccactatgaggagaaccgaggccactctctggatgccaacagcggaggccgttcacccgacacccacagtgggggccacagcagttccagcaacagttacggccagagccaccgctatggaggagaaggccgctatgagtaccgaggccgctcgcatgacgcccacagtgggggctgctctgccgacgcctacagtgggggccacgacagttccagccagagcaaccgctacggaggaggaggctgctacgaggagtaccgaggccgctccctcgatgccaacagtggaggccgctcgcccaatgcctacagcgggggccacgacagttccagctggagccaccgctacggaggaggaggccgctacgaggagtaccgaggccgctcccttgatgccaacagtggaggccgctcgcctgatgcctacagtgggggccacgacagttctggccagagcaactgctacggaggaggaggccgctacgaggagtaccgaggccgcttgctcgatgccaacagtggaggccgctcgcctgatgcctacagtgggggccacgacagttccagccagagcaaccgctatggaggaggcggccgctacgaggagtaccgaggccactcgcttgatgccaacagcggaggccgctcgcctgacacctacagccggggccacgacagttccagccagagcgaccactatggaggaggaggtcgctcactcgatgccaacagcagtggccgcttgcctgacgcctacagtgggggccatgacagttccagccggagccaccgctacggaggaggaggccgctacgaggagtaccgaggccgctcgctcgatgccaacagcggaggccgctcacccaatgcctacagcgggggccacaacagttccagccggaacgacccctgcagaggaggaggccgctacgaggagaaccgaggtcactctctcgatgccaacagcggaggccactcacccaacgcctacagtgggggccgtgacagttccagcaacagttacgaccggagccaccgctatggaggaggaggccactacgaagagtaccgaggccgctcgcacgacacccacagcaggggccgatcgcccgatgcccacagcggggaccactacaccgaagcctacagcaggggccgcgacagtttcagcaacagctatggccggagtgaccattacggaagaggaggctgctacgaggaataccaaggccgctcgcccaat

SEQ ID NO: 42580 - DNA, 1257 bp, Artificial sequence
  DNA replication origin
taacatcctaccagtttctatacatccttcaggcagcattcctcccctcccctattgcttgattcgcccctcacgttcaggagaacgggctgccccgactttgttagtctggcggtccccgcgcacccgcccagacccgcagagtccaacaacgcagccacgcagccacccactccccgcacctcctccttcacagccagcttcccctccccccgtcctgtcacctgcttgggtggtgtccgtcaggtcgtagccgctgcccgggaagtctcggagtttccgaccactgaggctcaggatgccggagctgcccgcctcttccagggcccggtccaggctcctcacggtgtgctgaggctgcaggctccccgggttccacggcggcccgttggggaacggctgaccgaaaagagtcggtaccgggatggggaccaccagggtcccgccgccgccgccgcctccccctccagccccgccacctccccctccagccgtgccacagccaccgctacttccacctccaccacaaccgccgcccccactgttaccgcctcctccctgactcgccgccatgttcctgggagagagaatagcccccgacaatactgtcagcctgtgccgcgagtgtaaggggttcttaggacgcatgcgcagactgggggcggggggtggggggcgaggtagagagtgggaaggaaccagggggcgggctgggaggaggtgttggatagagaaaagatgatgtttgaaagtgcagaacgcttgctttaagaaatgtatgataagaaggatgctaaatcccggttctgctgctttgggtaccaaagtcttgcgaaacgacaccaggcgaactataggtcatctgggctgtatgtccccaactctctaagttgcttcactgtttccgttctgcaaaacagaaacaaatatatgagctagggatgaaagggattcgtttcagaatatacagaaacagcacttagaagggctatggggcagcttattgagaagcttactgcaaatgcctcaggaatcctttaccagtgttagagaaacgctggggagtcacttggggagggaaatgagtgcagtgttgagtttggggcatatatgaatttctccatagtttagaattctataataggaaaagatttgtaaaatgttttcaaggaagcctctcgtttcaatgtatgtaagtctcagccagactgttgccttccaaaacttggaagagttatccacattctgttctatcac

SEQ ID NO: 42581 - DNA, 992 bp, Artificial sequence
  DNA replication origin
ggccagccgtgccgtctgggagggaggtgggggggtcagccccccgcctggccagccgtgccgtccgggagggaggtgggggggtcagccccccgcccggccagccgccccgtctgggaggtgaggggcgcctctgcccggccgcccctactgggaagtgaggagcccctctgcccggccagccgccccgtccgggagggaggtgggggggtcggccccccgcccggccagccgccccgtccgggagggaggtggggggggggggggtcagcccccctgcctggccagccgccccgtccgggaggtgaggggcgcctctgcccggctgcccctactgggaagtgaggagcccctctgcccggccagccgctccgtccgggagggaggtgggggggggtcagcccccctgcccggccagccgcccagtccgggaggtgaggggcgcctctgcccggccgcccctactgggaagtgaggagcccctctgcccggccaccaccccgtctgggaggtgtacccaacagctcattgagaacgggccaggatgacaatggcggctttgtggattagaaaggcgggaaaggtggggaaaagattgagcaatcggatggttgccgtgtctgtgtagaaagtagaagacatgggagacttttcattttgttctgcactaagaaaaattcctctgccttgggatcctgttgatctgtgaccttacccccaaccctgtgctctctgaaacatgtgctgtgtccactcagggttaaatggattaagggcggtgcaagatgtgctttgttaaacagatgcttgaaggcagcatgctcgttaagagtcatcaccaatccctaatctcaagtaatcagggacacaaacactgcggaaggccgcagggtcctctgcctaggaaaaccagagacctttgttcacttgtttatctgctgaccttccctccactattgtcccatgaccctgccaaatccccctctgtgaga

SEQ ID NO: 42582 - DNA, 1010 bp, Artificial sequence
  DNA replication origin
ctgaccccccccccccccacctccctcccggacggggcggctggccgggcggggggccgacccccccacctccctcccggacggggcggctggccgggcagaggggctcctcacttcccagtaggggcggccgggcagaggcgcccctcacctcccagacggggcggctggccgggcggggggctgacccccccacctccctcccggacggcacggctggccaggcggggggctgacccccccacctccctcccagacggcacggctggccaggcggggggctgacccccccacctccctcccggacggggcggctggccgggcggggggctgacccccccacctccctcccggacggcacggctggccaggcagggggctgacccccccacctccctcccggatggggcggctggcctggcgggggctgacccccccccacctccctcccggacggggtggctgccgggcggagacgctcctcacttcccagatggggtggctgctgggcggagaggctcctcacttctcagacggggcagctgccgggcggaggggctcctcacttctcagacggggcggttgccaggcagagggtctcctcacttctcagacggggcggccgggcagagacgctcctcacctcccagacggggtctcggccgggcagaggcgctccttacatcccagatggggcggcggggcagaggcgctccccacatctcagacgatgggcggccgggcagagacgctcctcacttcctagatgtgatggtggctgggaagaggcgctcctcacttcctagatgggatggcggccgggcggagacgctcctcactttccagactgggcagccaggcagaggggctcctcacatcccagacgatgggcggccaggcagagacactcctcacttcccagacggggtggcggccgggcagaggctgcaatctcggcactttgggaggccaaggcatgcggctgctccttgccctcgggccccgcgggg

SEQ ID NO: 42583 - DNA, 2526 bp, Artificial sequence
  DNA replication origin
actagggcaggtgctcggacggatccgaggtctctggaggtccgagagaagcaggctccgccgcggggtcgggcggtggaagccccagagagaggcgccaggactagctggacagccaggacgccgggccgttcccggacaggaagccatggctcgggagcctggtggcggccatgatctgggcgggaccagcggaggcctccgccagggagcctgggctcggggccttgggcagtttgcctggtgccccttcccgtgggagcaaccggggtgacggcctagctgggtcctcggcccgggaggctccgtcggccacactgcacgcctgcggtgtgaggagggccgactgccagtgctgagttccgtggccattgggccggtgcccgccgctgctggccgcgcgccggggcgttcctccttgcgtcctagggaggaaggtgggccgcggggcatcccgcggggcccgtacccagacggttcttgacgaggtggacgcaaggccaggcccggcccggcccggccaccctcagacgccgcgcacccgccttgttgagacttgccaccctgtcttgttgtgtccatgtccccgaggttgtcttggaggcgggccgttccccgtggtgctcatttctgcctgggggccttccggggaccccgcttgtctttgggggtgcgcaggcccttgccctgcgatcagaggcgcaccgaccgatgagttcggtggcaaagcttgagaaatggagactctctgggcatcggctaagggggcccggggccttcccaggcctgctggagtccgggaagccgggggcacccagaaggaaggacccgtcggactctgcctggggacagcctgctccgcgccagaagggtccgctgctcaggcagcatccccgtgcctctcctccagtgggtccctcaggtagaatcggggcaggccccactggacgtgcagggaggaggctcggaggatgcatcctttgcaggacccggtctggtacagcagcagacggagccatctcccggggctttctggcttctccgagggtgttcaggagtctcccaagtgcgcaggggctcgtgcccaaagggtggaggtcggcaccgcttcgctcaattcaggagtggagaaggaagctagaggaccctctggaggtggcaggtttaatgtcctgcttttttatttatttatttatttatttatttatttatttatttattttgtaatcaactgaaagaaggcagaaggagtcgatgggcctcttaggccggaaaccttacaagcataggaccaaggcagaaaaggtccagagggttcatggtcctccgttccacctgaatccagctagagagcgagccagggggataggtgtgcccctcgtcgcccgtgcgctgaggcactgtcacgcaaagagacattcaccttccacgtcaacgcacctttaagggcgagagcggtccgccgtgcccaagaggaacgggatgacattcaactgggacttgcctcaccttggcttgggggacctcgagagcggtcccgtgggggcggtgttactcgtggtggtagaagtggagggcgtgtccgggtacttgagttcatgggcatctctcccgccgcctctcagcctatctgcaccatgtctcacacgttcagttgcagctcttaccgttttgaaggcgcacgtgggcaagaagtcctgggcagcacaagaaagtcaatcacgttgagacagagagagcaggagaggaagtgggccccagtagaagtgggcgagagagcgttgggtgggaacgtggcacgagagagagaaattatgagattgagagagagagagagagagagagagagagagagaaagagaaagagagagagaaagagaaagagacagagaaaagaaactatgttgtttaaaatgccagcggaaagtccatgggggtgaaagagtccggcaatggccagggagttagcagcttggcgtagtgtcttcccactgttttgtctgtcttgagaatagcattcaacgcgactgtgttcccgcagcagacgttaggccgctgcccacgccttgagtgccggacgaggtcaacataggctttccgtcacagaatatgtttgggcaggaagatcggaacacttggggctgggccatctaccgctcccccacggcacacacgagtcgtcagggaaatgcccgcctctgtgtgtgttgtacgtgcagccttctggcagagccgtggagagttggacgtaggccaggtgtgaggaggagaggtgtgtttggggtgccactggctcccttcctgcgtgacgtaggctggcgtgggctcttcacaccagccccttgccggtgctgccaacgtgagaagggcccgggtgccggtcccgctattccggaattgtgggttcacctgaagtttgaggccaaacccccagcggtcagtgggacgccagtcgcctttgacctcttggtcaagctgccttgccgtgacccgtgagaatgcccaagtgccaatgtgtcccggggc

SEQ ID NO: 42584 - DNA, 3222 bp, Artificial sequence
  DNA replication origin
ctggccattgccggactctttcacccccatggactttccactggcattttaaacaacatagtttcttttctctgtctctttctctttctctctctctttctctttctctctctctctctctctctctgtcaatctcataatttctctctctcgtgccacgttcccacccaacgctctctcgcccacttctactggggcccacttcctctcctgctctctctgtctcaacgtgattgactttcttgtgctgcccaggacttcttgcccacgtgcgccttcaaaacggtaagagctgcaactgaacgtgtgagacatggtgcagataggctgagaggcggcgggagagatgcccatgaactcaagtacccggacacgccctccacttctaccaccacgagtaacaccgcccccacgggaccgctcttgaggtcccccaagccaaggtgaaggcaagtcccagttgaatccagcccggccggccgcccggcccggccaccttcagacgccgcgcacccgccttgttgagacttgccaccctgtcttgttgtgtccatgtccccgaggttgtcttggaggcgggccgttccccgtggtgctcatttctgcctgggggccttccggggaccccgcttgtctttgggggtgcgcaggcccttgccctgcgatcagaggcgcaccgaccgatgagttcggtggcaaagcttgagaaatggagactctctgggcatcggctaagggggcccggggccttcccaggcctgctggagtccgggaagccgggggcacccagaaggaaggacccgtcggactctgcctggggacagcctgctccgcgccagaagggtccgctgctcaggcagcatccccgtgcctctcctccagtgggtccctcaggtagaatacgggcaggccccactggacgtgcagggaggaggctcggaggatgcatcctttgcaggacccggtctggtacagcagcagacggagccatctcccggggctttctggcttctccgagggtgttcaggagtctcccaagtgcgcaggggctcgtgcccaaagggtggaggtcggcaccgcttcgctcaattcaggagtggagaaggaagctagaggaccctctggaggtggcaggtttaatgtcctgcttttttatttatttatttatttatttatttatttattttgtaatcaactgaaagaaggcagaaggagtcgatgggcctcttaggccggaaaccttacaagcataggaccaaggcagaaaaggtccagagggttcatggtcctccgttccacctgaatccagctagagagcgagccagggggataggtgtgcccctcgtcgcccgtgcgctgaggcactgtcacgcaaagagacattcaccttccacgtcaacgcacctttaagggcgagagcggtccgccgtgcccaagaggaacgggatgacattcaactgggacttgcctcaccttggcttgggggacctcgagagcggtcccgtgggggcggtgttactcgtggtggtagaagtggagggcgtgtccgggtacttgagttcatgggcatctctcccgccgcctctcagcctatctgcaccatgtctcacacgttcagttgcagctcttaccgttttgaaggcgcacgtgggcaagaagtcctgggcagcacaagaaagtcaatcacgttgagacagagagagcaggagaggaagtgggccccagtagaagtgggcgagagagcgttgggtgggaacgtggcacgagagagagaaattatgagattgacagagagagagagagagagagagaaagagaaagagagagagaaagagaaagagacagagaaaagaaactatgttgtttaaaatgccagcggaaagtccatgggggtgaaagagtccggcaatggccagggagttagcagcttggcgtagtgtcttcccactgttttgtctgtcttgagaatagcattcaacgcgactgtgttcccgcagcagacgttaggccgctgcccacgccttgagtgccggacgaggtcaacataggctttccgtcacagaatatgtttgggcaggaagatcggaacacttggggctgggccatctaccgctcccccacggcacacacgagtcgtcagggaaatgcccgcctctgtgtgtgttgtacgtgcagccttctgggcagagccgtggagagttggacgtaggccaggtgtgaggaggagaggtgtgtttggggtggccactggctcccttcctgcgtgacgtaggctggcgtgggctcttcccccagccccttgccggtgctgccacgtgagaagggcccgggtgccggtcccgctattccggaattgtgggttcacctgaagtttgaggccaaacccccagcggtcagtgggacgccagtcgcctttgacctcttggtcaagctggccttgccgtgacccgtgagaatgcccaagtgccaatgtgtcccggggggcagggccggggctgggatcctagtgtgtgcccagtctccttctcgtccctgcgggttccaccatcctcccatcctaacgcatcgttagggatgcggttaggtcgggtccatccccagggcggtccaaggggaccgctttctggtttgtcaggaaggcaggctagtaagaagggtcccgccgagtcccatctgccaaggacagggtcccgcaggtgggccagggctggcccaaagcggccgagatgctgatccgccatgtgcggggcgctgttggcgttttttcctcagcaaagggcggagggagtggacgtgggggaagggcaggtgggcatttctggagcaatactgccatcaagaggaactggcttggcaatcccgcgcacccttcgctgtgctcgcctggggaggagtggcttgggactgtcctgggggaccaggcaggactagggcaggtgctcggacggatccgaggtctctggaggtccgagagaagcaggctccgccgcggggtcgggcggtggaagccccagagagaggcgccaggactagctggacagccaggacgccgggccgttcccggacaggaagccatggctcgggagcctggtggcggccatgatctgggcgggaccagcggaggcctccgccagggagcctgggctcggggccttgggcagtttgcctggtgccccttcccgtgggagcaaccggggtgacggcctagctgggtcctcggcc

SEQ ID NO: 42585 - DNA, 2080 bp, Artificial sequence
  DNA replication origin
cgtccagtggggcctgcccgtattctacctgagggacccactggaggagaggcacggggatgctgcctgagcagcggacccttctggcgcggagcaggctgtccccaggcagagtccgacgggtccttccttctgggtgcccccggcttcccggactccagcaggcctgggaaggccccgggcccccttagccgatgcccagagagtctccatttctcaagctttgccaccgaactcatcggtcggtgcgcctctgatcgcagggcaagggcctgcgcacccccaaagacaagcggggtccccggaaggcccccaggcagaaatgagcaccacggggaacggcccgcctccaagacaacctcggggacatggacacaacaagacagggtggcaagtctcaacaaggcgggtgcgcggcgtctgaaggtggccgggccgggcggccggccgggctggattcaactgggacttgccttcaccttggcttgggggacctcaagagcggtcccgtgggggcggtgttactcgtggtggtagaagtggagggcgtgtccgggtacttgagttcatgggcatctctcccgccgcctctcagcctatctgcaccatgtctcacacgttcagttgcagctcttaccgttttgaaggcgcacgtgggcaagaagtcctgggcagcacaagaaagtcaatcacgttgagacagagagagcaggagaggaagtgggccccagtagaagtgggcgagagagcgttgggtgggaacgtggcacgagagagagaaattatgagattgacagagagagagagagagagagagaaagagaaagagagagagaaagagaaagagacagagaaaagaaactatgttgtttaaaatgccagtggaaagtccatgggggtgaaagagtccggcaatggccagggagttagcagcttggcgtagtgtcttcccactgttttgtctgtcttgagaatagcattcaacgcgactgtgttcccgcagcagacgttaggccgctgcccacgccttgagtgccggacgaggtcaacataggctttccgtcacagaatatgtttgggcaggaagatcggaacacttggggctgggcatctaccgctcccccacggcacacacgagtcgtcagggaaatgcccgcctctgtgtgtgttgtacgtgcagccttctgggcagagccgtggagagttggacgtaggccaggtgtgaggaggagaggtgtgtttggggtggccactggctcccttcctgcgtgacgtaggctggcgtgggctcttcccccagccccttgccggtgctgccacgtgagaagggcccgggtgccggtcccgctattccggaattgtgggttcacctgaagtttgaggccaaacccccagcggtcagtgggacgccagtcgcctttgacctcttggtcaagctggccttgccgtgacccgtgagaatgcccaagtgccaatgtgtcccggggggcagggccggggctgggatcctagtgtgtgcccagtctccttctcgtccctgcgggttccaccatcctcccatcctaacgcatcgttagggatgcggttaggtcgggtccatccccagggcggtccaaggggaccgctttctggtttgtcaggaaggcaggctagtaagaagggtcccgccgagtcccatctgccaaggacagggtcccgcaggtgggccagggctggcccaaagcggccgagatgctgatccgccatgtgcggggcgctgttggcgttttttcctcagcaaagggcggagggagtggacgtgggggaagggcaggtgggcatttctggagcaatactgccatcaagaggaactggcttggcaatcccgcgcacccttcgctgtgctcgcctggggaggagtggcttgggactgtcctgggggaccaggcaggactagggcaggtgctcggacggatccgaggtctctggaggtccgagagaagcaggctccgccgcggggtcgggcggtggaagccccagagagaggcgccaggactagctggacagccaggacgccgggccgttcccggacaggaagcca

SEQ ID NO: 42586 - DNA, 2955 bp, Artificial sequence
  DNA replication origin
acagccaggacgccgggccgttcccggacaggaagccacggctcgggagcctggtggcggccatgatctgggcgggaccagcggaggcctccgccagggagcctgggctcggggccttgggcagtttgcctggtgccccttcccgtgggagcaaccggggtgacggcctagctgggtcctcggcccgggaggctccgtcggccacactgcacgcctgcggtgtgaggagggccgactgccagtgctgagttccgtggccattggcgcgggtgcccgccgctgctggccggcgccggggcgttcctccttgcgtcctagggaggaaggtgggccgcggggcatcccgcggggcccgtacccagacggttcttgacgaggtggacgcaaggccaggcccggcccggcccggcccggcccggccaccttcagacgccgcgcacccgccttgttgagacttgccaccctgtcttgttgtgtccatgtccccgaggttgtcttggaggcgggccgttccccgtggtgctcatttctgcctgggggccttccggggaccccgcttgtctttgggggtgcgcaggcccttgccctgcgatcagaggcgcaccgaccgatgagttcggtggcaaagcttgagaaatggagactctctgggcatcggctaagggggcccggggccttcccaggcctgctggagtccgggaagccgggggcacccagaaggaaggacccgtcggactctgcctggggacagcctgctccgcgccagaagggtccgctgctcaggcagcatccccgtgcctctcctccagtgggtccctcaggtagaatcggggcaggccccactggacgtgcagggaggaggctcggaggatgcatcctttgcaggacccggtctggtacagcagcagacggagccatctcccggggctttctggcttctccgagggtgttcaggagtctcccaagtgcgcaggggctcgtgcccaaagggtggaggtcggcaccgcttcgctcaattcaggagtggagaaggaagctagaggaccctctggaggtggcaggtttaatgtcctgcttttttatttatttatttatttatttatttatttatttattttgtaatcaactgaaagaaggcagaaggagtcgatgggcctcttaggccggaaaccttacaagcattaggaccaaggcagaaaaggtccagagggttcatggtcctccgttccacctgaatccagctagagagcgagccagggggataggtgtgcccctcgtcgcccgtgcgctgaggcactgtcacgcaaagagacattcaccttccacgtcaacgcacctttaagggcgagagcggtccgccgtgcccaagaggaacgggatgacattcaactgggacttgcctcaccttggcttgggggacctcgagagcggtcccgtgggggcggtgttactcgtggtggtagaagtggagggcgtgtccgggtacttgagttcatgggcatctctcccgccgcctctcagcctatctgcaccatgtctcacacgttcagttgcagctcttaccgttttgaaggcgcacgtgggcaagaagtcctgggcagcacaagaaagtcaatcacgttgagacagagagagcaggagaggaagtgggccccagtagaagtgggcgagagagcgttgggtgggaacgtggcacgagagagagaaattatgagattgacagagagagagagagagagagagaaagagaaagagagagagaaagagaaagagacagagaaaagaaactatgttgtttaaaatgccagtggaaagtccatgggggtgaaagagtccggcaatggccagggagttagcagcttggcgtagtgtcttcccactgttttgtctgtcttgagaatagcattcaacgcgactgtgttcccgcagcagacgttaggccgctgcccacgccttgagtgccggacgaggtcaacataggctttccgtcacagaatatgtttgggcaggaagatcggaacacttggggctgggccatctaccgctcccccacggcacacacgagtcgtcagggaaatgcccgcctctgtgtgtgttgtacgtgcagccttctgggcagagccgtggagagttggacgtaggccaggtgtgaggaggagaggtgtgtttggggtggccactggctcccttcctgcgtgacgtaggctggcgtgggctcttcccccagccccttgccggtgctgccacgtgagaagggcccgggtgccggtcccgctattccggaattgtgggttcacctgaagtttgaggccaaacccccagcgatcagtgggagaccagtcgcgtttgacctgttggtcgagctggccttgccgagacaaaaaagaaaaaacaagtgccaatgtgtcccggggggcagggccggggctgggatcctagtgtgtgcccagtctccttctcgtccctgcgggttccaccatcctcccatcctaacgcatcgttagggatgcggttaggtcgggtccatccccagggcggtccaaggggaccgctttctggtttgtcaggaaggcaggctagtaagaagggtcccgccgagtcccatctgccaaggacagggtcccgcagtgggccagggctggcccaaagcggccgagatgctgatccgccatgtgcggggcgctgttggcgttttttcctcagcaaagggcggagggagtggacgtgggggaagggcaggtgggcatttctggagcaatactgccatcaagaggaactggcttggcaatcccgcgcacccttcgctgtgctcgcctggggaggagtggcttgggactgtcctgggggaccaggcaggactagggcaggtgctcggacgcatccgaggtctctggaggtccgagagaagcaggctccgccgcggggtcgggcggtggaagccccagagagaggcgc

SEQ ID NO: 42587 - DNA, 917 bp, Artificial sequence
  DNA replication origin
gggagagtggcttgggactgtctgggggaccaggcaggactagggcaggtgctcggacggatccgaggtctctggaggtccgagagaagcagtcgccgcgggtcgggcggtgaagccccagagagaggcgccaggactagctggacagccaggacgcgggcgttcccggacaggaagccatggctcgggagcctggtggcggccatgatctgggcgggaccagcggagcctccgccagggagcctgggctcggggccttgggcagtttgcctggtgccccttcccgtgggagcaaccggggtgacggcctagctgggtcctcggcccgggaggctccgtcggccacactgcacgcctgcggtgtgaggagggccgactgccagtgctgagttccgtggccattggcgcgggtgcccgccgctgctggccggcgccggggcgttcctccttgcgtcctagggaggaaggtgggccgcggggcatcccgcggggcccgtacccagacggttcttgacgaggtggacgcaaggccaggcccggcccggcccggcccggcccggccaccttcagacgccgcgcacccgccttgttgagacttgccaccctgtcttgttgtgtccatgtccccgaggttgtcttggaggcgggccgttccccgtggtgctcatttctgcctgggggccttccggggaccccgcttgtctttgggggtgcgcaggcccttgccctgcgatcagaggcgcaccgaccgatgagttcggtggcaaagcttgagaaatggagactctctgggcatcggctaagggggcccggggccttcccaggcctgctggagtccgggaagccgggggcacccagaagagaaggacccgtcggactctgcctggggacagcctgctgcgtgccagaaaggtctg

SEQ ID NO: 42588 - DNA, 1554 bp, Artificial sequence
  DNA replication origin
ggctgtccccaggcagagtccgacgggtccttctcttctgggtgcccccggcttcccggactccagcaggcctgggaaggccccgggcccccttagccgatgcccagagagtctccatttctcaagctttgccaccgaactcatcggtcggtgcgcctctgatcgcagggcaagggcctgcgcacccccaaagacaagcggggtccccggaaggcccccaggcagaaatgagcaccacggggaacggcccgcctccaagacaacctcggggacatggacacaacaagacagggtggcaagtctcaacaaggcgggtgcgcggcgtctgaaggtggccgggccgggccgggccgggccgggcctggccttgcgtccacctcgtcaagaaccgtctgggtacgggccccgcgggatgccccgcggcccaccttcctccctaggacgcaaggaggaacgccccggcgccggccagcagcggcgggcacccgcgccaatggccacggaactcagcactggcagtcggccctcctcacaccgcaggcgtgcagtgtggccgacggagcctcccgggccgaggacccagctaggccgtcaccccggttgctcccacgggaaggggcaccaggcaaactgcccaaggccccgagcccaggctccctggcggaggctccgctggtcccgcccagatcatggccgccaccaggctcccgagccatggcttcctgtccgggaacgcccgcgtcctggctgtccagctagtcctggcgcctctctctggggcttcaccgcccgacccgcggcgactgcttctctcggacctccagagacctcggatccgtccgagcacctgccctagtcctgcctggtcccccagacagtcccaagccactctccccaggcgacacacaagggtgccgggattgccaagccagttcctcttgatggcagtattgctccagaaatgcccacctgcccttcccccacgtccactccctccgccctttgctgaggaaaaaacgccaacagcgccccgcacatggcggatcagcatctcgggcgctttgggcagccctggctagaagtgggcgagagagcgttgggtgggaacgtggcacgagagagagaaattatgagattgacagagagagagagagagagagagagagagagagaaagagaaagagagagagaaagagaaagagacagagaaaagaaactatgttgtttaaaatgccagcggaaagtcccatgggggtgaaagagtccggcaatggccagggagttagcagcttggcgtagtgtcttcccactgttttgtctgtcttgagaatagcattcaacgcgactgtgttcccgcagcagacgttagccgctgcccacgccttgagtgccggacgaggtcaacataggctttccgtcacagaatatgtttgggcaggaagatcggaacacttggggctgggcatctaccgctcccccacggcacacacgagtcgtcagggaaatgcccgcctctgtgtgtgttgtacgtgcagccttctgggcagagcggtg

SEQ ID NO: 42589 - DNA, 1799 bp, Artificial sequence
  DNA replication origin
ggctggaatgctgtggcaccttcaagactcactacagcctcaactttctggcctccagcaatcctccaaacacatcctccaaagtagctgttattacaagtgcgcactaccacaccgggatagtttttggttattgtttggatgggtcttttattaatattactattttttgcagagatggggttccgccatattgctcacgctggcctagaactgccgagctcaaagaatccacctaccgtgacgtcccaaagttgtggaattgcagtgcttcactggccccggccttatttccaaaatgaaataactcacataagttctgtggtgacatgtaaaaacccaattcccgtaacagctttcccaacgttgattttttagacatgatgaatgttatgtgttcttattaatccatgtcccctttaaaggcacatgtgggcaagaagaaccagacagtccaagaaacccaatcatgttgagacatggagagcagaaaaggaagcgagcccggaagaagtgggtgagagggcgttggacctcaatgtcgagagagagagagtgacagaaagagagagagagagagagagagaaagagagacagagaaagaagaaacggtgctgtagaaaacaacaatggaaagtccatggaggtcaaagagtccggcaagggacagggagttagcagcctggcgtagtgtcttcccactgttttgtctgtcttgagaatagcattcaacgcgactgtgttcccgcagcagacgttaggccgctgcccacgccttgagtgccggacgaggtcaacataggctttccgtcacagaatatgtttgggcaggaagatcggaacacttggggctgggccatctaccgctcccccacggcacacacgagtcgtcagggaaatgcccgcctctgtgtgtgttgtacgtgcagccttctgggcagagccgtggagagttggacgtaggccaggtgtgaggaggagaggtgtgtttggggtggccactggctcccttcctgcgtgacgtaggctggcgtgggctcttcccccagccccttgccggtgctgccacgtgagaagggcccgggtgccggtcccgctattccggaattgtgggttcacctgaagtttgaggccaaacccccagcggtcagtgggacgccagtcgcctttgacctcttggtcaagctggccttgccgtgacccgtgagaatgcccaagtgccaatgtgtcccggggggcagggccggggctgggatcctcgtgtgtgcccagtctccttctcgtccctgcgggttccaccatcctcccatcctaacgcatcgttagggatgcggttaggtcgggtccatccccagggcggtccaaggggaccgctttctggtttgtcaggaaggcaggctagtaagaagggtcccgccgagtcccatctgccaaggacagggtcccgcaggtgggccagggctggcccaaagcggccgagatgctgatccgccatgtgcggggcgctgttggcgttttttcctcagcaaagggcggagggagtggacgtgggggaagggcaggtgggcatttctggagcaatactgccatcaagaggaactggcttggcaatcccgcgcacccttcgctgtgctcgcctggggaggagtggcttgggactgtcctgggggaccaggcaggactagggcaggtgctcggacggatccgaggtctctggaggtccgagagaagcaggctccgccgcggggtcgggcggtggaagccccagagagaggcgccaggactagctggacagcca

SEQ ID NO: 42590 - DNA, 3035 bp, Artificial sequence
  DNA replication origin
agagagaggcgccaggactagctggacagccaggacgccgggccgttcccggacaggaagccatggctcgggagcctggtggcggccatgatctgggcgggaccagcggaggcctccgccagggagcctgggctcggggccttgggcagtttgcctggtgccccttcccgtgggagcaaccggggtgacggcctagctgggtcctcggcccgggaggctccgtcggccacactgcacgcctgcggcgtgaggagggccgactgccagtgctgagttccgtggccattggcgccggtgcccgccgctgctggccggcgccggggcgttcctccttgcgtcctagggaggaaggtgggccgcggggcatcccgcggggcccgtacccagacggttcttgacgaggtggacgcaaggccaggcccggcccggcccggcccggcccggccaggccacccttagacgccgcgcacccgccttgttgagacttgccaccctgtcttgttgtgtccatgtccccgaggttgtcttggaggcgggccgttccccgtggtgctcatttctgcctgggggccttccggggaccccgcttgtctttgggggtgcgcaggcccttgccctgcgatcagaggcgcaccgaccgatgagttcggtggcaaagcttgagaaatggagactctctgggcatcggctaagggggcccggggccttcccaggcctgctggagtccgggaagccgggggcacccagaaggaaggacccgtcggactctgcctggggacagcctgctccgcgccagaagggtccgctgctcaggcagcatccccgtgcctctcctccagtgggtccctcaggtagaatcggggcaggccccactggacgtgcagggaggaggctcggaggatgcatcctttgcaggacccggtctggtacagcagcagacggagccatctcccggggctttctggcttctccgagggtgttcaggagtctcccaagtgcacaggggctcgtgcccaaagggtggaggtcggcaccgcttcgctcaatccaggagtggagaaggaagctagaggaccctctggaggtggcaggtttaatgtcctgcttttttatttatttatttatttatttatttatttatttatttatttattttgtaatcaactgaaagaaggcagaaggagtcgatgggcctcttaggccggaaaccttacaagcataggaccaaggcagaaaagggccagagggttcatggtcctccgttccacctgaatccagctagagagcgagccagggggataggtgtgcccctcgtcgcccgtgcgctgaggcactgtcacgcaaagagacattcaccttccacgtcaacgcacctttaagggcgagagcggtccgccgtgcccaagaggaacgggatgacattcaactgggacttgcctcaccttggcttgggggacctcgagagcggtcccgtgggggcggtgttactcgtggtggtagaagtggagggcgtgtccgggtacttgagttcatgggcatctctcccgccgcctctcagcctatctgcaccatgtctcacacgttcagttgcagctcttaccgttttgaaggcgcacgtgggcaagaagtcctgggcagcacaagaaagtcaatcacgttgagacagagagagcaggagaggaagtgggccccagtagaagtgggcgagagagcgttgggtgggaacgtggcacgagagagagaaattatgagattgagagagagagagagagagagagagaaagagaaagagagagagaaagagaaagagacagagaaaagaaactatgttgtttaaaatgccagcggaaagtccatgggggtgaaagagtccggcaatggccagggagttagcagcttggcgtagtgtcttcccactgttttgtctgtcttgagaatagcattcaacgcgactgtgttcccgcagcagacgttaggccgctgcccacgccttgagtgccggacgaggtcaacataggctttccgtcacagaatatgtttgggcaggaagatcggaacacttggggctgggccatctaccgctcccccacggcacacacgagtcgtcagggaaatgcccgcctctgtgtgtgttgtacgtgcagccttctgggcagagccgtggagagttggacgtaggccaggtgtgaggaggagaggtgtgtttggggtggccactggctcccttcctgcgtgacgtaggctggcgtgggctcttcccccagccccttgccggtgctgccacgtgagaagggcccgggtgccggtcccgctattccggaattgtgggttcacctgaagtttgaggccaaacccccagcggtcagtgggacgccagtcgcctttgacctcttggtcaagctggccttgccgtgacccgtgagaatgcccaagtgccaatgtgtcccggggggcagggccggggctgggatcctcgtgtgtgcccagtctccttctcgtccctgcgggttccaccatcctcccatcctaacgcatcgttagggatgcggttaggtcgggtccatccccagggcggtccaaggggaccgctttctggtttgtcaggaaggcaggctagtaagaagggtcccgccgagtcccatctgccaaggacagggtcccgcaggtgggccagggctggcccaaagcggccgagatgctgatccgccatgtgcggggcgctgttggcgttttttcctcagcaaagggcggagggagtggacgtgggggaagggcaggtgggcatttctggagcaatactgccatcaagaggaactggcttggcaatcccgcgcacccttcgctgtgctcgcctggggaggagtggcttgggactgtcctgggggaccaggcaggactagggcaggtgctcggacggatccgaggtctctggaggtccgagagaagcaggctccgccgcggggtcgggcggtggaagccccagagagaggcgccaggactagctggacagccaggacgccgggccgttcccggac

SEQ ID NO: 42591 - DNA, 3054 bp, Artificial sequence
  DNA replication origin
gagagaggcgccaggactagctggacagccaggacgccgggccgttcccggacaggaagccatggctcgggagcctggtggcggccatgatctgggcgggaccagcggaggcctccgccagggagcctgggctcggggccttgggcagtttgcctggtgccccttcccgtgggagcaaccggggtgacggcctagctgggtcctcggcccgggaggctccgtcggccacactgcacgcctgcggcgtgaggagggccgactgccagtgctgagttccgtggccattggcgccggtgcccgccgctgctggccggcgccggggcgttcctccttgcgtcctagggaggaaggtgggccgcggggcatcccgcggggcccgtacccagacggttcttgacgaggtggacgcaaggccaggcccggcccggcccggcccggcccggccaggccacccttagacgccgcgcacccgccttgttgagacttgccaccctgtcttgttgtgtccatgtccccgaggttgtcttggaggcgggccgttccccgtggtgctcatttctgcctgggggccttccggggaccccgcttgtctttgggggtgcgcaggcccttgccctgcgatcagaggcgcaccgaccgatgagttcggtggcaaagcttgagaaatggagactctctgggcatcggctaagggggcccggggccttcccaggcctgctggagtccgggaagccgggggcacccagaaggaaggacccgtcggactctgcctggggacagcctgctccgcgccagaagggtccgctgctcaggcagcatccccgtgcctctcctccagtgggtccctcaggtagaatcggggcaggccccactggacgtgcagggaggaggctcggaggatgcatcctttgcaggacccggtctggtacagcagcagacggagccatctcccggggctttctggcttctccgagggtgttcaggagtctcccaagtgcacaggggctcgtgcccaaagggtggaggtcggcaccgcttcgctcaatccaggagtggagaaggaagctagaggaccctctggaggtggcaggtttaatgtcctgcttttttatttatttatttatttatttatttatttatttatttatttattttgtaatcaactgaaagaaggcagaaggagtcgatgggcctcttaggccggaaaccttacaagcataggaccaaggcagaaaagggccagagggttcatggtcctccgttccacctgaatccagctagagagcgagccagggggataggtgtgcccctcgtcgcccgtgcgctgaggcactgtcacgcaaagagacattcaccttccacgtcaacgcacctttaagggcgagagcggtccgccgtgcccaagaggaacgggatgacattcaactgggacttgcctcaccttggcttgggggacctcgagagcggtcccgtgggggcggtgttactcgtggtggtagaagtggagggcgtgtccgggtacttgagttcatgggcatctctcccgccgcctctcagcctatctgcaccatgtctcacacgttcagttgcagctcttaccgttttgaaggcgcacgtgggcaagaagtcctgggcagcacaagaaagtcaatcacgttgagacagagagagcaggagaggaagtgggccccagtagaagtgggcgagagagcgttgggtgggaacgtggcacgagagagagaaattatgagattgagagagagagagagagagagagagaaagagaaagagagagagaaagagaaagagacagagaaaagaaactatgttgtttaaaatgccagcggaaagtccatgggggtgaaagagtccggcaatggccagggagttagcagcttggcgtagtgtcttcccactgttttgtctgtcttgagaatagcattcaacgcgactgtgttcccgcagcagacgttaggccgctgcccacgccttgagtgccggacgaggtcaacataggctttccgtcacagaatatgtttgggcaggaagatcggaacacttggggctgggccatctaccgctcccccacggcacacacgagtcgtcagggaaatgcccgcctctgtgtgtgttgtacgtgcagccttctgggcagagccgtggagagttggacgtaggccaggtgtgaggaggagaggtgtgtttggggtggccactggctcccttcctgcgtgacgtaggctggcgtgggctcttcccccagccccttgccggtgctgccacgtgagaagggcccgggtgccggtcccgctattccggaattgtgggttcacctgaagtttgaggccaaacccccagcggtcagtgggacgccagtcgcctttgacctcttggtcaagctggccttgccgtgacccgtgagaatgcccaagtgccaatgtgtcccggggggcagggccggggctgggatcctcgtgtgtgcccagtctccttctcgtccctgcgggttccaccatcctcccatcctaacgcatcgttagggatgcggttaggtcgggtccatccccagggcggtccaaggggaccgctttctggtttgtcaggaaggcaggctagtaagaagggtcccgccgagtcccatctgccaaggacagggtcccgcaggtgggccagggctggcccaaagcggccgagatgctgatccgccatgtgcggggcgctgttggcgttttttcctcagcaaagggcggagggagtggacgtgggggaagggcaggtgggcatttctggagcaatactgccatcaagaggaactggcttggcaatcccgcgcacccttcgctgtgctcgcctggggaggagtggcttgggactgtcctgggggaccaggcaggactagggcaggtgctcggacggatccgaggtctctggaggtccgagagaagcaggctccgccgcggggtcgggcggtggaagccccagagagaggcgccaggactagctggacagccaggacgccgggccgttcccggacaggaagccatggctcgggag

SEQ ID NO: 42592 - DNA, 3092 bp, Artificial sequence
  DNA replication origin
ggaagccccagagagaggcgccaggactagctggacagccaggacgccgggccgttcccggacaggaagccatggctcgggagcctggtggcggccatgatctgggcgggaccagcggaggcctccgccagggagcctgggctcggggccttgggcagtttgcctggtgccccttcccgtgggagcaaccggggtgacggcctagctgggtcctcggcccgggaggctccgtcggccacactgcacgcctgcggcgtgaggagggccgactgccagtgctgagttccgtggccattggcgccggtgcccgccgctgctggccggcgccggggcgttcctccttgcgtcctagggaggaaggtgggccgcggggcatcccgcggggcccgtacccagacggttcttgacgaggtggacgcaaggccaggcccggcccggcccggcccggcccggccaggccacccttagacgccgcgcacccgccttgttgagacttgccaccctgtcttgttgtgtccatgtccccgaggttgtcttggaggcgggccgttccccgtggtgctcatttctgcctgggggccttccggggaccccgcttgtctttgggggtgcgcaggcccttgccctgcgatcagaggcgcaccgaccgatgagttcggtggcaaagcttgagaaatggagactctctgggcatcggctaagggggcccggggccttcccaggcctgctggagtccgggaagccgggggcacccagaaggaaggacccgtcggactctgcctggggacagcctgctctgcgccagaagggtccgctgctcaggcagcatccccgtgcctctcctccagtggctccctcaggtagaatcggggcaggccccactggacgtgcagggaggaggctcggaggatgcatcctttgcaggacccggtctggtacagcagcagacggagccatctcccggggctttctggcttctccgagggtgttcgggagtctcccaagtgcacaggggctcgtgcccaaagggtggaggtcggcaccgcttcgctcaatccaggagtggagaaggaagctagaggaccctctggaggtggcaggtttaatgtcctgcttttttatttatttatttatttatttatttatttatttatttatttattttgtaatcaactgaaagaaggcagaaggagtcgatgggcctcttaggccggaaaccttacaagcataggaccaaggcagaaaaggtccagagggttcatggtcctccgttccacctgaatccagctagagagcgagccagggggataggtgtgcccctcgtcgcccgtgcgctgaggcactgtcacgcaaagagacattcaccttccacgtcaacgcacctttaagggcgagagcggtccgccgtgcccaagaggaatgggatgacattcaactgggacttgcctcaccttggcttgggggacctcgagagcagtcccgtgggggcggtgttactcgtggtggtagaagtggagggcgtgtccgggtacttgagttcatgggcatctctcccgccgcctctcagcctatctgcaccatgtctcacacgttcagttgcagctcttaccgttttgaaggcgcacgtgggcaagaagtcctgggcagcacaagaaagtcaatcacgttgagacagagagagcaggagaggaagtgggccccagtagaagtgggcgagagagcgttgggtgggaacgtggcacgagagagagaaattatgagattgagagagagagagagagagagagagagaaagagaaagagagagagaaagagaaagagacagagaaaagaaactatgttgtttaaaatgccagcggaaagtccatgggggtgaaagagtccggcaatggccagggagttagcagcttggcgtagtgtcttcccactgttttgtctgtcttgagaatagcattcaacgcgactgtgttcccgcagcagacgttaggccgctgcccacgccttgagtgccggacgaggtcaacataggctttccgtcacagaatatgtttgggcaggaagatcggaacacttggggctgggccatctaccgctcccccacggcacacacgagtcgtcagggaaatgcccgcctctgtgtgtgttgtacgtgcagccttctgggcagagccgtggagagttggacgtaggccaggtgtgaggaggagaggtgtgtttggggtggccactggctcccttcctgcgtgacgtaggctggcgtgggctcttcccccagccccttgccggtgctgccacgtgagaagggcccgggtgccggtcccgctattccggaattgtgggttcacctgaagtttgaggccaaacccccagcggtcagtgggacgccagtcgcctttgacctcttggtcaagctggccttgccgtgacccgtgagaatgcccaagtgccaatgtgtcccggggggcagggccggggctgggatcctcgtgtgtgcccagtctccttctcgtccctgcgggttccaccatcctcccatcctaacgcatcgttagggatgcggttaggtcgggtccatccccagggcggtccaaggggaccgctttctggtttgtcaggaaggcaggctagtaagaagggtcccgccgagtcccatctgccaaggacagggtcccgcaggtgggccagggctggcccaaagcggccgagatgctgatccgccatgtgcggggcgctgttggcgttttttcctcagcaaagggcggagggagtggacgtgggggaagggcaggtgggcatttctggagcaatactgccatcaagaggaactggcttggcaatcccgcgcacccttcgctgtgctcgcctggggaggagtggcttgggactgtcctgggggaccaggcaggactagggcaggtgctcggacggatccgaggtctctggaggtccgagagaagcaggctccgccgcggggtcgggcggtggaagccccagagagaggcgccaggactagctggacagccaggacgccgggccgttcccggacaggaagccatggctcgggagcctggtggcggccctgatctgggcgg

SEQ ID NO: 42593 - DNA, 3014 bp, Artificial sequence
  DNA replication origin
tggacagccaggacgccgggccgttcccggacaggaagccatggctcgggagcctggtggcggccctgatctgggcgggaccagcggaggcctccgccagggagcctgggctcggggccttgggcagtttgcctggtgccccttcccgtgggagcaaccggggtgacggcctagctgggtcctcggcccgggaggctccgtcggccacactgcacgcctgcggcgtgaggagggccgactgccagtgctgagttccgtggccattggcgccggtgcccgccgctgctggccggcgccggggcgttcctccttgcgtcctagggaggaaggtgggccgcggggcatcccgcggggcccgtacccagacggttcttgacgaggtggacgcaaggccaggcccggcccggcccggcccggcccggccaggccacccttagacgccgcgcacccgccttgttgagacttgccaccctgtcttgttgtgtccatgtccccgaggttgtcttggaggcgggccgttccccgtggtgctcatttctgcctgggggccttccggggaccccgcttgtctttgggggtgcgcaggcccttgccctgcgatcagaggcgcaccgaccgatgagttcggtggcaaagcttgagaaatggagactctctgggcatcggctaagggggcccggggccttcccaggcctgctggagtccgggaagccgggggcacccagaaggaaggacccgtcggactctgcctggggacagcctgctccgcgccagaagggtccgctgctcaggcagcatccccgtgcctctcctccagtgggtccctcaggtagaatcggggcaggccccactggacgtgcagggaggaggctcggaggatgcatcctttgcaggacccggtctggtacagcagcagacggagccatctcccggggctttctggcttctccgagggtgttcaggagtctcccaagtgcacaggggctcgtgcccaaagggtggaggtcggcaccgcttcgctcaatccaggagtggagaaggaagctagaggaccctctggaggtggcaggtttaatgtcctgcttttttatttatttatttatttatttatttatttatttattttgtaatcaactgaaagaaggcagaaggagtcgatgggcctcttaggccggaaaccttacaagcataggaccaaggcagaaaaggtccagagggttcatggtcctccgttccacctgaatccagctagagagcgagccagggggataggtgtgcccctcgtcgcccgtgcgctgaggcactgtcacgcaaagagacattcaccttccacgtcaacgcacctttaagggcgagagcggtccgccgtgcccaagaggaacgggatgacattcaactgggacttgcctcaccttggcttgggggacctcgagagcggtcccgtgggggcggtgttactcgtggtggtagaagtggagggcgtgtccgggtacttgagttcatgggcatctctcccgccgcctctcagcctatctgcaccatgtctcacacgttcagttgcagctcttaccgttttgaaggcgcacgtgggcaagaagtcctgggcagcacaagaaagtcaatcacgttgagacagagagagcaggagaggaagtgggccccagtagaagtgggcgagagagcgttgggtgggaacgtggcacgagagagagaaattatgagattgagagagagagagagagagagagagagagagaaagagaaagagagagagaaagagaaagagacagagaaaagaaactatgttgtttaaaatgccagcggaaagtccatgggggtgaaagagtccggcaatggccagggagttagcagcttggcgtagtgtcttcccactgttttgtctgtcttgagaatagcattcaacgcgactgtgttcccgcagcagacgttaggccgctgcccacgccttgagtgccggacgaggtcaacataggctttccgtcacagaatatgtttgggcaggaagatcggaacacttggggctgggccatctaccgctcccccacggcacacacgagtcgtcagggaaatgcccgcctctgtgtgtgttgtacgtgcagccttctgggcagagccgtggagagttggacgtaggccaggtgtgaggaggagaggtgtgtttggggtggccactggctcccttcctgcgtgacgtaggctggcgtgggctcttcccccagccccttgccggtgctgccacgtgagaagggcccgggtgccggtcccgctattccggaattgtgggttcacctgaagtttgaggccaaacccccagcggtcagtgggacgccagtcgcctttgacctcttggtcaagctggccttgccgtgacccgtgagaatgcccaagtgccaatgtgtcccggggggcagggccggggctgggatcctcgtgtgtgcccagtctccttctcgtccctgcgggttccaccatcctcccatcctaacgcatcgttagggatgcggttaggtcgggtccatccccagggcggtccaaggggaccgctttctggtttgtcaggaaggcaggctagtaagaagggtcccgccgagtcccatctgccaaggacagggtcccgcaggtgggccagggctggcccaaagcggccgagatgctgatccgccatgtgcggggcgctgttggcgttttttcctcagcaaagggcggagggagtggacgtgggggaagggcaggtgggcatttctggagcaatactgccatcaagaggaactggcttggcaatcccgcgcacccttcgctgtgctcgcctggggaggagtggcttgggactgtcctgggggaccaggcaggactagggcaggtgctcggacggatccgaggtctctggaggtccgagagaagcaggctccgccgcggggtcgggcggtggaagccccagagagaggcgccaggactagctggacagccaggacgccgggccgttcccggacagg

SEQ ID NO: 42594 - DNA, 3054 bp, Artificial sequence
  DNA replication origin
agagagaggcgccaggactagctggacagccaggacgccgggccgttcccggacaggaagccatggctcgggagcctggtggcggccatgatctgggcgggaccagcggaggcctccgccagggagcctgggctcggggccttgggcagtttgcctggtgccccttcccgtgggagcaaccggggtgacggcctagctgggtcctcggcccgggaggctccgtcggccacactgcacgcctgcggcgtgaggagggccgactgccagtgctgagttccgtggccattggcgccggtgcccgccgctgctggccggcgccggggcgttcctccttgcgtcctagggaggaaggtgggccgcggggcatcccgcggggcccgtacccagacggttcttgacgaggtggacgcaaggccaggcccggcccggcccggcccggcccggccaggccacccttagacgccgcgcacccgccttgttgagacttgccaccctgtcttgttgtgtccatgtccccgaggttgtcttggaggcgggccgttccccgtggtgctcatttctgcctgggggccttccggggaccccgcttgtctttgggggtgcgcaggcccttgccctgcgatcagaggcgcaccgaccgatgagttcggtggcaaagcttgagaaatggagactctctgggcatcggctaagggggcctggggccttcccaggcctgctggagtccgggaagccgggggcacccagaaggaaggacccgtcggactctgcctggggacagcctgctccgcgccagaagggtccgctgctcaggcagcatccccgtgcctctcctccagtggctccctcaggtagaatcggggcaggccccactggacgtgcagggaggaggctcggaggatgcatcctttgcaggacccggtctggtacagcagcagacggagccatctcccggggctttctggcttctccgagggtgttcaggagtctcccaagtgcacaggggctcgtgcccaaagggtggaggtcggcaccgcttcgctcaatccaggagtggagaaggaagctagaggaccctctggaggtggcaggtttaatgtcctgcttttttatttatttatttatttatttatttatttatttatttatttattttgtaatccactgaaagaaggcagaaggagtcgatgggcctcttaggccggaaaccttacaagcataggaccaaggcagaaaaggtccagagggttcatggtcctccgttccacctgaatccagctagagagcgagccagggggataggtgtgcccctcgtcgcccgtgcgctgaggcactgtcacgcaaagagacattcaccttccacgtcaacgcacctttaagggcgagagcggtccgccgtgcccaagaggaacgggatgacattcaactgggacttgcctcaccttggcttgggggacctcgagagcggtcccgtgggggcggtgttactcgtggtggtagaagtggagggcgtgtccgggtacttgagttcatgggcatctctcccgccgcctctcagcctatctgcaccatgtctcacacgttcagttgcagctcttaccgttttgaaggcgcacgtgggcaagaagtcctgggcagcacaagaaagtcaatcacgttgagacagagagagcaggagaggaagtgggccccagtagaagtgggcgagagagcgttgggtgggaacgtggcacgagagagagaaattatgagattgagagagagagagagagagagagagagagagagagaaagagaaagagagagagaaagagaaagagacagagaaaagaaactatgttgtttaaaatgccagcggaaagtccatgggggtgaaagagtccggcaatggccagggagttagcagcttggcgtagtgtcttcccactgttttgtctgtcttgagaatagcattcaacgcgactgtgttcccgcagcagacgttaggccgctgcccacgccttgagtgccggacgaggtcaacataggctttccgtcacagaatatgtttgggcaggaagatcggaacacttggggctgggccatcttccgctcccccacggcacacacgagtcgtcagggaaatgcccgcctctgtgtgtgttgtacgtgcagccttctgggcagagccgtggagagttggacgtaggccaggtgtgaggaggagaggtgtgtttggggtggccactggctcccttcctgcgtgacgtaggctggcgtgggctcttcccccagccccttgccggtgctgccacgtgagaagggcccgggtgccggtcccgctattccggaattgtgggttcacctgaagtttgaggccaaacccccagcggtcagtgggacgccagtcgcctttgacctcttggtcaagctggccttgccgtgacccgtgagaatgcccaagtgccaatgtgtcccggggggcagggccggggctgggatcctcgtgtgtgcccagtctccttctcgtccctgcgggttccaccatcctcccatcctaacgcatcgttagggatgcggttaggtcgggtccatccccagggcggtccaaggggaccgctttctggtttgtcaggaaggcaggctagtaagaagggtcccgccgagtcccatctgccaaggacagggtcccgcaggtgggccagggctggcccaaagcggccgagatgctgatccgccatgtgcggggcgctgttggcgttttttcctcagcaaagggcggagggagtggacgtgggggaagggcaggtgggcatttctggagcaatactgccatcaagaggaactggcttggcaatcccgcgcacccttcgctgtgctcgcctggggaggagtggcttgggactgtcctgggggaccaggcaggactagggcaggtgctcggacggatccgaggtctctggaggtccgagagaagcaggctccgccgcggggtcgggcggtggaagccccagagagaggcgccaggactagctggacagccaggacgccgggccgttcccggacaggaagcca

SEQ ID NO: 42595 - DNA, 3008 bp, Artificial sequence
  DNA replication origin
agaggcgccaggactagctggacagccaggacgccgggccgttcccggacaggaagccatggctcgggagcctggtggcggccatgatctgggcgggaccagcggaggcctccgccagggagcctgggctcggggccttgggcagtttgcctggtgccccttcccgtgggagcaaccggggtgacggcctagctgggtcctcggcccgggaggctccgtcggccacactgcacgcctgcggcgtgaggagggccgactgccagtgctgagttccgtggccattggcgccggtgcccgccgctgctggccggcgccggggcgttcctccttgcgtcctagggaggaaggtgggccgcggggcatcccgcggggcccgtacccagacggttcttgacgaggtggacgcaaggccaggcccggcccggcccggcccggcccggccaggccacccttagacgccgcgcacccgccttgttgagacttgccaccctgtcttgttgtgtccatgtccccgaggttgtcttggaggcgggccgttccccgtggtgctcatttctgcctgggggccttccggggaccccgcttgtctttgggggtgcgcaggcccttgccctgcgatcagaggcgcaccgaccgatgagttcggtggcaaagcttgagaaatggagactctctgggcatcggctaagggggcccggggccttcccaggcctgctggagtccgggaagccgggggcacccagaaggaaggacccgtcggactctgcctggggacagcctgctccgcgccagaagggtccgctgctcaggcagcatccccgtgcctctcctccagtgggtccctcaggtagaatcggggcaggccccactggacgtgcagggaggaggctcggaggatgcatcctttgcaggacccggtctggtacagcagcagacggagccatctcccggggctttctggcttctccgagggtgttcaggagtctcccaagtgcacaggggctcgtgcccaaagggtggaggtcggcaccgcttcgctcaatccaggagtggagaaggaagctagaggaccctctggaggtggcaggtttaatgtcctgcttttttatttatttatttatttatttatttatttatttatttatttattttgtaatcaactgaaagaaggcagaaggagtcgatgggcctcttaggccggaaaccttacaagcataggaccaaggcagaaaagggccagagggttcatggtcctccgttccacctgaatccagctagagagcgagccagggggataggtgtgcccctcgtcgcccgtgcgctgaggcactgtcacgcaaagagacattcaccttccacgtcaacgcacctttaagggcgagagcggtccgccgtgcccaagaggaacgggatgacattcaactgggacttgcctcaccttggcttgggggacctcgagagcggtcccgtgggggcggtgttactcgtggtggtagaagtggagggcgtgtccgggtacttgagttcatgggcatctctcccgccgcctctcagcctatctgcaccatgtctcacacgttcagttgcagctcttaccgttttgaaggcgcacgtgggcaagaagtcctgggcagcacaagaaagtcaatcacgttgagacagagagagcaggagaggaagtgggccccagtagaagtgggcgagagagcgttgggtgggaacgtggcacgagagagagaaattatgagattgagagagagagagagagagagagagagagagagagaaagagaaagagagagagaaagagaaagagacagagaaaagaaactatgttgtttaaaatgccagcggaaagtccatgggggtgaaagagtccggcaatggccagggagttagcagcttggcgtagtgtcttcccactgttttgtctgtcttgagaatagcattcaacgcgactgtgttcccgcagcagacgttaggccgctgcccacgccttgagtgccggacgaggtcaacataggctttccgtcacagaatatgtttgggcaggaagatcggaacacttggggctgggccatctaccgctcccccacggcacacacgagtcgtcagggaaatgcccgcctctgtgtgtgttgtacgtgcagccttctgggcagagccgtggagagttggacgtaggccaggtgtgaggaggagaggtgtgtttggggtggccactggctcccttcctgcgtgacgtaggctggcgtgggctcttcccccagccccttgccggtgctgccacgtgagaagggcccgggtgccggtcccgctattccggaattgtgggttcacctgaagtttgaggccaaacccccagcggtcagtgggacgccagtcgcctttgacctcttggtcaagctggccttgccgtgacccgtgagaatgcccaagtgccaatgtgtcccggggggcagggccggggctgggatcctcgtgtgtgcccagtctccttctcgtccctgcgggttccaccatcctcccatcctaacgcatcgttagggatgcggttaggtcgggtccatccccagggcggtccaaggggaccgctttctggtttgtcaggaaggcaggctagtaagaagggtcccgccgagtcccatctgccaaggacagggtcccgcaggtgggccagggctggcccaaagcggccgagatgctgatccgccatgtgcggggcgctgttggcgttttttcctcagcaaagggcggagggagtggacgtgggggaagggcaggtgggcatttctggagcaatactgccatcaagaggaactggcttggcaatcccgcgcacccttcgctgtgctcgcctggggaggagtggcttgggactgtcctgggggaccaggcaggactagggcaggtgctcggacggatccgaggtctctggaggtccgagagaagcaggctccgccgcggggtcgggcggtggaagccccagagagaggcgccaggactag

SEQ ID NO: 42596 - DNA, 3037 bp, Artificial sequence
  DNA replication origin
tggaagccccagagagaggcgccaggactagctggacagccaggacgccgggccgttcccggacaggaagccatggctcgggagcctggtggcggccatgatctgggcgggaccagcggaggcctccgccagggagcctgggctcggggccttgggcagtttgcctggtgccccttcccgtgggagcaaccggggtgacggcctagctgggtcctcggcccgggaggctccgtcggccacactgcacgcctgcggcgtgaggagggccgactgccagtgctgagttccgtggccattggcgccggtgcccgccgctgctggccggcgccggggcgttcctccttgcgtcctagggaggaaggtgggccgcggggcatcccgcggggcccgtacccagacggttcttgacgaggtggacgcaaggccaggcccggcccggcccggcccggcccggccaggccacccttagacgccgcgcacccgccttgttgagacttgccaccctgtcttgttgtgtccatgtccccgaggttgtcttggaggcgggccgttccccgtggtgctcatttctgcctgggggccttccggggaccccgcttgtctttgggggtgcgcaggcccttgccctgcgatcagaggcgcaccgaccgatgagttcggtggcaaagcttgagaaatggagactctctgggcatcggctaagggggcccggggccttcccaggcctgctggagtccgggaagccgggggcacccagaaggaaggacccgtcggactctgcctggggacagcctgctccgcgccagaagggtccgctgctcaggcagcatccccgtgcctctcctccagtgggtccctcaggtagaatcggggcaggccccactggacgtgcagggaggaggctcggaggatgcatcctttgcaggacccggtctggtacagcagcagacggagccatctcccggggctttctggcttctccgagggtgttcaggagtctcccaagtgcacaggggctcgtgcccaaagggtggaggtcggcaccgcttcgctcaatccaggagtggagaaggaagctagaggaccctctggaggtggcaggtttaatgtcctgcttttttatttatttatttatttatttatttatttatttatttattttgtaatcaactgaaagaaggcagaaggagtcgatgggcctcttaggccggaaaccttacaagcataggaccaaggcagaaaaggtccagagggttcatggtcctccgttccacctgaatccagctagagagcgagccagggggataggtgtgcccctcgtcgcccgtgcgctgaggcactgtcacgcaaagagacattcaccttccacgtcaacgcacctttaagggcgagagcggtccgccgtgcccaagaggaacgggatgacattcaactgggacttgcctcaccttggcttgggggacctcgagagcagtcccgtgggggcggtgttactcgtggtggtagaagtggagggcgtgtccgggtacttgagttcatgggcatctctcccgccgcctctcagcctatctgcaccatgtctcacacgttcagttgcagctcttaccgttttgaaggcgcacgtgggcaagaagtcctgggcagcacaagaaagtcaatcacgttgagacagagagagcaggagaggaagtgggccccagtagaagtgggcgagagagcgttgggtgggaacgtggcacgagagagagaaattatgagattgagagagagagagagagagagagagagagagaaagagaaagagagagagaaagagaaagagacagagaaaagaaactatgttgtttaaaatgccagcggaaagtccatgggggtgaaagagtccggcaatggccagggagttagcagcttggcgtagtgtcttcccactgttttgtctgtcttgagaatagcattcaacgcgactgtgttcccgcagcagacgttaggccgctgcccacgccttgagtgccggacgaggtcaacataggctttccgtcacagaatatgtttgggcaggaagatcggaacacttggggctgggccatctaccgctcccccacggcacacacgagtcgtcagggaaatgcccgcctctgtgtgtgttgtacgtgcagccttctgggcagagccgtggagagttggacgtaggccaggtgtgaggaggagaggtgtgtttggggtggccactggctcccttcctgcgtgacgtaggctggcgtgggctcttcccccagccccttgccggtgctgccacgtgagaagggcccgggtgccggtcccgctattccggaattgtgggttcacctgaagtttgaggccaaacccccagcggtcagtgggacgccagtcgcctttgacctcttggtcaagctggccttgccgtgacccgtgagaatgcccaagtgccaatgtgtcccggggggcagggccggggctgggatcctcgtgtgtgcccagtctccttctcgtccctgcgggttccaccatcctcccatcctaacgcatcgttagggatgcggttaggtcgggtccatccccagggcggtccaaggggaccgctttctggtttgtcaggaaggcaggctagtaagaagggtcccgccgagtcccatctgccaaggacagggtcccgcaggtgggccagggctggcccaaagcggccgagatgctgatccgccatgtgcggggcgctgttggcgttttttcctcagcaaagggcggagggagtggacgtgggggaagggcaggtgggcatttctggagcaatactgccatcaagaggaactggcttggcaatcccgcgcacccttcgctgtgctcgcctggggaggagtggcttgggactgtcctgggggaccaggcaggactagggcaggtgctcggacggatccgaggtctctggaggtccgagagaagcaggctccgccgcggggtcgggcggtggaagccccagagagaggcgccaggactagctggacagccaggacgccgggcc

SEQ ID NO: 42597 - DNA, 3036 bp, Artificial sequence
  DNA replication origin
gagaggcgccaggactagctggacagccaggacgccgggccgttcccggacaggaagccatggctcgggagcctggtggcggccatgatctgggcgggaccagcggaggcctccgccagggagcctgggctcggggccttgggcagtttgcctggtgccccttcccgtgggagcaaccggggtgacggcctagctgggtcctcggcccgggaggctccgtcggccacactgcacgcctgcggcgtgaggagggccgactgccagtgctgagttccgtggccattggcgccggtgcccgccgctgctggccggcgccggggcgttcctccttgcgtcctagggaggaaggtgggccgcggggcatcccgcggggcccgtacccagacggttcttgacgaggtggacgcaaggccaggcccggcccggcccggcccggcccggccaggccacccttagacgccgcgcacccgccttgttgagacttgccaccctgtcttgttgtgtccatgtccccgaggttgtcttggaggcgggccgttccccgtggtgctcatttctgcctgggggccttccggggaccccgcttgtctttgggggtgcgcaggcccttgccctgcgatcagaggcgcaccgaccgatgagttcggtggcaaagcttgagaaatggagactctctgggcatcggctaagggggcccggggccttcccaggcctgctggagtccgggaagccgggggcacccagaaggaaggacccgtcggactctgcctggggacagcctgctccgcgccagaagggtccgctgctcaggcagcatccccgtgcctctcctccagtgggtccctcaggtagaatcggggcaggccccactggacgtgcagggaggaggctcggaggatgcatcctttgcaggacccggtctggtacagcagcagacggagccatctcccggggctttctggcttctccgagggtgttcaggagtctcccaagtgcacaggggctcgtgcccaaagggtggaggtcggcaccgcttcgctcaatccaggagtggagaaggaagctagaggaccctctggaggtggcaggtttaatgtcctgcttttttatttatttatttatttatttatttatttattttgtaatcaactgaaagaaggcagaaggagtcgatgggcctcttaggccggaaaccttacaagcataggaccaaggcagaaaaggtccagagggttcatggtcctccgttccacctgaatccagctagagagcgagccagggggataggtgtgcccctcgtcgcccgtgcgctgaggcactgtcacgcaaagagacattcaccttccacgtcaacgcacctttaagggcgagagcggtccgccgtgcccaagaggaacgggatgacattcaactgggacttgcctcaccttggcttgggggacctcgagagcggtcccgtgggggcggtgttactcgtggtggtagaagtggagggcgtgtccgggtacttgagttcatgggcatctctcccgccgcctctcagcctatctgcaccatgtctcacacgttcagttgcagctcttaccgttttgaaggcgcacgtgggcaagaagtcctgggcagcacaagaaagtcaatcacgttgagacagagagagcaggagaggaagtgggccccagtagaagtgggcgagagagcgttgggtgggaacgtggcacgagagagagaaattatgagattgagagagagagagagagagagagagagagagagagagagagaaagagaaagagagagagaaagagaaagagacagagaaaagaaactatgttgtttaaaatgccagcggaaagtccatgggggtgaaagagtccggcaatggccagggagttagcagcttggcgtagtgtcttcccactgttttgtctgtcttgagaatagcattcaacgcgactgtgttcccgcagcagacgttaggccgctgcccacgccttgagtgccggacgaggtcaacataggctttccgtcacagaatatgtttgggcaggaagatcggaacacttggggctgggccatctaccgctcccccacggcacacacgagtcgtcagggaaatgcccgcctctgtgtgtgttgtacgtgcagccttctgggcagagccgtggagagttggacgtaggccaggtgtgaggaggagaggtgtgtttggggtggccactggctcccttcctgcgtgacgtaggctggcgtgggctcttcccccagccccttgccggtgctgccacgtgagaagggcccgggtgccggtcccgctattccggaattgtgggttcacctgaagtttgaggccaaacccccagcggtcagtgggacgccagtcgcctttgacctcttggtcaagctggccttgccgtgacccgtgagaatgcccaagtgccaatgtgtcccggggggcagggccggggctgggatcctcgtgtgtgcccagtctccttctcgtccctgcgggttccaccatcctcccatcctaacgcatcgttagggatgcggttaggtcgggtccatccccagggcggtccaaggggaccgctttctggtttgtcaggaaggcaggctagtaagaagggtcccgccgagtcccatctgccaaggacagggtcccgcaggtgggccagggctggcccaaagcggccgagatgctgatccgccatgtgcggggcgctgttggcgttttttcctcagcaaagggcggagggagtggacgtgggggaagggcaggtgggcatttctggagcaatactgccatcaagaggaactggcttggcaatcccgcgcacccttcgctgtgctcgcctggggaggagtggcttgggactgtcctgggggaccaggcaggactagggcaggtgctcggacggatccgaggtctctggaggtccgagagaagcaggctccgccgcggggtcgggcggtggaagccccagagagaggcgccaggactagctggacagccaggacgccgggccgttcccggac

SEQ ID NO: 42598 - DNA, 3005 bp, Artificial sequence
  DNA replication origin
agagaggcgccaggactagctggacagccaggacgccgggccgttcccggacaggaagccatggctcgggagcctggtggcggccatgatctgggcgggaccagcggaggcctccgccagggagcctgggctcggggccttgggcagtttgcctggtgccccttcccgtgggagcaaccggggtgacggcctagctgggtcctcggcccgggaggctccgtcggccacactgcacgcctgcggcgtgaggagggccgactgccagtgctgagttccgtggccattggcgccggtgcccgccgctgctggccggcgccggggcgttcctccttgcgtcctagggaggaaggtgggccgcggggcatcccgcggggcccgtacccagacggttcttgacgaggtggacgcaaggccaggcccggcccggcccggcccggcccggccaggccacccttagacgccgcgcacccgccttgttgagacttgccaccctgtcttgttgtgtccatgtccccgaggttgtcttggaggcgggccgttccccgtggtgctcatttctgcctgggggccttccggggaccccgcttgtctttgggggtgcgcaggcccttgccctgcgatcagaggcgcaccgaccgatgagttcggtggcaaagcttgagaaatggagactctctgggcatcggctaagggggcccggggccttcccaggcctgctggagtccgggaagccgggggcacccagaaggaaggacccgtcggactctgcctggggacagcctgctccgcgccagaagggtccgctgctcaggcagcatccccgtgcctctcctccagtgggtccctcaggtagaatcggggcaggccccactggacgtgcagggaggaggctcggaggatgcatcctttgcaggacccggtctggtacagcagcagacggagccatctcccggggctttctggcttctccgagggtgttcaggagtctcccaagtgcacaggggctcgtgcccaaagggtggaggtcggcaccgcttcgctcaatccaggagtggagaaggaagctagaggaccctctggaggtggcaggtttaatgtcctgcttttttatttatttatttatttatttatttatttatttattttgtaatcaactgaaagaaggcagaaggagtcgatgggcctcttaggccggaaaccttacaagcataggaccaaggcagaaaagggccagagggttcatggtcctccgttccacctgaatccagctagagagcgagccagggggataggtgtgcccctcgtcgcccgtgcgctgaggcactgtcacgcaaagagacattcaccttccacgtcaacgcacctttaagggcgagagcggtccgccgtgcccaagaggaacgggatgacattcaactgggacttgcctcaccttggcttgggggacctcgagagcggtcccgtgggggcggtgttactcgtggtggtagaagtggagggcgtgtccgggtacttgagttcatgggcatctctcccgccgcctctcagcctatctgcaccatgtctcacacgttcagttgcagctcttaccgttttgaaggcgcacgtgggcaagaagtcctgggcagcacaagaaagtcaatcacgttgagacagagagagcaggagaggaagtgggccccagtagaagtgggcgagagagcgttgggtgggaacgtggcacgagagagagaaattatgagattgagagagagagagagagagagagagagagagaaagagaaagagagagagaaagagaaagagacagagaaaagaaactatgttgtttaaaatgccagcggaaagtccatgggggtgaaagagtccggcaatggccagggagttagcagcttggcgtagtgtcttcccactgttttgtctgtcttgagaatagcattcaacgcgactgtgttcccgcagcagacgttaggccgctgcccacgccttgagtgccggacgaggtcaacataggctttccgtcacagaatatgtttgggcaggaagatcggaacacttggggctgggccatctaccgctcccccacggcacacacgagtcgtcagggaaatgcccgcctctgtgtgtgttgtacgtgcagccttctgggcagagccgtggagagttggacgtaggccaggtgtgaggaggagaggtgtgtttggggtggccactggctcccttcctgcgtgacgtaggctggcgtgggctcttcccccagccccttgccggtgctgccacgtgagaagggcccgggtgccggtcccgctattccggaattgtgggttcacctgaagtttgaggccaaacccccagcggtcagtgggacgccagtcgcctttgacctcttggtcaagctggccttgccgtgacccgtgagaatgcccaagtgccaatgtgtcccggggggcagggccggggctgggatcctcgtgtgtgcccagtctccttctcgtccctgcgggttccaccatcctcccatcctaacgcatcgttagggatgcggttaggtcgggtccatccccagggcggtccaaggggaccgctttctggtttgtcaggaaggcaggctagtaagaagggtcccgccgagtcccatctgccaaggacagggtcccgcaggtgggccagggctggcccaaagcggccgagatgctgatccgccatgtgcggggcgctgttggcgttttttcctcagcaaagggcggagggagtggacgtgggggaagggcaggtgggcatttctggagcaatactgccatcaagaggaactggcttggcaatcccgcgcacccttcgctgtgctcgcctggggaggagtggcttgggactgtcctgggggaccaggcaggactagggcaggtgctcggacggatccgaggtctctggaggtccgagagaagcaggctccgccgcggggtcgggcggtggaagccccagagagaggcgccaggactagctggaca

SEQ ID NO: 42599 - DNA, 3052 bp, Artificial sequence
  DNA replication origin
ccagagagaggcgccaggactagctggacagccaggacgccgggccgttcccggacaggaagccatggctcgggagcctggtggcggccatgatctgggcgggaccagcggaggcctccgccagggagcctgggctcggggccttgggcagtttgcctggtgccccttcccgtgggagcaaccggggtgacggcctagctgggtcctcggcccgggaggctccgtcggccacactgcacgcctgcggcgtgaggagggccgactgccagtgctgagttccgtggccattggcgccggtgcccgccgctgctggccggcgccggggcgttcctccttgcgtcctagggaggaaggtgggccgcggggcatcccgcggggcccgtacccagacggttcttgacgaggtggacgcaaggccaggcccggcccggcccggcccggcccggccaggccacccttagacgccgcgcacccgccttgttgagacttgccaccctgtcttgttgtgtccatgtccccgaggttgtcttggaggcgggccgttccccgtggtgctcatttctgcctgggggccttccggggaccccgcttgtctttgggggtgcgcaggcccttgccctgcgatcagaggcgcaccgaccgatgagttcggtggcaaagcttgagaaatggagactctctgggcatcggctaagggggcccggggccttcccaggcctgctggagtccgggaagccgggggcacccagaaggaaggacccgtcggactctgcctggggacagcctgctccgcgccagaagggtccgctgctcaggcagcatccccgtgcctctcctccagtgggtccctcaggtagaatcggggcaggccccactggacgtgcagggaggaggctcggaggatgcatcctttgcaggacccggtctggtacagcagcagacggagccatctcccggggctttctggcttctccgagggtgttcaggagtctcccaagtgcacaggggctcgtgcccaaagggtggaggtcggcaccgcttcgctcaatccaggagtggagaaggaagctagaggaccctctggaggtggcaggtttaatgtcctgcttttttatttatttatttatttatttatttatttatttatttattttgtaatcaactgaaagaaggcagaaggagtcgatgggcctcttaggccggaaaccttacaagcataggaccaaggcagaaaagggccagagggttcatggtcctccgttccacctgaatccagctagagagcgagccagggggataggtgtgcccctcgtcgcccgtgcgctgaggcactgtcacgcaaagagacattcaccttccacgtcaacgcacctttaagggcgagagcggtccgccgtgcccaagaggaacgggatgacattcaactgggacttgcctcaccttggcttgggggacctcgagagcggtcccgtgggggcggtgttactcgtggtggtagaagtggagggcgtgtccgggtacttgagttcatgggcatctctcccgccgcctctcagcctatctgcaccatgtctcacacgttcagttgcagctcttaccgttttgaaggcgcacgtgggcaagaagtcctgggcagcacaagaaagtcaatcacgttgagacagagagagcaggagaggaagtgggccccagtagaagtgggcgagagagcgttgggtgggaacgtggcacgagagagagaaattatgagattgagagagagagagagagagagagagagagagagagaaagagaaagagagagagaaagagaaagagacagagaaaagaaactatgttgtttaaaatgccagcggaaagtccatgggggtgaaagagtccggcaatggccagggagttagcagcttggcgtagtgtcttcccactgttttgtctgtcttgagaatagcattcaacgcgactgtgttcccgcagcagacgttaggccgctgcccacgccttgagtgccggacgaggtcaacataggctttccgtcacagaatatgtttgggcaggaagatcggaacacttggggctgggccatcttccgctcccccacggcacacacgagtcgtcagggaaatgcccgcctctgtgtgtgttgtacgtgcagccttctgggcagagccgtggagagttggacgtaggccaggtgtgaggaggagaggtgtgtttggggtggccactggctcccttcctgcgtgacgtaggctggcgtgggctcttcccccagccccttgccggtgctgccacgtgagaagggcccgggtgccggtcccgctattccggaattgtgggttcacctgaagtttgaggccaaacccccagcggtcagtgggacgccagtcgcctttgacctcttggtcaagctggccttgccgtgacccgtgagaatgcccaagtgccaatgtgtcccggggggcagggccggggctgggatcctcgtgtgtgcccagtctccttctcgtccctgcgggttccaccatcctcccatcctaacgcatcgttagggatgcggttaggtcgggtccatccccagggcggtccaaggggaccgctttctggtttgtcaggaaggcaggctagtaagaagggtcccgccgagtcccatctgccaaggacagggtcccgcaggtgggccagggctggcccaaagcggccgagatgctgatccgccatgtgcggggcgctgttggcgttttttcctcagcaaagggcggagggagtggacgtgggggaagggcaggtgggcatttctggagcaatactgccatcaagaggaactggcttggcaatcccgcgcacccttcgctgtgctcgcctggggaggagtggcttgggactgtcctgggggaccaggcaggactagggcaggtgctcggacggatccgaggtctctggaggtccgagagaagcaggctccgccgcggggtcgggcggtggaagccccagagagaggcgccaggactagctggacagccaggacgccgggccgttcccggacaggaagcca

SEQ ID NO: 42600 - DNA, 2981 bp, Artificial sequence
  DNA replication origin
cagagagaggcgccaggactagctggacagccaggacgccgggccgttcccggacaggaagccatggctcgggagcctggtggcggccatgatctgggcgggaccagcggaggcctccgccagggagcctgggctcggggccttgggcagtttgcctggtgccccttcccgtgggagcaaccggggtgacggcctagctgggtcctcggcccgggaggctccgtcggccacactgcacgcctgcggcgtgaggagggccgactgccagtgctgagttccgtggccattggcgccggtgcccgccgctgctggccggcgccggggcgttcctccttgcgtcctagggaggaaggtgggccgcggggcatcccgcggggcccgtacccagacggttcttgacgaggtggacgcaaggccaggcccggcccggcccggcccggcccggccaggccacccttagacgccgcgcacccgccttgttgagacttgccaccctgtcttgttgtgtccatgtccccgaggttgtcttggaggcgggccgttccccgtggtgctcatttctgcctgggggccttccggggaccccgcttgtctttgggggtgcgcaggcccttgccctgcgatcagaggcgcaccgaccgatgagttcggtggcaaagcttgagaaatggagactctctgggcatcggctaagggggcccggggccttcccaggcctgctggagtccgggaagccgggggcacccagaaggaaggacccgtcggactctgcctggggacagcctgctccgcgccagaagggtccgctgctcaggcagcatccccgtgcctctcctccagtgggtccctcaggtagaatcggggcaggccccactggacgtgcagggaggaggctcggaggatgcatcctttgcaggacccggtctggtacagcagcagacggagccatctcccggggctttctggcttctccgagggtgttcaggagtctcccaagtgcacaggggctcgtgcccaaagggtggaggtcggcaccgcttcgctcaatccaggagtggagaaggaagctagaggaccctctggaggtggcaggtttaatgtcctgcttttttatttatttatttatttatttatttatttattttgtaatcaactgaaagaaggcagaaggagtcgatgggcctcttaggccggaaaccttacaagcataggaccaaggcagaaaaggtccagagggttcatggtcctccgttccacctgaatccagctagagagcgagccagggggataggtgtgcccctcgtcgcccgtgcgctgaggcactgtcacgcaaagagacattcaccttccacgtcaacgcacctttaagggcgagagcggtccgccgtgcccaagaggaacgggatgacattcaactgggacttgcctcaccttggcttgggggacctcgagagcggtcccgtgggggcggtgttactcgtggtggtagaagtggagggcgtgtccgggtacttgagttcatgggcatctctcccgccgcctctcagcctatctgcaccatgtctcacacgttcagttgcagctcttaccgttttgaaggcgcacgtgggcaagaagtcctgggcagcacaagaaagtcaatcacgttgagacagagagagcaggagaggaagtgggccccagtagaagtgggcgagagagcgttgggtgggaacgtggcacgagagagagaaattatgagattgagagagagagagagagagagagagaaagagaaagagagagagaaagagaaagagatagagaaaagaaactatgttgtttaaaatgccagcggaaagtccatgggggtgaaagagtccggcaatggccagggagttagcagcttggcgtagtgtcttcccactgttttgtctgtcttgagaatagcattcaacgcgactgtgttcccgcagcagacgttaggccgctgcccacgccttgagtgccggacgaggtcaacataggctttccgtcacagaatatgtttgggcaggaagatcggaacacttggggctgggccatctaccgctcccccacggcacacacgagtcgtcagggaaatgcccgcctctgtgtgtgttgtacgtgcagccttctgggcagagccgtggagagttggacgtaggccaggtgtgaggaggagaggtgtgtttggggtggccactggctcccttcctgcgtgacgtaggctggcgtgggctcttcccccagccccttgccggtgctgccacgtgagaagggcccgggtgccggtcccgctattccggaattgtgggttcacctgaagtttgaggccaaacccccagcggtcagtgggacgccagtcgcctttgacctcttggtcaagctggccttgccgtgacccgtgagaatgcccaagtgccaatgtgtcccggggggcagggccggggctgggatcctcgtgtgtgcccagtctccttctcgtccctgcgggttccaccatcctcccatcctaacgcatcgttagggatgcggttaggtcgggtccatccccagggcggtccaaggggaccgctttctggtttgtcaggaaggcaggctagtaagaagggtcccgccgagtcccatctgccaaggacagggtcccgcaggtgggccagggctggcccaaagcggccgagatgctgatccgccatgtgcggggcgctgttggcgttttttcctcagcaaagggcggagggagtggacgtgggggaagggcaggtgggcatttctggagcaatactgccatcaagaggaactggcttggcaatcccgcgcacccttcgctgtgctcgcctggggaggagtggcttgggactgtcctgggggaccaggcaggactagggcaggtgctcggacggatccgaggtctctggaggtccgagagaagcaggctccgccgcggggtcgggcggtggaagccccagagagaggcg

SEQ ID NO: 42601 - DNA, 3036 bp, Artificial sequence
  DNA replication origin
caggactagctggacagccaggacgccgggccgttcccggacaggaagccatggctcgggagcctggtggcggccatgatctgggcgggaccagcggaggcctccgccagggagcctgggctcggggccttgggcagtttgcctggtgccccttcccgtgggagcaaccggggtgacggcctagctgggtcctcggcccgggaggctccgtcggccacactgcacgcctgcggcgtgaggagggccgactgccagtgctgagttccgtggccattggcgccggtgcccgccgctgctggccggcgccggggcgttcctccttgcgtcctagggaggaaggtgggccgcggggcatcccgcggggcccgtacccagacggttcttgacgaggtggacgcaaggccaggcccggcccggcccggcccggcccggccaggccacccttagacgccgcgcacccgccttgttgagacttgccaccctgtcttgttgtgtccatgtccccgaggttgtcttggaggcgggccgttccccgtggtgctcatttctgcctgggggccttccggggaccccgcttgtctttgggggtgcgcaggcccttgccctgcgatcagaggcgcaccgaccgatgagttcggtggcaaagcttgagaaatggagactctctgggcatcggctaagggggcccggggccttcccaggcctgctggagtccgggaagccgggggcacccagaaggaaggacccgtcggactctgcctggggacagcctgctccgcgccagaagggtccgctgctcaggcagcatccccgtgcctctcctccagtgggtccctcaggtagaatcggggcaggccccactggacgtgcagggaggaggctcggaggatgcatcctttgcaggacccggtctggtacagcagcagacggagccatctcccggggctttctggcttctccgagggtgttcaggagtctcccaagtgcacaggggctcgtgcccaaagggtggaggtcggcaccgcttcgctcaatccaggagtggagaaggaagctagaggaccctctggaggtggcaggtttaatgtcctgcttttttatttatttatttatttatttatttatttattttgtaatcaactgaaagaaggcagaaggagtcgatgggcctcttaggccggaaaccttacaagcataggaccaaggcagaaaaggtccagagggttcatggtcctccgttccacctgaatccagctagagagcgagccagggggataggtgtgcccctcgtcgcccgtgcgctgaggcactgtcacgcaaagagacattcaccttccacgtcaacgcacctttaagggcgagagcggtccgccgtgcccaagaggaacgggatgacattcaactgggacttgcctcaccttggcttgggggacctcgagagcggtcccgtgggggcggtgttactcgtggtggtagaagtggagggcgtgtccgggtacttgagttcatgggcatctctcccgccgcctctcagcctatctgcaccatgtctcacacgttcagttgcagctcttaccgttttgaaggcgcacgtgggcaagaagtcctgggcagcacaagaaagtcaatcacgttgagacagagagagcaggagaggaagtgggccccagtagaagtgggcgagagagcgttgggtgggaacgtggcacgagagagagaaattatgagattgagagagagagagagagagagagagagagagaaagagaaagagagagagaaagagaaagagagagagaaagagaaagagacagagaaaagaaactatgttgtttaaaatgccagcggaaagtccatgggggtgaaagagtccggcaatggccagggagttagcagcttggcgtagtgtcttcccactgttttgtctgtcttgagaatagcattcaacgcgactgtgttcccgcagcagacgttaggccgctgcccacgccttgagtgccggacgaggtcaacataggctttccgtcacagaatatgtttgggcaggaagatcggaacacttggggctgggccatctaccgctcccccacggcacacacgagtcgtcagggaaatgcccgcctctgtgtgtgttgtacgtgcagccttctgggcagagccgtggagagttggacgtaggccaggtgtgaggaggagaggtgtgtttggggtggccactggctcccttcctgcgtgacgtaggctggcgtgggctcttcccccagccccttgccggtgctgccacgtgagaagggcccgggtgccggtcccgctattccggaattgtgggttcacctgaagtttgaggccaaacccccagcggtcagtgggacgccagtcgcctttgacctcttggtcaagctggccttgccgtgacccgtgagaatgcccaagtgccaatgtgtcccggggggcagggccggggctgggatcctcgtgtgtgcccagtctccttctcgtccctgcgggttccaccatcctcccatcctaacgcatcgttagggatgcggttaggtcgggtccatccccagggcggtccaaggggaccgctttctggtttgtcaggaaggcaggctagtaagaagggtcccgccgagtcccatctgccaaggacagggtcccgcaggtgggccagggctggcccaaagcggccgagatgctgatccgccatgtgcggggcgctgttggcgttttttcctcagcaaagggcggagggagtggacgtgggggaagggcaggtgggcatttctggagcaatactgccatcaagaggaactggcttggcaatcccgcgcacccttcgctgtgctcgcctggggaggagtggcttgggactgtcctgggggaccaggcaggactagggcaggtgctcggacggatccgaggtctctggaggtccgagagaagcaggctccgccgcggggtcgggcggtggaagccccagagagaggcgccaggactagctggacagccaggacgccgggccgttcccggaca

SEQ ID NO: 42602 - DNA, 3001 bp, Artificial sequence
  DNA replication origin
tagctggacagccaggacgccgggccgttcccggacaggaagccatggctcgggagcctggtggcggccatgatctgggcgggaccagcggaggcctccgccagggagcctgggctcggggccttgggcagtttgcctggtgccccttcccgtgggagcaaccggggtgacggcctagctgggtcctcggcccgggaggctccgtcggccacactgcacgcctgcggcgtgaggagggccgactgccagtgctgagttccgtggccattggcgccggtgcccgccgctgctggccggcgccggggcgttcctccttgcgtcctagggaggaaggtgggccgcggggcatcccgcggggcccgtacccagacggttcttgacgaggtggacgcaaggccaggcccggcccggcccggcccggcccggccaggccacccttagacgccgcgcacccgccttgttgagacttgccaccctgtcttgttgtgtccatgtccccgaggttgtcttggaggcgggccgttccccgtggtgctcatttctgcctgggggccttccggggaccccgcttgtctttgggggtgcgcaggcccttgccctgcgatcagaggcgcaccgaccgatgagttcggtggcaaagcttgagaaatggagactctctgggcatcggctaagggggcccggggccttcccaggcctgctggagtccgggaagccgggggcacccagaaggaaggacccgtcggactctgcctggggacagcctgctccgcgccagaagggtccgctgctcaggcagcatccccgtgcctctcctccagtgggtccctcaggtagaatcggggcaggccccactggacgtgcagggaggaggctcggaggatgcatcctttgcaggacccggtctggtacagcagcagacggagccatctcccggggctttctggcttctccgagggtgttcaggagtctcccaagtgcacaggggctcgtgcccaaagggtggaggtcggcaccgcttcgctcaatccaggagtggagaaggaagctagaggaccctctggaggtggcaggtttaatgtcctgcttttttatttatttatttatttatttatttatttatttatttatttatttattttgtaatcaactgaaagaaggcagaaggagtcgatgggcctcttaggccggaaaccttacaagcataggaccaaggcagaaaaggtccagagggttcatggtcctccgttccacctgaatccagctagagagcgagccagggggataggtgtgcccctcgtcgcccgtgcgctgaggcactgtcacgcaaagagacattcaccttccacgtcaacgcacctttaagggcgagagcggtccgccgtgcccaagaggaacgggatgacattcaactgggacttgcctcaccttggcttgggggacctcgagagcggtcccgtgggggcggtgttactcgtggtggtagaagtggagggcgtgtccgggtacttgagttcatgggcatctctcccgccgcctctcagcctatctgcaccatgtctcacacgttcagttgcagctcttaccgttttgaaggcgcacgtgggcaagaagtcctgggcagcacaagaaagtcaatcacgttgagacagagagagcaggagaggaagtgggccccagtagaagtgggcgagagagcgttgggtgggaacgtggcacgagagagagaaattatgagattgagagagagagagagagagagagagagagagaaagagaaagagagagagaaagagaaagagagagagaaagagaaagagacagagaaaagaaactatgttgtttaaaatgccagcggaaagtccatgggggtgaaagagtccggcaatggccagggagttagcagcttggcgtagtgtcttcccactgttttgtctgtcttgagaatagcattcaacgcgactgtgttcccgcagcagacgttaggccgctgcccacgccttgagtgccggacgaggtcaacataggctttccgtcacagaatatgtttgggcaggaagatcggaacacttggggctgggccatctaccgctcccccacggcacacacgagtcgtcagggaaatgcccgcctctgtgtgtgttgtacgtgcagccttctgggcagagccgtggagagttggacgtaggccaggtgtgaggaggagaggtgtgtttggggtggccactggctcccttcctgcgtgacgtaggctggcgtgggctcttcccccagccccttgccggtgctgccacgtgagaagggcccgggtgccggtcccgctattccggaattgtgggttcacctgaagtttgaggccaaacccccagcggtcagtgggacgccagtcgcctttgacctcttggtcaagctggccttgccgtgacccgtgagaatgcccaagtgccaatgtgtcccggggggcagggctggggctgggatcctcgtgtgtgcccagtctccttctcgtccctgcgggttccaccatcctcccatcctaacgcatcgttagggatgcggttaggtcgggtccatccccagggcggtccaaggggaccgctttctggtttgtcaggaaggcaggctagtaagaagggtcccgccgagtcccatctgccaaggacagggtcccgcaggtgggccagggctggcccaaagcggccgagatgctgatccgccatgtgcggggcgctgttggcgttttttcctcagcaaagggcggagggagtggacgtgggggaagggcaggtgggcatttctggagcaatactgccatcaagaggaactggcttggcaatcccgcgcacccttcgctgtgctcgcctggggaggagtggcttgggactgtcctgggggaccaggcaggactagggcaggtgctcggacggatccgaggtctctggaggtccgagagaagcaggctccgccgcggggtcgggcggtggaagccccagagagaggc

SEQ ID NO: 42603 - DNA, 5167 bp, Artificial sequence
  DNA replication origin
aggcgccaggactagctggacagccaggacgccgggccgttcccggacaggaagccatggctcgggagcctggtggcggccatgatctgggcgggaccagcggaggcctccgccagggagcctgggctcggggccttgggcagtttgcctggtgccccttcccgtgggagcaaccggggtgacggcctagctgggtcctcggcccgggaggctccgtcggccacactgcacgcctgcggcgtgaggagggccgactgccagtgctgagttccgtggccattggcgccggtgcccgccgctgctggccggcgccggggcgttcctccttgcgtcctagggaggaaggtgggccgcggggcatcccgcggggcccgtacccagacggttcttgacgaggtggacgcaaggccaggcccggcccggcccggcccggcccggccaggccacccttagacgccgcgcacccgccttgttgagacttgccaccctgtcttgttgtgtccatgtccccgaggttgtcttggaggcgggccgttccccgtggtgctcatttctgcctgggggccttccggggaccccgcttgtctttgggggtgcgcaggcccttgccctgcgatcagaggcgcaccgaccgatgagttcggtggcaaagcttgagaaatggagactctctgggcatcggctaagggggcctggggccttcccaggcctgctggagtccgggaagccgggggcacccagaaggaaggacccgtcggactctgcctggggacagcctgctccgcgccagaagggtccgctgctcaggcagcatccccgtgcctctcctccagtggctccctcaggtagaatcggggcaggccccactggacgtgcagggaggaggctcggaggatgcatcctttgcaggacccggtctggtacagcagcagacggagccatctcccggggctttctggcttctccgagggtgttcaggagtctcccaagtgcgcaggggctcgtgcccaaagggtggaggtcggcaccgcttcgctcaattcaggagtggagaaggaagctagaggaccctctggaggtggcaggtttaatgtcctgcttttttatttatttatttatttatttatttatttatttatttatttattttgtaatcaactgaaagaaggcagaaggagtcgatgggcctcttaggccggaaaccttacaagcataggaccaaggcagaaaaggtccagagggttcatggtcctccgttccacctgaatccagctagagagcgagccagggggataggtgtgcccctcgtcgcccgtgcgctgaggcactgtcacgcaaagagacattcaccttccacgtcaacgcacctttaagggcgagagcggtccgccgtgcccaagaggaacgggatgacattcaactgggacttgcctcaccttggcttgggggacctcgagagcggtcccgtgggggcggtgttactcgtggtggtagaagtggagggcgtgtccgggtacttgagttcatgggcatctctcccgccgcctctcagcctatctgcaccatgtctcacacgttcagttgcagctcttaccgttttgaaggcgcacgtgggcaagaagtcctgggcagcacaagaaagtcaatcacgttgagacagagagagcaggagaggaagtgggccccagtagaagtgggcgagagagcgttgggtgggaacgtggcacgagagagagaaattatgagattgagagagagagagagagagagagagagaaagagaaagagagagagaaagagaaagagaaagagacagagaaaagaaactatgttgtttaaaatgccagcggaaagtccatgggggtgaaagagtccggcaatggccagggagttagcagcttggcgtagtgtcttcccactgttttgtctgtcttgagaatagcattcaacgcgactgtgttcccgcagcagacgttaggccgctgcccacgccttgagtgccggacgaggtcaacataggctttccgtcacagaatatgtttgggcaggaagatcggaacacttggggctgggccatctaccgctcccccacggcacacacgagtcgtcagggaaatgcccgcctctgtgtgtgttgtacgtgcagccttctgggcagagccgtggagagttggacgtaggccaggtgtgaggaggagaggtgtgtttggggtggccactggctcccttcctgcgtgacgtaggctggcgtgggctcttcccccagccccttgccggtgctgccacgtgagaagggcccgggtgccggtcccgctattccggaattgtgggttcacctgaagtttgaggccaaacccccagcggtcagtgggacgccagtcgcctttgacctcttggtcaagctggccttgccgtgacccgtgagaatgcccaagtgccaatgtgtcccggggggcagggccggggctgggatcctagtgtgtgcccagtctccttctcgtccctgcgggttccaccatcctcccatcctaacgcatcgttagggatgcggttaggtcgggtccatccccagggcggtccaaggggaccgctttctggtttgtcaggaaggcaggctagtaagaagggtcccgccgagtcccatctgccaaggacagggtcccgcaggtgggccagggctggcccaaagcggccgagatgctgatccgccatgtgcggggcgctgttggcgttttttcctcagcaaagggcggagggagtggacgtgggggaagggcaggtgggcatttctggagcaatactgccatcaagaggaactggcttggcaatcccgcgcacccttcgctgtgctcgcctggggaggagtggcttgggactgtcctgggggaccagaagggtccgctgctcaggcagcatccccgtgcctctcctccagtgggtccctcaggtagaatcggggcaggccccactggacgtgcagggaggaggctcggaggatgcatcctttgcaggacccggtctggtacagcagcagacggagccatctcccggggctttctggcttctccgagggtgttcaggagtctcccaagtgcgcaggggctcgtgcccaaagggtggaggtcggcaccgcttcgctcaattcaggagtggagaaggaagctagaggaccctctggaggtggcaggtttaatgtcctgcttttttatttatttatttatttatttatttatttattttgtaatcaactgaaagaaggcagaaggagtcgatgggcctcttaggccggaaaccttacaagcataggaccaaggcagaaaaggtccagagggttcatggtcctccgttccacctgaatccagctagagagcgagccagggggataggtgtgcccctcgtcgcccgtgcgctgaggcactgtcacgcaaagagacattcaccttccacgtcaacgcacctttaagggcgagagcggtccgccgtgcccaagaggaacgggatgacattcaactgggacttgcctcaccttggcttgggggacctcgagagcggtcccgtgggggcggtgttactcgtggtggtagaagtggagggcgtgtccgggtacttgagttcatgggcatctctcccgccgcctctcagcctatctgcaccatgtctcacacgttcagttgcagctcttaccgttttgaaggcgcacgtgggcaagaagtcctgggcagcacaagaaagtcaatcacgttgagacagagagagcgggagaggaagtgggccccagtagaagtgggcgagagagcgttgggtgggaacgtggcacgagagagagaaattatgagattgacagagagagagagagagagagagaaagagaaagagagagagaaagagaaagagacagagaaaagaaactatgttgtttaaaatgccagcggaaagtccatgggggtgaaagagtccggcaatggccagggagttagcagcttggcgtagtgtcttcccactgttttgtctgtcttgagaatagcattcaacgcgactgtgttcccgcagcagacgttaggccgctgcccacgccttgagtgccggacgaggtcaacataggctttccgtcacagaatatgtttgggcaggaagatcggaacacttggggctgggccatctaccgctcccccacggcacacacgagtcgtcagggaaatgcccgcctctgtgtgtgttgtacgtgcagccttctgggcagagccgtggagagttggacgtaggccaggtgtgaggaggagaggtgtgtttggggtggccactggctcccttcctgcgtgacgtaggctggcgtgggctcttcccccagccccttgccggtgctgccacgtgagaagggcccgggtgccggtcccgctattccggaattgtgggttcacctgaagtttgaggccaaacccccagcggtcagtgggacgccagtcgcctttgacctcttggtcaagctggccttgccgtgacccgtgagaatgcccaagtgccaatgtgtcccggggggcagggccggggctgggatcctagtgtgtgcccagtctccttctcgtccctgcgggttccaccatcctcccatcctaacgcatcgttagggatgcggttaggtcgggtccatccccagggcggtccaaggggaccgctttctggtttgtcaggaaggcaggctagtaagaagggtcccgccgagtcccatctgccaaggacagggtcccgcaggtgggccagggctggcccaaagcggccgagatgctgatccgccatgtgcggggcgctgttggcgttttttcctcagcaaagggcggagggagtggacgtgggggaagggcaggtgggcatttctggagcaatactgtcatcaagaggaactggcttggcaatcccgcgcacccttcgctgtgctcgcctggggaggagtggcttgggactgtcctgggggaccaggcaggactagggcaggtgctcgggacggatccgaggtctctggaggtccgagagaagcaggctccgccgcggggtcgggcggtggaagccccagagagaggcgccaggactagctggacagccaggacgccgggccgttcccggacaggaagccacggctcgggagcctggtggcggccatgatctgggcggg

SEQ ID NO: 42604 - DNA, 2176 bp, Artificial sequence
  DNA replication origin
gaggtctctggaggtccgagagaagcaggctccgccgcggggtcgggcggtggaagccccagagagaggcgccaggactagctggacagccaggacgccgggccgttcccggacaggaagccacggctcgggagcctggtggcggccatgatctgggcgggaccagcggaggcctccgccagggagcctgggctcggggccttgggcagtttgcctggtgccccttcccgtgggagcaaccggggtgacggcctagctgggtcctcggcccgggaggctccgtcggccacactgcacgcctgcggtgtgaggagggccgactgccagtgctgagttccgtggccattggcgttggtgcccgccgctgctggccggcgccggggcgttcctccttgcgtcctagggaggaaggtgggccgcggggcatcccgcggggcccgtacccagacggttcttgacgaggtggacgcaaggccaggcccggcccggcccggcccggccaccctcagacgccgcgcacccgccttgttgagacttgccaccctgtcttgttgtgtccatgtccccgaggttgtcttggaggcgggccgttccccgtggtgctcatttctgcctgggggccttccggggaccccgcttgtctttgggggtgcgcaggcccttgccctgcgatcagaggcgcaccgaccgatgagttcggtggcaaagcttgagaaatggagactctctgggcatcggctaagggggcccggggccttcccaggcctgctggagtccgggaagccgggggcacccagaaggaaggacccgtcggactctgcctggggacagcctgctccgcgccagaagggtccgctgctcaggcagcatccccgtgcctctcctccagtgggtccctcaggtagaatcggggcaggccccactggacgttcagggaggaggctcggaggatgcatcctttgcaggacccggtctggtacagcagcagacggagccatctcccggggctttctggcttctccgagggtgttcaggagtctcccaagtgcacaggggctcgtgcccaaagggtggaggtcggcaccgcttcgctcaattcaggagtggagaaggatcctagaggaccctctggaggtggcaggtggaatgtcctgctttttttttctttttaaatgtactgaagcaaggcagaaggattcggtgggcctcttaggcctgagacgttaaaagcacaggaccaaagcagaaaaggtccagagggttcatggttctctattccacctgaatacagctagatattgagccaggtggatacgtgtgcccctcctctcccgtgtgcagagacactgccatgcaaagagacattcaccttccacttcaatgcacatttaagcgtgaccgcggtccgctgtgacgaagaggtacgggatgacattcagctgagtgttgcctgatcttggcttggggcatctcggaagttggcttctgggtggtgttggtggtcgtcgtagaagcggagggtgtgatcggattcttgcgtagttctcttgctgcctctcagctcatctgctctatgtctcacgcgttcagttgcctctggtacctgcctacgtcggcaggaattcctggatagtctaggaaaccctatgacgttgagacagaataagacaggaatcgcgcaaagtagaagtgggcgagagagtgttgggtccgaatgtggcaagagagggagcgatagagtgtgagagggagcagaaaccatgtggttgatatcccaaagaaagtcgtgcgggctaaggagtctgtaaatggcgaggaatatcctttttgatatgacttgtatgcctaatcgatcccctgggagtttgaacatctccttcggcaagtggacagggatacaaaacggcatcatccttcatcactataaatttaaaaataagaaattccctagctatgttgattggatcatagtgtccaatatggcgaagaagattatgtcgggtgctaggcccaggcagttactgcagcagagagtgtggtggtaaaaaaaataacaagcaaggcgtgcttcacagccacttcattctacctaacgaaacttgagacaaatggaggagagcaaaggcataattatcccagtcttttctcctgatgtgacccctgctaattcctgcta

SEQ ID NO: 42605 - DNA, 1069 bp, Artificial sequence
  DNA replication origin
gaagttcttgtgtgctggagatgtgactgaggtttgtctcacggtggaggcaaggaattgcaactcagaaatacattgctacttggctgcctctactctattattgcaccccttgaaggtaaggttaattaagtcctgttgtggggtttgagggctggaatttaatttttggagctttattgaatgtcgggagcagattgggtagtaaaataaaatgcatattgagaataagatggccttctgacctttcagggtctagggctgtaaagcatctcagggttgcttccaaacgagccatgaactgggctgggtttttatacttgatgaaaaagagcctaaacactaactgattttgggagaggtcggataaagaaaaaggagcattaactttgattatgcctttagctccagccacctttttaagaggaaattgctggggaggtggggaagggccagtcgtggaacaaaactgtaagctggacagggtgtgaggaggggaggtgataaaaggattatagggtgggggagtggaggctgaggaagaattgggacctagctcgacctggggaggagaggagaggtcagatggtctgtagaaaaggaagattagaaagactgagagacacttggggttgggactgaggggacaggcgggagggaaagaaggaagatttgggaggagttgcattgagaacagagactagggagggaccgatgtgtaaaagaatgcctggatgtcaggcacttcagaccatttgcccattttacgacaagaattatttagatcctgtaggatggaaaaattgcaagtggcattttctggctatttggaacaactgtcgaggttgtattggggtcaagcggcattgcagaagaaaataaagcatttaggttttaggtcaggtgtgagttgaagaggttttaggtttttaagaacacaggctaagggagaagaagggggaatggagggtggaagcttgcccatagtgaaggaggcaagtccagagaaaagagagggtagagacatggagagaagagatggggggttctttccccccagaaaagcaga

SEQ ID NO: 42606 - DNA, 1368 bp, Artificial sequence
  DNA replication origin
ccgcgcagcgccgggtccgaaggcagggaagcggctgctggagcccctgtgacttcaggaccctgcctcaccttgctcgccgcgtcctggcgtcccgccgcttgtccgccgggtgctgcgctccgagggccaaagagggagtcgcgcggcgcagccggggctccctcctgctgcgaggcaccagcacccgcaccttcgcaccctctgctcgccccgaccacttcaccctgtcctggcgcaggcggagagcacggaccctaacccgaatgccgctgcagttattttcaaaagtccccgttccaggcttcccaggaataggagctgagctactgcggccgcagcggcagagcctccgcctgacctcaccagggtgtgggggggctgctgagggaggggggcgggaacccagttggggagggagggggcagtgggggggggagcgcgcgggcgggggaaacatggcggcgggggtggccccggcggcgcctgcgcgggaggcagggtggcggggagccggggctaggacggtgtgtggggtccgaacggaactcccaggctgtagcgaaagcgtgacagggccggaccctgaagctgaatgaccgctaagtggccctcacgcctcggaaaccgggaggctctggtgtgagcccacatggattctagtgccgggaggcagaaaaagtgaaaagtgtcaagtatccagggacaacagtgcagccgccccgggttagccactccaaggaggtccacccgtgcattctgccagccgtggcctcggcctcctcatagtcacggcggggcccgagcaaagggtgtgccctggaagcggtgccacctcacctcagtggggcccacgtctcaaaataagcctgacccaggctctcacacaaatatcactcttctagtgggataagcgcttcatccctccccctccctgctgcagtacacaacattaagaaagaggaaggataaaaactacaaataacagtttaacattttactgagcgtctgctatgaaccaagcactgaagcatcaacttacctaattcacagctactctacaagttacacactattgtctccattttacaagtgacaaaactgaggtgtataggttaaccaagttgccagaggttacataaatagtaagtggcagagcgggactcaggatcccaagcggtgtgattctggtacccaggctcttaaccactatgcaaactgcttccaaactctggtgggactgctcttctaagtcagaatcttgattctgctctatcagcctagcccccaaaaaaaaccccagtcaagcctgtttttccccttgcttgtcttctattcattctttgccttcttgacggttacagcctg
